United States Patent Application Publication US 2008/0050393 A1 - sequence listing, part 38

SEQ ID NO: 130750 - DNA, 2026 bp, Homo sapiens
gaacaagaggccagctacggcagagacgcctttgccaaggcaatatatgagcgccttttttgttggatcgttactcgcatcaatgatattattgaggtcaagaactatgacaccacaatccatgggaaaaacactgttattggtgtcttggatatctatggctttgaaatcttcgacaacaacagttttgaacaattctgtatcaattactgcaatgagaaactgcagcagctatttattcagctggttctgaagcaagaacaagaggaataccagcgggaagggatcccctggaaacatattgactacttcaacaatcagatcattgttgacctcgtggagcaacagcacaaagggatcattgcaatccttgatgatgcttgcatgaatgtcggcaaagtcaccgatgaaatgtttcttgaagcacttaacagtaaattgggcaaacacgcccatttttccagccgaaagctctgtgcctcagacaaaattctggagtttgatcgagattttcgaattcgacattatgcaggcgatgtagtctattctgtcattggttttattgacaaaaataaagatactttatttcaagatttcaagcgccttatgtataacagttcaaatcctgtgctcaagaatatgtggcctgaaggcaaactgagcattacagaggtgaccaagcgacctctgactgctgctaccttgtttaagaattctatgattgctctagtagacaaccttgcatcaaaggaaccatattacgttcgttgcatcaaacccaatgacaagaaatctccacagatatttgatgatgaacgctgccggcaccaagtagaatatcttggactactggaaaatgtgagagtgcgtcgggcaggatttgccttccgccagacatacgagaagtttcttcacaggtataagatgatctctgaattcacctggcccaaccatgaccttccttcagacaaagaggctgtcaagaaactaattgaacggtgtggttttcaggatgatgtagcttatgggaagaccaaaattttcattcgaacaccccgaacattgtttaccttggaagaactccgtgcccagatgctcataaggattgtcctctttctacaaaaggtgtggcggggcaccctggcccgcatgcggtacaaaagaaccaaggcagctctgacaataatcaggtactaccggcgctacaaagtgaagtcgtacatccacgaggtggccagacgcttccatggcgtcaagaccatgcgagactacgggaagcacgtgaagtggccaagccctcctaaagttcttcgccgttttgaggaggccctgcagacgattttcaatagatggagagcatcccagctcatcaagagcattccggcctcagacctgccccaggtcagggcaaaggttgcagccgtggaaatgttgaagggtcaaagggctgacctcgggctccagagggcctgggagggcaactatcttgcttcaaagccagatacacctcagacctcaggcacttttgtccctgttgctaatgaattgaaacggaaggacaaatacatgaatgtcctcttttcctgtcacgtccgtaaggtaaatcgatttagtaaggtggaagacagagcaatttttgtcactgaccgtcacctgtataaaatggatcccactaaacagtacaaggtgatgaagactatccctctattacaattgacttgtcttaattgtttccaatggaaaggaccaacttgtagtgttccatacgaaagacaacaaagacctcattgtctgcctcttcagcaaacagccaacccatgagagtcgaattggagaacttgttgggagtgctggtgaatcatttcaagagtgagaagcgccaccttcaagtggaacgtcaccaacccagtacagtgcagcctgcacggggaagaagtgcaccgtctccgtggagacgcggctcaaccagccccagcccgacttcaccaagaatcgctcgggcttcatcctcagcgtgcccgggaac

SEQ ID NO: 130751 - DNA, 1668 bp, Homo sapiens
atggagacacaaaaaacccttcaaaaaatcaatgaatccaggagctggtttgttgaaaagatcaacaaaattgatagaccactagcaagactcataaagaagaaaagagagaagaatcaaatagacacaataaaaaatgataaaggggatatcaccaccgatcccacagaaatacaaactaccatcagagaataccataagcacctctacgcaaataaactaaaaaatctagaagaaatggataaattcctggacacatacaccctcccaagactaaaccaggaagaaggaatccaacttacaagggttgtgaaggacctcttcaaggagaacaaaccactgctcaatgaaataaaagaggacaaaaacaaatggaagaacattccatgctcatggataggaagaatcaatatcgtgaaaatggccatactgcccaaggtaaatcgatttagtaaggtggaagacagagcaatttttgtcactgaccgtcacctgtataaaatggatcccactaaacagtacaaggtgatgaagactatccctctatacaatctacgtcttccttttcttttgcttctgtacagatttgaaaaagggcgcatctatacgttcattggagaagtcgtcgtttctgtgaacccttacaagttgttgaacatctatggaagagacacaattgagcagtataaaggccgtgagctgtatgagagaccgcctcacctttttgctattgcggatgctgcttacaaggctatgaagaggcgatcaaaagacacttgtattgtgatatcaggggaaagtggagctggtaaaacggaagccagtaagtacattatgcagtatattgcggccatcaccaaccccagtcagagagcagaggttgaaagagtgaagaatatgttgcttaagtccaactgtgttttggaagcttttggaaatgccaaaaccaaccgtaatgacaactcaagcaggtttggaaaatacatggatatcaactttgacttcaagggtgaccctattggtgggcatatcaataactacttactagaaaaggaaatgagtatttgtgtcttgggctttcccctgtcctatgcatcactcatctccattggccccgtaacatgtcacgcatgcacgcacgcacgcacgcaccacatgccctgccctacctgcttaagagattggatgaacatgactgttccacccagctggcaggagcttagccaaccagatgactgccttgggaaagaagttttttcctacattcaaagtcactggaaaaacagaaatgaacaagtacatatgatacctgtcctcatggagcttgcagtcaaagtgaaggtgtccactcccctgccccataaccagaaccaaacagtgcctgtggcaaaggtgatctaccccaaccagacaaagctgtgtgccatttccaagatgttgctggcactcgaactttcactcaaggtgtcttacataccttctcctcactctcattcagaatgtgcttccacattctatgcgctcagacttcaaaatctcaccaacttcaacatccaggagaatagaagagatggaaataaaggaggcaagaatggtttacagatccagctgaaaccgaatggaaggaaaggcagtggatttcatcaagatcctacagacaaggtgtaa

SEQ ID NO: 130752 - DNA, 2096 bp, Homo sapiens
  misc_feature (1)...(2096): n = a,t,c or g
tttttgataaaggggtaagggaagggatgccaggttcagcttcctacatatgggctagccagttttccccagcagccattttataaattagggatgcctttcccccatgcttgtttttctcaggtttgtccaaaggatncagaatagtgtagatatgcggcattatttctgagggctctgttctgtcccattgatngtatatctctgttttggtaccagtaccgatgctgttttggttactgtagccttgtagtatagtttgaagtcaggtagcgtgatgcctccagctttgttcttttggcttaggattgacttggcgatgcgggctcttttttggttccatatgaactttaaagtagtttttttccaattctgtgaagaaagtcattggtagcttgatggggatggcattgaatctgtaaattaccttgggcagtatggccattttcacgatattgattcttcctacccatgagcatggaatgttcttccatttgtttgtgtcctcttttatttccttgagcagtggtttgtagttctccttgaagaggtccttcacatcccttgtaagttggattcctaggtattttattcactttgaagcaattgtgaatgggagttcactcatgatttggctctctgtttgtctgttgttggtgtataagaatgcttgtgatttttgtacattgattttgtatcctgagactttgctgaagttgcttatcagcttaaggagattttgggctgagacaatggggttttctagatatacaatcatgtcgtctgcaaacagggacaatttgacttcctcttttcctaattgaataccctttatttccttctcctgtctaattgccctggccagaacttccaacacatttcctccttgtacctctggtagaattcggctgtgaatctgtctggtcctggacttttttttggttggtaggctattatttattgcctcaatttcagaacctgatattgatctattcagagattcagcttcttcctggtttagtcttgggagggtttatgtgcccaggaatttatacatttcttctagattttctagtttatttgtgtagaggtgtttatagtattctctgatggtagtttgtatttctgtgggatcggtggtgatatcccctttatcatttttttattgtgtctatttgatttcttctctctttttttctttattagtcttgctagcggtctatcaattttgttgatcctttcaaaaataaaaaataaaaaaccagctcctgggattcattgatttttttgaagggttttttggtgtctttatctccttcagttctggctctgattttaaggttatttcttgccccttctgctaggctttnatgaatgtgtttcgcctcttgcttttctaaggttcttttaactgtgattatgttaggggtgtcaattttggatctttccccgctttctcttgtggggcatttagggcttataaatttccctctacacactggctttgaatgtgtcccagaagattctggtatgttggtgtctttgttctcttttggtttcaaagaacatctttctttatttctgccttcctttcgttatggacccaatagtcattcaggagcaggttgttcagtttccatgtagttgagcagttttgagttgagtttcttaatcctgagttctaatttgattggcactgtgggtctgagagatagtttggttataatttctgttcttttacatttgctgacgagagctttacttccaactatgtggtcaattttggaataagtgcaatgtgttgctgagaagaatgtatattctgttgatttggggtggagagttctgtagatatcaattaggtctgcttggtgcagagctgaattcagttcctggatatcattgttaactttctgtctcattgatctgtctattgttgacagtggggtgttaaagtctcccattattaatgtgtgggagtctaagtctctttttaggtcactgaggacttgctttatgaatctgggtgctcctgtattgggtgcataaatatttaggatagttagctcctctcgttgaattgatccctttaccat

SEQ ID NO: 130753 - DNA, 387 bp, Homo sapiens
atggcctgcagggtcctgcaaggtctcccctttgcctgcctgtccagccccatctgttcccactctgcccttactcttgatcattctctcctgtgcctgaactttttcttcaacccttatgcccttctgcctaacttttacttatttggcaagttccagctcagaattccttcctctggaaagccttttctgacttccgaagaccaggaccctgctgggatctttgagcttgtggaggtggtcggcaatggaacctacggacaggtgtacaaggtgagacgaatggtgtggaagtatgacctccacatctgcagggcagtcttgggaggagtggaaggaagtagattcctggtctgcaggtctgaagggggctatgggagatgctag

SEQ ID NO: 130754 - DNA, 639 bp, Homo sapiens
atggcggggaagtctacttcagagtggcctttgagagctcagaaacctgaaaatgaaataaatgagccacaggttgcagatgctgctaaaaacacagaagtctgtgatgaactaatgagcagacataacatctacgtgcaagcaatcaattaccctacggtgccccggggagaagagctcctacggattgcccccacccctcaccacacaccccagatgatgaactacttccttgcggttatcaatcacaagaaacgtaaaaatagcccgcgaatcgtccagtcaaacgacctcactgaggcggcatatagtctctcccgggatcaaaaacgtatgctgtatctgttcgttgaccagatcagaaaatctgatggcaccctacaggaacatgacggtatctgcgagatccatgttgctaaatatgctgaaatattcggattgacctctgcggaagccagcgagccggggaatccccggcagcaccgatatccgcagagcccaagaagtgggcctctctgccccgcccccccggctcgccgagggctacgcggcgcgcctgcgcagaagaaggcagcgcccaaggcgcatgcgcagcggtcactcccgctgtatattaaggcgccggcgatcgcggcctga

SEQ ID NO: 130755 - DNA, 2613 bp, Homo sapiens
ggcacgaggagacagaataggtaactagttaggatgcaagagtaaaagagcaactttctttgaatcttcagtgattaaccaataaagttgagatgggattttactcattaagtagttttggatagttaaggctgaatttgctttgtggaggttttgaaagctgttataaccagaggaagaaatatatgtgtgtttcacaaagttgtagctgcatttactgaaaatgttgtatatgggtcagtgaatgtaatgtatgtgatgcttaacataaagctatctgagaaaacattctgattcaagactggaaatatctactttaagtatagtcaactattctgtcattgcttaaggcagcttgttggttttacccaaaattgtagaacctaaagaaatgaaggtctttggacttttgggggaagagatagtagatttttgtagtcttgttttttaatatgaaatagttttccgggaaaggttatataaataagcatcaaatggttgtttacgtttaagaaattgaattatagatgttaacttaatgtcttctttttttcttccatttctttcaaaggtttgggccccatggtatccctgtgacagtaatttcccaaaagggaatataaaggataaaccagaaaggccatggccggctccaaagtaatacattccccaagaaggggaccagaagtcaaggtgtgaagcaaatgggtgctgttccccgatgaccccttctccctgtccccgcatccccgagctgagcttggcctgaaagcctgtggacttcccaaacccacccacctctcttcccatgaaggagcaccttatcctccccctttgtttatcagggacacatataaccaatcaatacctcagccacctcctcggaaaattaagcgacccaaacgaaaaatgtacagggaagaacccacttcaataatgaatgctattaaactacgacccaggcaagtyctgtgtgataaatgtaaaaacagtgttgttgctgaaaaaaaggaaattagaaaaggtagtagtgcaactgcactcttctaaatatggaagataaaaaacggggaaatgtaagtgtaactactgtgaacaaaaaactgaaaactgaccataaagtggatgggaaaaaccaaaatgaaagccagaaaagaaatgctgtggttaaggtttcaaatattgctcacagcagaggcagagtagtaaaagtttctgctcaggcaaatacatcaaaagctcagttaagtactaaaaaagttctccagagttaaggaacatgggatgcatgcgaaagctcgggaagtgttaaaaattgccaaagaaaaggcacaaaagaagcaaaatgaaacctctacttccaaaaatgcacattcaaaagtccatttcacacgtcgatatcagaatcctagctcaggttcccttccaccccgggttcgtttaaaaccacagaggtacaggaatgaagaaaatgactcttctctgaagacaggacttgagaaaatgcggagtggcaagatggcacccaagccccagtctcgctgcacctctacccgctcagcaggtgaggccccttcagaaaatcagagtccctcaaaaggccctgaagaggccagcagtgaggttcaggacacaaatgaagtgcatgtgcctggtgatcaggatgaaccacagacattgggcaaaaagggcagcaaaaacaatatctctgtttatatgaccctaaatcaaaagaaatcttgactctttccagtggtttcagtgtgtagcattgatagcacagatgatttgaaatcttccaactctgagtgtagttcttctgaaagctttgattttcctccaggcagtatgcatgcaccttccacctcctccacttcctcctcttcaaaggaagagaaaaagctcagtaattccttgaaaatgaaagtcttttccaaaaacgtctctaaatgcgtcacaccagatggcaggaccatatgtgtaggggacattgtttgggccaagatatatggcttcccttggtggccagcccgtattcttactataactgtgagccggaaagataacggccttttagtccgacaggaggcccgtatttcatggtttgggtctccaacaacatctttccttgctctttcacaactctccccctttttagaaaacttccagtcacgctttaataagaagagaaagggcctgtatcgcaaggctatcacagaggcagctaaggctgccaagcagctgacccccgaagtgcgggctttgttgacacagtttgaaacgtgaacatggggcagtaaggtagggcaagaccattgggaagttcaccacagattttctagtctagttaggaataatttctacaaaatagcgcggccagattggagagagaagttgcactcagttggctggctttttaatacttaccttatagccatttttagactgagagcttaaactgaacatataatcaaattttgtgttaaggaagcgagattttagcagtatttttcagttttgaaggtcgaaaccatcccaaggcataggagccatatcctcaactgaaattgaatttttgtagggactgttaattgccatttgtacctaatactg

SEQ ID NO: 130756 - DNA, 409 bp, Homo sapiens
cagctctgtgggcagggcatagctgagcaaaaggcagcagaaacttctgtggacttaaacgtccctgtctgatagctctgaagagagcagtggttctcccagcatggtgtttgagctctgagaacggacagacggcctcctcaagtgggtccctgaccccagtgtagcctgactgggaaacacctcccagtaggggctgacagacacctcaaacaggcaggtgtccctctggacaaagcttccagaggaaggatcaggcagcaatatttgctgttctgtagcctctgctggtgatacccaggcaaacagggtctgcagtggacctccagcaaactccaacagacctgcagctgagggacgtgaccattagaaggaaaactagtagacagaaaggaatagcttcaacatc

SEQ ID NO: 130757 - DNA, 274 bp, Homo sapiens
  misc_feature (1)...(274): n = a,t,c or g
gtgaggnctctgctaacgctggcagctttctccacagccatcgctgccctcaaactttggaatgaagatttccgatatggctactcttattacaacagtgcctgccgcatctccagctcgagtgactggaacactncagcccccactcagagtccagaagaagtcagaaggctacacctatgtacctccttcatggacatgctgangaaaagagaccagaaggaaatgttggaagtgagtggaatctagccatgnctctcctgattattagtgc

SEQ ID NO: 130758 - DNA, 1257 bp, Homo sapiens; identical to SEQ ID NO: 130345

SEQ ID NO: 130759 - DNA, 1080 bp, Homo sapiens
atggagggcttgatcaatcctacactgttgacaaaggcctggattattaccctgaaggaaggggactgcaagtgggaaacactggtcaacgggctgcatgggacccctggcgccctagagtgtcttggtgccctggcagcggctgcgggtctcacccaccccacatggccattgggtgtggcaagtgcatgctgcgaacacaaccaagtaccccagctgggaggggagaaggaaaactcaggtcatgtgaatgaattgaacgatagtaaatatgaagactttattgccaatgaaagtgactctcagctggaaaggagatggagtgggaagtggagcctgggttttttatggatacagcatggggggcagggaggaacatgggtggtttttgaaaaggcaaccattggagcaggaaaacaggaatacatgtcctcaatttgtgctacagttctaggcttgagcgtgggctttgccagactgtgctttcagtggtcaggagcactagttgaaaaatccgagggcttccgttccaagatggccaaacaggaacagctccggtctgcagctcccagtgtgatcaacacagaagacaggtggtttctgcatttccaactgaggtacctggttcatctcattgggactgaaaggaatagcatcaacatcgataaaaaggacatccacaccaaaacaccatctgtaggtcaccatcatcaaagaccaaaggtagataaaacaataaagatggggagaaagcagagcagaaaagctgaaaattctaaacaccagagcacccattctcctccaaaggattgcagctccttgccagaaatggaacaaagcaggaaggagaataactttgaggtgttgagagaagaagccttcagaaagtcagtaacaacaaacttctcagagctaaaggaggatgttcaaacccatcgcaaggaagctaaaaaccttgaaaaaagattagacaaatggctaactagaataaacagtgtagagaagaccttaaatgacctgatggagctgaaaaccatggcacgagaactacatgatgcatgcacaagcttcagtagctga

SEQ ID NO: 130760 - DNA, 1229 bp, Homo sapiens
ataatccttcgcatttgcaaattaacaatttccaaagaacttttggacagtgggtcatccagactcacaatgacccactataagcacaggtatttttcccactctgcagaggagcagattatttcagaagaattaaatgaaagtgaaatgatttgccagcatcatcacacagctgccaggtgcccctctgagacgaagcttccagaggaaggatcaggaaacaacatttgccgttctgcaatatttgctgttctgcaacctccactggtgatactcaggcaaacagggactggagtggacctccagcaaactccaacagacctgcagctgaaggtcctaactgtaacaaggaaaactaacaaacacaaaggacatccacaccaaaaccccatctgtacatcaccatcaacaaagaccaaagagaatgacttcgacgagctgagagaagaaggcttcagacgatcagtaataacaaacttctccaagctaaaggaggatgttcgaacccatcgcaaagaagctaaaaaccttgaaaaaagattagacgaatggctaactagaataaacagtgtagagaagaccttaaatgacctgatggagctgaaaaccatggcacaagaactacgtgacacatacacaagcttcagtagccgatttgatcaagtggaagaaagggtatcagtgattgaagatcaaatgaatgacatgaagcgagaagagaagtttagagaactcaaagagtacaaagaaatgaacaaagcctccaagaaatatgggactatgtgaaaagaacaaatctacgtttgattggtgtacctgaaaagatacaaacgaccatcagagaatactataaacacctctatgcaaataaactagaaaatctagaagaaatggataaattcctggacacatacacctgcccaagactaaaccaggaagaagttgaatccctgaatagaccagtaacaggctctgaaattgaggcaataattaatagcctaccaacaaaaaaagtccaggaccaggcagattcacagccaaattctaccagagtttttaaaacagtctgcatatcttctcttgggcatacaacagccagtgcagatacccaggatgtctgccagctgccagtcacttctcttctggagcaagggctttcttccaagtcagcaggcttcttagactatgccgtccagcgactttggttgctaggcacagaacccctgtag

SEQ ID NO: 130761 - DNA, 678 bp, Homo sapiens
  misc_feature (1)...(678): n = a,t,c or g
gccctttttttttttttttctgggaacaataacatgagagtttattatcacatgactactcaggaggggacatgaagcggagcaggatggggaaggggtgtaaggaatgggcaagtgctgctggaagcaagggctgtggcccacggtccatgggnccccaggataaactggggctgttgaaagagcctcttttccctcagtctggttcttcttcccagcagtcagatgcagggacgcccggtgcagaagcacccaggcactaataatcaggagaggcatggctagattccactcacttccaacatttccttctggtctcttttcttagggactcacccctttggttgggaacattctcccagntagtacagcccacagaggggccagagatgccagaagcagcagaatccagacacccaagagcatggcctgaaagggttctgaaaaaggccttcagcatgtcccatgaaggaggtacataggtgtagccttctgacttcttctggactctgagtgggggctggagtgctcgcagtcactcgagctggagatgcggcaggcactgttgtaataagagtagccatatcggaaatcttcattccaaagtttgagggcagcgatggctgtggagaaagctgccagcgctagcagagtcctcagtagggcccagtatgtacc

SEQ ID NO: 130762 - DNA, 1757 bp, Homo sapiens
cccgggtcgacccacgcgtccgcccgctcgcaggtcccgaggagcgcaggtgaggcggcaccccactcccggtggtcctccgggcctccttccgcacgcaccccgagctgccttcgcacagttggaggagcgtatgagggacccccacccagggatgacactccaggaaggggactgcataggaagccagactgtgtccctgacaatgggaacagccgacagtgatgagatggccccggaggccccacagcacacccacatcggatgtgcacatccaccaggagttttgccctggccaagctcctgctcacctgctgctctgcgctgcggccccgggccacccaggccaggggcagcagccggcctgctggttggcctcgtgggtgatgcagatcgtgctggggatcttgagtgcagtcctaaggaaggatttttctacatccgcgactacaccctcctcgtcacctcgggagctgccatctggaaaaggggctgtggctgtgctggctggagctgctgccttcatttacgagaaacggggtggtacatactgggccctgctgaggactctgctaacgctggcagctttctccacagccatcgctgccctcaaactttggaatgaagatttccgatatggctactcttattacaacagtgcctgccgcatctccagctcgagtgactggaacactccagcccccactcagagtccagaagaagtcagaaggctacacctatgtacctccttcatggacatgctgaaggtaggtggccaaggggaaggggcagcagcaggccttgttcagaacccttcaggccatgctcttgggtgtctggattctgctgcttctggcatctctgacccctctgtggctgtactgctggagaatgttcccaaccaaaggggtgagtccctaaggtgtgtgcctgtgtatttggggcagtggaactgctcaaaggagacaggaatggacagtggacagtttggggaggagaaaggggcccatgacccaagtcccacctattatcatgcctgtctttctacccagtggtggcccagcccagaaagcccctatccccaaccaagtggcccccaagtcaaagagcccaggaatccagggaagtccatatccatgctatgcctttggatcaggtaccatgctgctgattctggtagctccagagctaagctgcccctggaggagagactccgccctttctctcccactcacgattgtcttgcctttcctcttccattagaaaagagaccagaaggaaatgttggaagcaggtgcccctctgggacaaagctaccggaggaaggatcaggcagcaatatttgctgttctgcaatatttcctgttctgcagcctccgctggtgatacctaggcaaacaaggtctggagtggacctccagcaaactccaacagacctgcagctgagggacctgactgatcgcagctccttgccagcaatggaacaaagctggatagagaatgactttgatgagatgacagataggcttcagaaggaggatgttcgaattcatcgcaaggaagctaaaaaccttgaaaaaagattagacaaatggctaactagaataaacagtgtagagaagagcttaaatgacataatggagctgaaaaccatggcacgagaactacgtgaagcatgcacaagcttcagtagccgatttgatcaagtggaagaaagggtatcagtgattgaagatcaaattaatgaaataaagtga

SEQ ID NO: 130763 - DNA, 821 bp, Homo sapiens
aatcaaaaagagcccgcattgccaagacaatcctaagccaaaagaacaaagctggaggcatcacactacctgacttcaaactatactacaaggctacagtaaccaaaacagcatgctactggtaccaaaacagagatatagaccaatggaacagaacagagccctcagaaataataccacacatctacaaccatctgatctttgacaaacctgacaaaaacaagaaatggggaatggattccctatttaataaatggtgctgggaaaactggctagccatatgtagaaagctgaaactggatcccttccttacaccttatgcaaaaatcaattcaagatggattaaagacttacatgttagacctaaaaccataaaaaccctagaagaaaacctaggtaataccattcaggacataggcatgggcaaagacttcatgacgaaaacacctaaagcagtggcaacaaaagccaaaactgacaaatggcatctaattaaactaaagagcttctgcacagcaaaagaaactaccatcagagtgaactggcaacctacagaatgggagaaaatttttgcaatctacccatctgacaaagggctaataaccagaatctacaaagaactcaaacaaattcacaagaaaaaatcaaacaaccccatcaaaacgtgaatggatgaagctggaaaccataattctcagcaaactatcgcaaggacaaaaatccaaacaccgcatgttctcactcataagtggaaattgaacaatgagaacacatggacacaggaaggggaacatcacacactggggcctgttgtggggtgg

SEQ ID NO: 130764 - DNA, 882 bp, Homo sapiens
atggcgcgaacctgggaggcagagcttgcagtgagcccagatggcgccactgcactccagcctgggcgacagagcgagactctgtctcaaaaaaaaaaaaaaaaagaagaagaagaagaagaagaagaagaagaggaggaggaggaggaggaggaggaggaggaggaggaggaagaagaagaagaagaagaagaagaagaagaagaagaagaagaagaagaagaagaagaagaagaagaagaagaagaaggagaagaagaagaaggagaagaggaagaagatcaactagacacaatgttatgggactcatcaacaaacctcaccaacacagcgctcagcaaggagaagaccatgttcagttcaagggccaagatcgtgaagcccaatggcgagaagccggatgagtttgaatccggaatctcccaggctcttctggagctggagatgaacttggacctcaaggctcagctctgggagctgaatattacggcagccaaggaaattgaagttggtggtggtcggaaagctatcataatctttgttcccgttcctcaactgaaatctttccagaaaacccaagtccagctaaggagaattctgcctaagccaactcaaaaaagctgtacaaacaataagcaaaagcttcccaggagctgtactctcacagctgtgcatgatgccatccttgaggacttggtcttcccaagcgaaattgtgggcaagagaatccacgtgaaactggatggcagccacctcataaagattcatttggacgaagcacagcagaacaatgtggaacacaaggttgaacccttttctggtgtctataagaagctcatgggcaaggatgttaattttgaattcccagagtttcaattgtaa

SEQ ID NO: 130765 - DNA, 615 bp, Homo sapiens
atgggcaaggacttcatgtctaaaacaccaaaagcaatggcaacaaaagccaaaattgacaaatgggatctaatcaaactaaagagcttctgcacagcaaaagaaactaccatcagagtgaacaggcaacctacagaatgggagaaaagttttgcaatctactcatctgacaaagggctaatatccagaatctacaatgaactccaacaaatttacaagaaaaaaacaaacaaccccatcaacaagtgggcaaaggacatgaacagacacttctcaaaagaagacatttatgcagccaaaagacacatgaaaaaatgctcatcatcaatggccatcaaagaaatgcaaatcaaaactacaatgagataccatctcacaccagttagaatggcaatcattaaaaagtcaggaaacaacagggacacggatgaagatggaaaccatcactctcagcaaactatcgcaaggacaaaaatccaaacactgtatgttctcactcataggtgggaattgaacaatgagaacacatggacacaggaaggggaacatcacacacaggggcctgttgtggggtggaagacaagggggagggagagcattaggacaaacgcctaa

SEQ ID NO: 130766 - DNA, 1268 bp, Homo sapiens
gtggaggaacttcgggcgtctaggcgggcctgtgcgccgcccgggcgaggatgcggctgttccggtggctgctgaagcagccggtgcccaagcagatcgagcgctactcgcgcttttcgccgtcgccgctctccatcaaacaattcctggacttcgggagagataatgcatgtgagaaaacttcatatatgtttctacgaaaggaacttcctgtgcggctggctaacacaatgagagaagttaatcttctgccggataatttacttaaccgcccttcagtgggattggttcagagttgggatatgcagagttttcttgaacttttataatatgaaaataagagccctgaggatccacaggtcttggataactttctacaagttctgattaaagtcagagatagacacaatgatgtggttcctacaatggcacaaggagtgattgaatacaaggagaagtttgggtttgatcctttcattagcactaacatccaatattttctggatcggttttataccaaccgcatctctttccgcatgcttattaatcagcacacacttctgtttgggggtgacactaatcctgttcatcctaaacacataggaagtatcgatcccacctgtaacgtggcggatgtggtgaaagatgcatatgaaacagccaagatgctgtgtgaacagtattacctggtagctccagagctggaagttgaagaattcaatgccaaagcgccagacaaacctattcaggtggtttatgtgccctcacatctgtttcatatgctatttgagttgttcaagaactcaatgagagcgacagttgaactctatgaagacagaaaagagggctaccctgctgttaaaaccctcgttactttgggtaaagaagacttatccattaagatcagtgacctaggtggtggtgtcccacttcgaaaaatagatcgtctttttaactacatgtattctactgctcctaggcccagcctggagcctaccagagctgcccctttggctggatttggttatggtttgccaatttcccgtctgtatgctagatattttcaaggagatctgaaactgtattccatggaaggagtgggtactgatgctgtcatttatttgaaggctctttcaagtgagtcatttgagagacttccagtttttaataagtccgcatggcgccattacaagaccacgcctgaagccgatgattggagcaatcccagcagtgaacccagggatgcttcaaaatacaaagcaaaacag

SEQ ID NO: 130767 - DNA, 567 bp, Homo sapiens
tcaggatgcagcgaacggcaagtcctcctcccggaaaaggcgcctgcggttgagaagggtcttgagcagcgcggaggatcggattccgggctcctggcctcttcccggtccgcgggcacctcggctacctttcggcagcggagaacccagccagaggcggagccgggcgtctaggcgggtctgtgcgccgcccgggcgaggatgcggctgttccggtggctgctgaagcagccggtgcccaagcagatcgagcgctactcgcgcttttcgccgtcgccgctctccatcaaacaattcctggacttcggtgagtacggggccaagggtccccatgggcccggggccgccgccattcgggctgccaccccggatctccgcagcttcggggtaaagtccggagacacagaaacggcgtctcattgcaggaccctcatcgcaggcgagactccccaaacctgcggtcgttagcttcaaatcggctctgtgaacctcagagcctttagctcttagaaggtagcggccagtttccgcattcttactattcttaaagtttaagggcccagccat

SEQ ID NO: 130768 - DNA, 932 bp, Homo sapiens
cttatgaatatatgatgagttatttttctctttgatcttgggatgtaagttagtcatcgtttccctttccaaagcatgctgtaggcagttgtaaaacctctcaattcttttcttgttttcctccattttttgatttgccacatttaacaggaagtcaatatattcctctgtcaccatcagttttcccttatggcttaatggaacttctaagccatgtgtactccggacagccaacatagtttttcctctctttcccaccgttatgccagagttcctgaaaccagaatctattgccatggaatgtgcgaaggtctgcagcttcactcctgaagtcagcaagaccacgaacccactggaaggaagaaactccggacacatctgaatatctgaaggaacaaactccggacataccatctttaagaattgtaacactcaccgcgagggtccgcagcttcattcttgatgtcagtgagaccaagaacccactggaaggaataaattccaggcacattttggtgaccacaaagggactttcgcctattgccaagcagtaccaagaggaacaggccaaaaaggaaaagcaagatcagagaaaggccacagccttagtcatgaccctcagacagacaaaccttggtggttcagagaggacagaaaatagagcaggccaatcacctggtagggcttgttaccagtgtggtttggaaggacaccttaaaaaagattgtccatggtatggctttctcaatgttaatctcctgtcccgacagctgtcctcaaggtctattaccatccaaggaattctgggacgggctgtaaccaggtatttctcccacctcctcagttgtaattgggagactttgctacagatagatcaaggccatcaagctacagatggtcttacaaatggaaccccaaatgagctcaactaa

SEQ ID NO: 130769 - DNA, 1527 bp, Homo sapiens
gataccgcacgcggaatttccgggtcgacgatttcgtagagagtgaacttcagccccgtcccctccccactgccacgttttggggcaacccaacccgcgcctgaagcggcttggcttgacctgcggaagcgcgggccgggatggcgtggggagagggaggttgcattggagttttcgaaagacttatctttctgcaggctcgcctctgagctttgtctccttggagccacctcacttagacagcttcggatgtggatgcagatttgaaccatgttgcgtccccagggactgctatggctccctttgttgttcacctctgtctgtgtcatgttaaactccaatgttcttctgtggataactgctcttgccatcaagttcaccctcattgacagccaagcacagtatccagttgtcaacacaaattatggtaaaatccagggcctaagaacaccattacccagtgagatcttgggtccagtggagcagtacttaggggtcccctatgcctcacccccaactggagagaggcggtttcagccaccagaatccccatcctcctggactggcatccgaaatgctactcagttttctgctgtgtgcccccagcacctggatgaaagattcttattgcatgacatgctgcccatctggtttaccaccagtttggatactttgatgacctatgttcaagatcaaaatgaagactgcctttacttaaacatctatgtgcccatggaagatggtgtgtccggaattggtgggttcttggtctcactgacttcacgaatgaagctgccgaccctcgcggtgagtgttacaactcttaaagatggtgtgtccagagtttgttccttcagatactcagatgtgtctggaatttcttccttctggtgggttcgtggtcttgctgacttcaggaatgaagctgcagaccttcgtgttgtgatcattgttgtaagaggagatgggacactgaaggaggatgttactggagttcttcaaagaacagatgaggctaccttcagtaagattcccattggatttatcccactgggacggaccagtagtttgagtcataccctctttgctgaacgtggaaacaaagtccaacatataactgatgccacatttgccattgtgaaaggaaagacagttccacttgatgtcttgcagatgcaagaagaatattacaaagtcttacatcctactgggcacaaccggagcatgccctttcccaagatttatacagcactactactacataatgatgattatgatggtgatgatgaggatggtgatgaggaggatggtgatgatggtgatgatgatgatggttatgatgatggtgatggtgataatatggttgatgaggatggtaaaagtgttggtgattttgatgatgttggtgtagaggatgattacctactagtatcttccttggctgaaaccaagggacagccagaaggcaagagtgaactcacttatttaccttccacagtacagaatagtggagatgagaaagagtaa

SEQ ID NO: 130770 - DNA, 381 bp, Homo sapiens
atgaacaaaaaatgtccccacaaaaacctcatccaagggtcagcagcctcaaagatagaaactagacaaattcatgaagatgagaaaggatcaatgaaaaaaaacactgaaaacccaaaagaccagagtgcctgttttccaaataattgcaacacctccccaacaagggtgcagtactggatggagaatgagatggatgaattgacagaagtagacttcagaaggtgggcaagaacaaactttgctgaggtaaaggctcatgttctaacccaatgcaaagaagctaagaaccttgatgaaaggctacaggagatgctaactagaataaccagtttagagaggaacataaatgacctgatggagctgaaaaataaagcatga

SEQ ID NO: 130771 - DNA, 990 bp, Homo sapiens
atgccgtggccagcagtggttgggatttcacggactttagacagctgccggtgtcagggtcccgggggcttttcccggccgccaccccccccgccaaatggagccatcagctccctctccccagtcatggagaccgcactgctgtccttccttccaggccaggagcagcccccgccatgtgatgagctgggacggaaaatcaaatctcctggggagaaacggcatctgtgtccaaatgagctttccgagtccaggtgcaaatggtttggggagctccaggagcaaaaatacggtttcaattttccaaagcaggccgagatccccgagtttaacccacatggccgagaagcgagcccccgcgcaggctgtgtggtaaccgagggcaccgtggcagtgaggcaggagcagtcggcgcccacacgccggatctgccgcacccgctgccacccacagtcctctggcgagctctcagatgggaggaacaggtgcccccacgatgcctcggaaagtaaccatggccgccctcatggcagctcacctgttttggggtattttattcgcatctgcagagtagagaggaacattccagaatgtgaagacttcagaacgtggaccctgggttctggagagaagcccagctcgggaaacaaatgctccttccagcagcagcagagagctgtagagccggggctctgggcagcttctgaatccagctcccaggccacagatcacagggacaggacgggagcctcccacacagacgccaggcagcaggaccccggaaattcacactcggattttgtccggcattcccactccctgccctgcttggagaggcaggaccgcaggtctgccggccacaacggcagcgccacagtgcccggcacagaggcctgcggtcgcgcatacaaagcacccgccggccattatcattccggagccggccagagcctcccggctgcatctcatcggtcattcagcagcccgtaa

SEQ ID NO: 130772 - DNA, 2055 bp, Homo sapiens
atgtccggcaaaggcaggatcaggccgtgccacgcggccgccggcctcaccccagtgccctccacgctgggcggcaaggagggcggccgcgagcccacccggacccccgagcggcaggggcagcccgtcgtgccaccaggcgtcagcaggcttcagtcagaatggaaacagccatgcccttcgcgaatcccgtcgcggcctctgggaaccgagctcctcgtcttccttcctggagggcctccttggcgaatcccagagctggtttctgggtggctgtgcaatgccaggaagccgacggcatctttcgggccttggcatggagccaggctgggagcggatgaaagcgccccgcaggagccggcagagctgtctggttggaggaaagtttctagggagaaaatggctgtgggagtgacagccacgcagacatctaatcagtgtgggattaagccggcacaaacagggagccgggaaggctccggcaggggcgatgaagccccggggcgagagcgccgtacagcacggtgtccggcgcggaagagccccgggcctgggctggcctgcgttctcgtgatcaaccgggaaggagagccccacaggggggaaagtacagtatctgtactgaaaaatctgttgcctgggcttaataacagcttggagcccctggaggctccgggcacccccggcttgtggacgtatcactcgggtccctgccgctttgcctcctcccctttggtctgtctcagggttcctgggccggcagccacgaggggcagacagaggcgccagtgccctcactctcgggtgaagacgcccgttgacccccagcccattcgacccggccacaagcctcgggccaccctgctccccaccttgtccagcctgaagcccccaggaccccggtccctgtccgtcccaggccccagcctcatggccctgccgagctccccagtctggtcccggccacccacagcccacatctgtgcctttggtcatagcctcgtccccatcagaaattcacactcggattttgtccggcattcccactccctgccctgcttggagaggcaggaccgcaggtctgccggccccaacggcagcgccacagtgcccggcacagaggcctgctggtcgcgcatacaaagcacccgccggccattatcattccggagccggccagagcctcccggctgcatctcatcggtcattcagcagaaaaacatggaaacaatgaacagacgcaagcacgcagagccgcacgccctgacggtgcaccccgagccagataagcaaaagggtcatcgcatggcccgaggtggtaataataccaccaacagcacaacagtacgtcaggcacctggggggcactgctgggggaaggtcctgatctcaccaagttccccagaactccagggtcattcccatcgtgcagggcgcagccacggggcgctgtggacggcaggcccctgctcccccaagtcctgccgcacaggcggttggagcttgctgagcgagagcgagaagcggcccttcgtggaggaggcagagcgccttcgcgtgcagcacaagaaggaccaccccgactacaagtaccagccacggcgcaggaagagcgccaaagccggccacagcgactccgactcgggcgcggagctgggaccccaccctggcggcggtgccgtgtacaaggctgaagcagggcttggagatgggcaccaccatggcgaccacacagtttttagagtgattgtgaagatggcctgtggctctccgctcctcagggaccagcatggaaatccaacacgccatgtttgcggctccctctggctgcctgtggagcatgcattccggaaggacagtggtctggagacagcccgcgggctgcgtgggagtccaggtgcccggtgtgccagggtcagcccagaagccacaggggacccagatggccccagtctgcccacagcaccgctcccggcctcacctccccacgacggggaccacagcggggctggcatacactgggcgctcaacgattgctcccacaagctgccctaa

SEQ ID NO: 130773 - DNA, 606 bp, Homo sapiens
atgggggtaggcgatgaactcgggtctctcgtgctctccgtggtgcgacttcaggtacacattcagcatgctgactgccaccccggggagcgcgacgaagaaggccgccccagctgtgggcgggaccgacccagcagccgagaaaccgaggacacaccaactaccgccatttttgatctggactgccgcagcgccggaagcggaagtggaaaattggctctgggggcggtactacaacctccaaaggaagttactattgggcgccgccctcccactggcattaacctgagcactatcatccgggacgacggagtccttgtcaaaatcctcggcatctcgggcaagagagagcatgcgctctgcacctcccttcaggctttaccgtttccttcgctttatgatctatatagcttccaggtcatccctgtcctgggagaggtcatcgctggagactggaagtcctatcagtaccttgtagagagtatccgaaggtttccgtctcaggaagagttcaaggacatgatagaagatgcaggctttcacaaggtgacttacgaaagtctaacatcaggcattgtggccattcattctggcttcaaactttaa

SEQ ID NO: 130774 - DNA, 1108 bp, Homo sapiens
cagcatcagagaaaacagaagaggcagttaagggcccaacaaaatttatcctgggaagaaattgccaaagagtaccagaatgaagaagattccttgggcgggtctcgtgtcgtggtgtgtgacatcaacaaggagatgctaaaggttggaaagcagaaagccttggctcaaggatacagagctggacttgcatgggtattaggagatgctgaagaactgccctttgatgatgacaagtttgatatttacaccattgcctttgggatccggaatgtcacacacattgatcaggcactccaggaagctcatcgggtgctgaaaccaggaggacggtttctctgtctggaatttagccaagtgaacaatcccctcatatccaggctttatgatctatatagcttccagggtcatccctgtcctgggagaggtcatcgctggagactggaagtcctatcagtaccttgtagagaagtatccgaaggtttccgtctcaggaaagagttcaaggaccatgatagaagatgcaggctttccacaaggtgacttacgaaagtctaacatcagggcattgtggccattcattctggcttcaaactttaattcctttcctatcatggagcatgaaccagtcatatcctgtttgaaagcctggaactggaaggataatctggcaaatgggacagcagcagagcatctcctcttaaggatacgtgccttggactcatgtttgaatcgaacagtctcaaagtggaagaacaaattcttgtcacttttttaccagctttctttggagctgcttcagtccatctcccagaggcattttggtctgtatctttgctcaactgctaatttctcttggctgtagggtgtgtggttaaggtacaaccacccctaaagctcagttttgaagtgagtgtatttatagcttctctgctggtgctgccttctagagggatgatagatcatttgaacccagtgacaatttttaaccagaaaatttaattgtacctgaatcaacctttcagcctaggacgaagtctaggcccaagtcagagtattaatgatcatgagaattgtgtgctgaaccagtaaacgagtttaccttttg

SEQ ID NO: 130775 - DNA, 933 bp, Homo sapiens
ttttttttttttttctaagtggaagttatttatttaagccaatctccttgcccaacaaggcaaaagggatggggagacccagttatacccagtcatcattttgataccaagtaaaagaaggtgagcttaaaggtccccatatactttttctggtcccaatgtgcaaaaattaaggtccaaaaccagtgcttgttgggtgcccctggtgccccgggtaatggtcccagattctctttattcatcttcgtaagcccagttggaaagtggattcaacatgagggttatgtgaatagagtaatggttaccatctcccccagggaaaccggcttggtcctgatgtcggagatgctttgtaggcgatgaactccgggtctctccgtgctctcccgtggttgcgacttccaggtacacatttcagcattgctgactggccaccccgggggaagcgcgaccgaagaaaggtgaagagtcttccacatggcgaagctgagccctctttggccatgggcgaccactcgaacatagggccggcccagctggtggggcggggaacgacccagcaagccgagaaaccggaggacaccaccaactaccgccatttttgatctggactgccgcagcgccggaagcggaagtggaaaattggctctgggggcggtactacaacctccaaaggaagttactattgggcgccgccctcccactggcattaacctgagcactatcatccgggacgacggagtccttgtcaaaatcctcggcatctcgggcaagagagagcatgcgctctgcacctcccttcaggctttaccgtttccttcgctttatgatctatatagcttccaggtcatccctgtcctgggagaggtcatcgctggagactggaagtcctatcagtaccttgtagagagtatccgaaggtttccgtctcag

SEQ ID NO: 130776 - DNA, 468 bp, Homo sapiens
ttatttgaaggatcttgcatccatgcaggtcgactctagaggatccctaaagtaggtgatcttttccccattcacagatgggaaactgagcttcaggatagtcacatgacttgtccaagttctcatgattaggaaacgttggagctgggctttgaactggactgcaaagcttgtgctcttgacgaaataggaaggcagaggcttgggtactccctttggagtgtgttgctggaacttgtgcagggacttagggagtctttttcttttggccttgctctcctctctgttgactttgtgcttaggtaggcatcctgtggtggcactaatggctgccagcagctctaggctttcttcctcccattctgcatcacaaagctcctcttcctcgtccccggagtcagactcgggctccaccggcacctcgtcatcctcgcctatggttccgattaagccgaggtccgcaagcat

SEQ ID NO: 130777 - DNA, 677 bp, Homo sapiens
gggaaaggttcatgtcctggaacgaagaggttttcatcgtactgagatgcatcttcaaaaaatcctcctgcttcctgtcctttcttcttcttcttcttccgatcctttactttgagtgtatctgctttggtgaggatgttctcatcagctgatgagtagtcagtctccgaggcttcatcttctgagccttcctcatcattctctcgaaggtcttcctgctcctttggttcagagccctcctttgcttctttctccttttccagcttcccagacttggcttctttatcctcagttttccttctctttcgagctttctcaatcttctcatgtaatgtagtggctgccctcttcttcatgagtgggctcatgacatcagccagggcccagctgccatcgtacgtcccctccttctcagtgaaaacgaaatcagggttgaaatcagcactgcggttcttccccaaagctttttgtcgtctgcccagcacaatgggcccctcctcttcctcgtccccggagtccgactcggcgctccaccggcacctcgtcatcctagacgtatggttacagattaagccgagagtccgcaagccatgttgtcgcagaagccacttccggaagcgagcacagcctgcggtccggcccttaacttttcgcagcctcctcgtcgtcttacgaaa

SEQ ID NO: 130778 - DNA, 439 bp, Homo sapiens
tgccttcttcgtctcccacagatgtgataactgtctctgaaaagaccatttgtccagtctggttgttggttatcttgtgaatttctcggtgcacatggatggtattatttccaaccttcgtgtctgtgttggtctcattgtgatagctgggaggtaagtttgccaggttcacttctgatgatgctttagcagcagcttcttctgcctccatctcttccaccgcgctgcgcaatttgtgctgcgtgtcctccatcagttcctcaacctcgcggaacatctcattgagggtggcctcctcctgcgcggtagctgagagccgggccgggcttgactggagccgaggtcgccgtcggagcgggcgcgggggccgtggggaccgccgccgccagcagcaggcacagcaaagtggccccaagccactgcatctccgctctgcgcc

SEQ ID NO: 130779 - DNA, 949 bp, Homo sapiens
atgtcttacatggtggcaggcaaaagagcaggtgcaggggaactgccctttataaaaccatcagacctgctctttaaggtggagtctgtttgctgcagcaaagccaaggggaatgatggttccgggcagtcacagaggcggcctactttaaggagaaacacttctgcaaatatggaggcagaagaagctgctgctaaagcatcatcagaagtgaacctggcaaacttacctcccagctatcacaatgagaccaacacagacacgaaggttggaaataataccatccatgtgcaccgagaaattcacaaggaacatagcactagcttgccccgtggtgtgcaatgtctctgacatgatttggcaggactctgagagcaaactgcctaagactgtgtgctgtgcagatattcagggtcgttgtgagcatcccgttgtgaatatcaaggagcctgccccctcagctcatctcaactcctgtatgcaagggcacagcggcttcacaaaagagcctcacttttattcaagtgcgcaggtggtcatggtcctggtcagagatgagaaagttttaatggtctggatagaagatcaaatcagccacaacgtttccttaagccgaagccagagcaaggctctaactctcttcaattctctgaaagctgagacaggtgagggagctgcagccaaaaagctggaagctagccgagggtggtttatgaggtttaagaaaagaagctatctccgtaacataaaagtactagacgaagcagcaagtgctgatgtagaagctgcagtgagttatccagaagatctagctgggataattgataaagctagctacactaaacaacacattttcactgtaaaccaaatagccatctattggaaaaagatgctgtctaggactttcttagctagagagtacgaggcatcgccttttcttaaagcttga

SEQ ID NO: 130780 - DNA, 381 bp, Homo sapiens
atgaatctcacagatacaacgctgagtgaaagaagccagacacagaaagatgaacaaacaggaaaaaccgtggtgaccaccagagtggacacctctagcgtccgtaattccaaggcgctggcaggctataacttgaacctcggaatggctttagaagtcatgaactttaccagaaatataggcacttttgggctcagcctttcccaattcagtagccttaagatagtcacaggaatccgatcatgggacacaaacctgattgaatgcaacttggaccaagaactcaaactttttgtatctcgacactctgcaagattctctcctgaagtcccagacatgaactgtgagctgaatagtctggttcacatcctgattccgtag

SEQ ID NO: 130781 - DNA, 7568 bp, Homo sapiens
agggggaggcggcgcgcggcgccagaggaggggggacgcagggggcggagcggagacagcaccttcggagataatcctttctcctgccgcagaggagaggagcggccggagcgagacacttcgccgaggcacagcagccggcaggatggcgaccgtggtggtggaagccaccgaggccggagccgtccggcagcatcgccaacccggcggcgtccacctcgcctagcctgtcgcaccgcttccttgacagcaagttctacttgctggttggtcgtcggcgagatcgtgaccgaggagcacctgcgacgtgccatcggaagcatcgagctcggaatccgatcatgggacacaaacctgattgaatgcaacttgggaccaagaactcaaactttttgtatctcgacactctgcaagattctctcctgaagtcccagggacaaaagatcctttcatcaccgaagtgaacgtttttaggaaacagtgggtcctgattcaaaccctttttgatggaaggcagttcaggcaccgaggtgcgcttaatgatcactgatgctgcccgacacaagctgctcgtgctgaccgggcagtgctttgaaaataccggagagctcattctccagtccggctctttctccttccagaacttcatagagattttcaccgatcaagagatcggggagttactaagcaccacccatcctgccaacaaagccagcttaaccctgttctgtcctgaagaaggggactggaagaactccaatcttgacagacacaatctccaagacttcatcaatattaaactcaattcagcttctatcttgccagaaatggaaggactttctgagtttaccgagtatctctcagaatcagtggaagtcccatctccctttgacatcttggaacctcccacatcgggtggatttctgaagctctccaagccctgctgttatatttttccaggagggaggggcgattctgccttgtttgcagtgaatggtttcaatatgctcatcaatggcggatcagagagaaaatcctgcttctggaagctcatccgacacttagaccgagtggactccatcctgctcacccacattggggatgacaatttgcctggaataaacagcatgttacagcggaaaattgcagagctcgaggaagaacagtcccagggctccaccacaaatagtgactggatgaaaaacctcatctcccctgacttaggagttgtatttctcaatgtacctgaaaatctcaaaaatccagagccaaacatcaagatgaagagaagcatagaagaagcctgcttcactctccagtacctaaacaaattgtccatgaaaccagaacctctgtttagaagtgtaggcaatactattgatcctgtcattcttttccaaaaaatgggagtaggtaaacttgagatgtatgtgcttaatccagtcaagagcagcaaggaaatgcagtattttatgcagcagtggactggtaccaacaaagacaaggctgaattcattctgcctaatggtcaagaagtagatctcccgatttcctacttaacttcagtctcatctttgattgtgtggcatccagcaaaccctgcggagaaaatcatccgagtcctgtttcctgggaacagcacccagtacaacatcctggaagggttggaaaagctcaaacatctagactttctgaagcagccactggccacccaaaaggatctcactggccaggtgcccactcctgtggtgaaacaaacaaaactgaaacagagggctgatagccgagaaagtctgaagccagccgcaaaaccacttcctagcaaatccgtgcgcaaggagtcaaaagaagaaacccctgaggtcacaaaagtgaatcacgtggaaaagccacccaaagttgaaagcaaagaaaaggtaatggtgaaaaaagacaagccagtaaaaacagagaccaaaccttcagtgactgaaaaggaggttcccagcaaagaagagccatctccagtgaaagccgaggtggctgagaagcaagccacagatgtcaaacccaaagctgccaaggagaagacggtgaaaaaggaaacaaaggtaaagcctgaagacaagaaagaggagaaagaaaagccaaagaaagaagtggctaaaaaggaggacaaaacacctatcaagaaggaggaaaaaccaaaaaaggaagaggtgaaaaaagaagtcaaaaaagagatcaagaaagaagagaaaaaagaacccaagaaagaggttaagaaagaaacaccgccaaaggaagtcaagaaggaagttaagaaggaagagaagaaggaagtgaaaaaggaagaaaaggaacccaaaaaagaaattaagaagctccctaaagacgcaaagaaatcatctactcctctgtctgaagcaaaaaaaccagctgctttaaaaccaaaagtacccaagaaggaagagtctgtcaagaaagattctgttgctgccggaaagccaaaggagaaggggaaaataaaagtcattaagaaggaaggcaaggccgcagaggctgtcgctgcagctgtcggcactggagccaccacagcagctgtcatggcggcagctggaatagcagccattggccctgccaaagaactcgaagctgagaggtcccttatgtcatctcctgaggatctaaccaaggactttgaagagttaaaggctgaagaggtcgatgtaacaaaggacatcaagcctcagctggagctaatcgaagacgaagagaaactgaaggaaactgagccagtcgaagcctacgtcatccagaaggagagagaagtcaccaaaggtcctgccgagtcccctgatgagggaatcactaccactgaaggggagggcgaatgtgaacagacacctgaggagctggagcccgtcgagaagcagggagtagacgacattgaaaaatttgaagatgaaggagccggttttgaagaatcttcagagactggagactatgaagagaaggcagaaactgaggaggctgaggagccagaagaggatggggaggaacacgtatgtgtgagcgcctccaagcacagccccactgaggatgaggaaagtgccaaggcggaggctgatgcatacatcagggagaagagggagtctgtggccagtggggatgaccgagccgaagaagacatggatgaggccattgagaaaggagaggctgaacaatctgaagaggaggctgatgaggaggacaaagctgaagatgccagagaggaggaatatgagccggaaaaaatggaagctgaagactatgtgatggctgtggtcgacaaggctgcagaggctggtggtgccgaggagcagtatggattcctcaccacaccaaccaagcaactaggagcccagtctcctggccgagaacctgcatcttcaattcatgatgagactttacctggaggctcagagagcgaggccaccgcttctgatgaggagaatcgagaagaccagcctgaggaattcactgccacctctggctacactcagtctactattgagatatccagtgagcccacccccatggatgagatgtctacccctcgagacgtgatgagtgatgagaccaacaatgaagagacggagtccccttctcaggaattcgtaaatatcaccaaatatgaatcttcattgtattctcaggaatactctaaacctgctgatgttacaccgctcaacggattttctgaaggatcaaaaacagatgccactgatggcaaggattacaatgcttcagcctctaccatatcaccaccctcttccatggaggaagacaaattcagcagatctgctttacgtgatgcttactgctctgaagtgaaagccagcaccactttggacatcaaagatagcatctcagctgtttcaagtgaaaaggtcagcccatcgaagagcccgtccctgagtccatctccaccatcacccttagaaaagacccccctgggtgaacgtagtgtgaacttctctctgacgcccaatgagattaaagtctctgcagaggcagaagtagccccggtgtctcctgaggtgacccaagaagtagttgaagaacattgtgctagtcctgaggacaagactctggaagtggtgtcaccatctcagtccgtgactggcagtgctggtcacacaccttactatcaatctcctactgacgagaaatccagtcatctccctacagaagtcattgaaaaaccaccagcagttccagtgagttttgaattcagtgatgccaaagatgagaatgaaagggcttcagtaagccccatggatgagcccgtgcctgactcagagtctcctattgaaaaagttttgtctcctttacgcagcccgcccctcattggatccgagtctgcttatgaaagttttctaagtgctgatgacaaggcttctggcagaggtgccgaaagtccttttgaagaaaagagtggaaaacaaggctctccagaccaagtaagtccagtttctgaaatgacttctactagtctttaccaagacaaacaggaagggaaaagcacagactttgcaccaataaaagaagactttggccaagaaaagaaaactgatgatgttgaagccatgagttctcaaccagcactggctctggatgaaaggaaattaggagatgtttctcccacacaaatagatgtcagtcagtttggatcttttaaagaagacactaagatgtccatttctgaaggtactgtctcagacaagtcagctactcctgttgatgagggcgtagcagaagacacgtactctcatatggagggtgtggcctcagtgtccacagcctcagtggctacgagctcatttccagagccaacaacagatgatgtgtctccatctctgcatgctgaggttggctccccacattccacagaagtagatgactccctttcagtgtctgttgtgcaaacacctaccacattccaggaaacagaaatgtctccatctaaagaagaatgcccaagaccgatgtcaatttctccaccagatttctcccctaaaactgcaaagtccaggacacccgttcaagatcacagatctgaacagtcctcaatgtctattgaatttggccaagaatctcctgagcaatcccttgctatggacttcagtcgacagtctccagatcaccctacagtgggtgcaggcgtgcttcacatcactgaaaatgggccaactgaagtggactacagtccttctgacatgcaggactccagtttatcacataagataccacctatggaggagccgtcctacacccaagataatgatctttctgagctcatctcagtatctcaggtagaggcctccccgtccacctcttctgctcataccccttctcagatcgcttctcctctccaagaagatactctatccgatgttgctcctcccagagatatgtccttatatgcctcactcacctctgaaaaagtgcaaagtctggaaggagagaagctctctccaaaatctgatatctctccactcaccccacgagagtcctctcctttatattcacctactttttcagattctacctctgcagtcaaagagaaaacagcaacttgccacagttcctcttctccaccaatagatgcagcatccgcagagccctatggcttccgtgcctcagtgttattcgatacaatgcaacaccatctagccttgaatagagatttgtccacacctggcctggagaaggacagtggagggaagacacctggtgactttagctatgcctatcaaaagcctgaggaaacaaccaggtccccagatgaagaagattatgactatgagtcttatgagaagaccacccggacctcagatgtgggtggctattactatgagaagatagagagaaccacaaaatctccaagtgacagtggctactcctatgagaccattgggaaaactaccaagacccctgaagatggtgactattcctatgaaattattgagaagaccacacggacccctgaagagggcgggtactcatatgacataagtgaaaagaccaccagcccccccgaagtgagtggttacagctatgaaaagactgagaggtctagaaggcttctggatgacatcagcaatggctatgatgactctgaggatggtggccacacacttggggaccccagctactcttatgaaaccactgagaaaattaccagtttccctgagtctgaaggttattcctatgagacatctacaaagacaacacgaacccctgatacttccacatactgttacgagactgcagagaaaatcactagaacccctcaggcatccacatattcctacgagacttcagacctatgctacactgcagaaaagaagtccccctcagaagcccgtcaggatgtcgatttatgcctcgtgtcctcttgtgaatacaagcaccccaagacagagctttcaccctctttcattaatcccaatcctcttgagtggtttgccagtgaagaacccactgaagaatctgaaaagcccctcactcaatcagggggagccccaccgcctccaggaggaaagcaacagggccgacagtgtgatgaaacccctcccacctcagtcagcgagtcagccccatcccagaccgactctgatgttcccccggagactgaagagtgcccctccatcacggccgatgccaatatcgactctgaagacgagtcggaaaccatccccacagacaaaactgtcacgtacaaacacatggacccacctccagctcccgtgcaagaccgcagcccttcgccacgccaccctgatgtgtccatggtggacccagaggccttggccattgagcagaacctgggcaaagctctaaagaaagatctgaaagagaagaccaaaaccaaaaagccaggtacaaagaccaagtcatcttcacctgtcaaaaagagtgatgggaagtctaagcccttggcagcttcaccaaaaccagcgggcttgaaagaatcctcggataaagtgtccagggtggcttctcctaagaagaaagaatctgtggaaaaggcagcaaaacccaccaccactcctgaggtcaaagctgcacgtggggaagagaaagacaaggagaccaagaatgctgccaatgcctctgcatccaagtcggccaagaccgccactgcaggaccaggaactaccaagacgaccaagtcatctgctgtgcccccaggcctccctgtgtatttggacctgtgctacattcctaaccacagcaatagtaagaatgttgatgtggaatttttcaagagagtgcggtcttcctactacgtggtgagtgggaatgaccctgctgctgaggagcccagccgggctgtcctggacgctttgttggaaggaaaggctcagtggggcagcaacatgcaggtgacactgatcccaactcatgactcagaagtgatgagggaatggtaccaggagacccatgagaaacagcaagatctcaacatcatggttttagcaagcagcagcacagtggttatgcaagatgaatccttccctgcatgcaagattgaactgtaa

SEQ ID NO: 130782 - DNA, 936 bp, Homo sapiens
atgaatttggaccttatccctcactgtgatccttcacttcgccttctgtttcaatttctcccagtcggtttactgcttgacaaaattctttcacaattaagtgatcacaggacaacccaacccaaccaatccaaacctgcaggcaaccccagacatccagggaaccctggcgcggctcgggccagcccacacccacgcggaatcattccatttatcggccaccaatcagccctccacacgctcccgcgccagccaatccgaacaagcgcacgttgttccggccacctcctctcagccccccctccccggagcccccgggatcgggccagggggcggggctgggggctcggcccgccttgccctgaggcgctgggtgccttccagttggctgcgaccagcggtaaaggtaaggagagccacggagccgcggcaggattggggtggcccgtgtggagggcgactgtggcgcccggggcgtcctgccagagagaagtaatggaaggcctgtctgatgttgcttcttttgcaactaaacttaaaaacactctcatccagtaccatagcattgaagaagataagtggcgagttgctaagaaaacgaattgctgtgtgatgcgttacactactgctggtcagctttggaatataatttccccaagagaatttgttgatttctcctatactgtgggctataaagaagggcttttatcttgtggaataagtcttgactgggatgaaaagagaccagaatttgttcgaggatataaccatccctgtggttggttttgtgttccacttaaagacaacccaaaccagagtcttttgacaggatatattcagacagatctgcgtgggatgattcctcagtctgcggtagatacagccatggcaagcactttaaccaacttctatggtgatttacgaaaagctttatga

SEQ ID NO: 130783 - DNA, 2850 bp, Homo sapiens
atggctgaggaggcctcacaatcatggaggaaggcgaaggaagaacaaaggcacatcttacatggcagcaggcaagagagtgtgtgcaagcgaaccgtcctttataaaaccatcaaatttcaattggaaaaaactactttaaagttcatatggaaccaaaaaagagcccacatcgccaagtcaatcctaagccaaaagaacaaagccgtaggcatcacgctacccgatttcaaactatactacaaggctacagtaaccaaaacagcatggtactggtaccaaaacagagatatagatcaatggaacagaacagagccctcagaaataatgccgcatatctacaaccatctgatctttgacaaacctgacaaaaacaagaaatggggaaaggattccctatttaataaatggtgctggcaaaactggctagccatatgtagaaagctgaaactggatcccttccttacaccttatacaaaaattaattcaagatggataaaagacttacatgttagacctaaaaccataaaaaccctagaagaaaacctaggcaataccattcaggacataggcacgggcaaggacttcatgtctaaaacaccaaaagcaatggcaacaaaagacaaaattgacaaatgggatctaattaaattaaagagtttctgcacagcaaaagaaactaccatcagagtgaacaggcaacctacgaaatgggagaaaattttcacaacctactcatctgacaaagggctaatatccagaatctacaatgaactcaaacaaatttacaagaaaaaaacaaacaaccccatcaaaaagtgggcgaaggatttgaacagacacttctcaaaagaagatatttatgcagccaaaagacacatgaaaaaatgctcatcatcactggccatcagagaaatgcaaatcaaaaccacaatgagataccatctcacaccagttagaatggcgatcattaaaaattcaggaaacaacagatgggacacaacagtcatgggctgtctcagctgcccaaagcctgaggcagaccacatgagagctgtggcttcttcttggattcagagagaagtaatggaaggcctgtctgatgttgcttcttttgcaactaaacttaaaaacactctcatccagtaccatagcattgaagaagataagtggcgagttgctaagaaaacgcatgtaaacagaaccaacgacaaaaaccatgtgattatctcaatagatgcagaaaaggcctctggcaaaattcaacaacccttcatgctaaaaactctcaataaactaggtattgataggacgtatctcaaaataataagagctatatatgacaaacccacagacaatatcatactgaatgggcaaaaactggaagcattccctttgaaacctggcacaagacagggatgccctctctcaccactcctattcaacatagtgttggaagttctggccagggtaatcaggcaggagaaggaaataaagggtgttcaattaggaaaagaggaagtcaaattgtccctgtttgcagatgacatgattgtatatctagaaaaccccatcgtctcaccccaaaatctccttaaactgataggcaacttcagcaaggtctcaggatacaaaatcaatgtgcaaaaatcacaagcattcttatacaccaataagagacaaacagagagccaaatcatgagtgaactcccattcacaattgcttcaaagagaataaaatacctaggaatccaacttacaagggatgtgaaggacctcttcaaggagaactacaaaccactgctcaaggaaataaaagaggatacaaacaaatggaagaacattccatgctcatgggtaggaagaatcaatatcatgaaaatggccatactgcccaaggtaatttatagattcaatgccatccccatcaagctaccaatgactttcttcacagaattggataaaactactttaaagttcatatggaaccaaaagagagcccacaattccaagtcaatcctaagccaaaagaacaaagctggaggcatcacactacctgacttcaaactatactacaaggctacagtaaccaaaacagtatggtactggtaccaaaacagagatatagatcaatggaacagaacagagccctcagaaataatgctgcttatctacaactatctgatctttgacaaacctgacaaaaacaagaaatggggaaaggattccctatttaataaatggtgctgggaaaactggctagccatatgtagaaagctgaaactggatcccttccttacatcttatgcaaaaatcaattcaagatggattaaagacttaaatgttcgacctaaaaccataaaaaccctagaagaaaacctaggcaataccattcaggacataggcatgggcaaggacttcatgtctaaaacacgaaaagcaatggcaacaaaagccaaaattgacaaatggaatctcattaaactaaagagcttcttcacagcaaaagaaactaccatcagagtgaacaggcaacctacagaatgggagaacatttttgcaatctactcatctgacaaagggctaatatccagaatctacaatgaactcaagcaaatttacaagaaaaaaacaaacaaccccatcaaaaagtgggagaaggatatgaacagacacttctcaaaagaagacatttatgcagccaaaagacacatgaaaaaatgcccatcatcactgaccatcagagaaatgcaaatcaaaaccacaatgagataccatctcacaccagttagaatggcgatcattaaaagtcaggaaacaacaggtgctggagaggatgtggagaaatag

SEQ ID NO: 130784 - DNA, 536 bp, Homo sapiens
tttcgtgcggggctgggggctcggcccgccttgccctgaggcgctgggtgccttccagttggctgcgaccagcggtgacttacaagttggctgctgtcgcctgcgcatcggcgggccgggaggctgagcagtactgttgagagcggtgtgaggtgcttggtagcgcgccgtagctgcttccacgtccttgcttcacctcaggtaaagagagaagtaatggaaggcctgtctgatgttgcttcttttgcaactaaacttaaaaacactctcatccagtaccatatcattgaagaagataagtggcgagttgctaaaaaaacgaaagatgtaactgtttggagaaaaccctcacaagaatttaatggatatctctacaaagcccaaggtgttatagatgaccttgtctatagtataatagaccatatacgcccagggccttgtcgtttggattgggacagcttgatgacttctttggatattctggagaactttgaagagaatagctgtgtgatgcgttacactactgctggtcagct

SEQ ID NO: 130785 - DNA, 888 bp, Homo sapiens
tcataaagcttttcgtaaatcaccatagaagttggttaaagtgcttgccatggctgtatctaccgcagactgaggaatcatcccacgcagatctgtctgaatatatcctgtcaaaagactctggtttgggttgtctttaagtggaacacaaaaccaaccacagggatggttatatcctcgaacaaattctggtctcttttcatcccagtcaagacttattccacaagataaaagcccttctttatagcccacagtataggagaaatcaacaaattctcttggggaaattatattccaaagctgaccagcagtagtgtaacgcatcacacagcaattcgttttcttagcaactcgccacttatcttcttcaatgctatggtactggatgagagtgtttttaagtttagttgcaaaagaagcaacatcagacaggccttccattacttctctaacatcaacaatgcatttggtctgagaactgctaatgaatgtacagtgcaatggtggttcaagaagttttgccaaggagatgagagccttgaagatgaggagcgtagtggctggccattggaaagtgacaacgaccatttgagagtagtcattgaagctgatcctcttacaagtacaagagaagttgcccaagaactcagtgtcaatcattctctgccaaccaactactacttcctcaagcatctcaacaactttttgcagggaaaatgcttccacaaccagcaggatgcagaaaatgcttttcaagagttcattgaatcctgaagcacggatttctatactgaaagtgtttgcctcggccaggtcatcacagtcacagtgagagaaagaatagatgcctgacttcattgttcttgggagcctccatcgaatggccat

SEQ ID NO: 130786 - DNA, 339 bp, Homo sapiens
ggcctgagaaggcgggggtcttaaacgttatccaatcagggacgctgtcctgggaactgtccaatcagacacacagctggagggaacagggcggcttccggtatttggtggggcctttgcctctggcttcagtcgttcctcctggtgttgtcctcattcctctgtgtcttctgcttttagaggcccagcctctgtggccctgtgacctgcagggactgttgacatttagggatgtggccatagaattctctctggaggagtggcagtacctggacactgcacagaagaatttatataggaagatgatgttagagaactacataaacctggccttcctgg

SEQ ID NO: 130787 - DNA, 416 bp, Homo sapiens
tccaggtctcgacttcactgctctgtgtcctctgctccaggaggcccagcctgtgtggccctgtgacctgcaggtattggagagccacagctaagatgccaggaacccctgcaagcctagaaatgagccttctctgcatgatggcttcttatatgccatgcagaattctcaccatgaatttgtgatctgcaatattaaaaatgttctctttgtggctgttgaacatggaaaggtgtggataatctatttctatggagaaaacctgggattcttagtgaagatggagaacatataatgttgagggactgttgacatttagggatgtggccatagaattctctccggaggagtggcaatgtctggacactgcacagcagaatttatataggaatgtgatgttagagaactacagaaac

SEQ ID NO: 130788 - DNA, 1760 bp, Homo sapiens
atgcagtggttctgggttcttctgtggcttctctgtctgtggctgatggagtggttttgttggtcttgtgatccaggctttttgaagcacatcttgaccttttgtctttctgttccctgggatgaaaactcatcttcagtgctgtctacaacaaaagagaaacatcatgttactaaaacctcaggaacagagattgcagattgggctaagattgtacactttcttaaggatgatctgcatggaaaagcagcaaacaatttcagaaagatacaagaaaaattgcctctaatgggtacttatactgtagttcaactcgatttgttctggcctgagaaggcgggggtcttaaacgttatccaatcagggacgctgtcctgggaactgtccaatcagacacacagctggagggaacagggcggcttccggtatttggtggggcctttgcctctggcttcagtcgttcctcctggtgttgtcctcattcctctgtgtcttctgcttttagaggcccagcctctgtggccctgtgacctgccccctggaagcctagaaatgggactgttgacatttagggatgtggccatagaattctctctggaggagtggcagtgcctggacactgcacagaagaatttatataggaatgtgatgttagagaactacagaaacctggccttcctgggtattgctgtctctaagccagacctcatcatctgtctggagaaagaaaaagagccctggaatatgaagcgagatgagatggtggatgaaaccccagagaagtcctacaaatgtaaagaacgtggaaaaatctttaattggtcttcaacccttactaatcataagaaaattcatactgaagaaaaaccctacaaatgtgaagaatatagaaaagcttttagtctatcctcaaatcttactacacataagataattcatattggagagaaaccttataagtgtgaagaatgtggcaaaacgtttaacaaatccttaaccctaaccatatataagaggatgcacactgaagagaaactctacaaatgtaaagaatgtggcaaagcatatgtatggtcctcaaacctaactaaacataagaggatgcacgctggagagaaaccctacaaatgtgaagaatgtggcaaagcttttagccaatcctcaacccttactacacataagataattcgtactggagagaaacgctacaaatgtgaagaatgtggcaaagcatatgtatggtcctcaaccctaactaaacataagagaatgcacactgcagagaaaccctataaatgcgaagtatgtggcaaaacttttcatcgattctcaaatcttagtgcacataagataatccatactggagagaaaccttacaagtgtgaagaatgtggcaaagcatttatatggtcctcaacccttactgaatataagaaaattcatactagagagaaaccctacaaatgtgaagaatgtggcaaagcatttagccgatcttcaaccctaactatacataagaggatgcatactagagagaaactctacaaatgtgaagagtatggcaaagcttttagacaatcctcaacccttactgcacataagatgattcatactggagagaaaccctacaaatgtgaagaatgtggcaaagcctttaactcgtcctcaactcttactaaacataagataatccatactgaagagaaaccctacaaatgtgaagaatgtggcaaagcatttagccaatcctcaaccctaag

SEQ ID NO: 130789 - DNA, 1718 bp, Homo sapiens
gcggccgcccgcattctcctgagctttccgcgggccgacgcacagccgcggagaaggagccagcgcccggccagacagtctcagcccgccgtcggcgcccgccgcgctcgcgcccggctgctccgaggggattagtgggccgtccgcgcggctcgtcggcgcgggagccatgttgaccgagggacttggcaacgcgtgagacacccgcgggccctcccgaggctccggacccgcggcgagagccggaaggcggctcgtggcggcggaggcctgcgctcggaagcgcctcacgtctgccgggccgctgagacccggacttgcatccggtcgccgcgggcgtccgcggagcagcttccccccgcgcctctcttcgcctcgcctcgggacccgcggtccccgctcttgctggatttttcaagccacattcaattgataggatgaaaaaatttaagagaaggctatccctcacactccgaggaagtcagactattgatgaatcattgtctgaattggctgaacaaatgactattgaagaaaacagcagcaaggataatgagcctattgtgaagaatggcaggcctccaacgtctcacagtatgcattccttcctccaccagtacacaggatctttcaagaagcccccattgcggagaccacacagtgttattggagggagccttggctccttcatggcaatgcccagaaatggaagcagattagatattgttcatgaaaatctaaaaatgggatcagatggtgagagtgaccaagcttctgggacatcatctgatgaagtccagtcacctacaggtgtttgtctcagaaatcgtatacatagacggatctcaatggaggatttaaataagcggttatcactgcctgcagacatcagaatacctgatggatatcttgaaaagttgcagataaacagtccaccatttgaccaaccaatgagtcgaaggtctcgtagagcttccttagggccgctgtgtttctcggaatgcgcgcgggatgcccggttgccacgagaccgtcgccaggcaaccgcgtgtacacatactccaggcgggccggggcgcgtcaatatggcggcgcagggctccccctcgagctctccgtcagacgactctaccacctcggggtctctgccagaactgccgccgacctccaccgcgacttcgaggtcgcccccagagtcgaaggggagctcccggagctcgctgcttcagtggacctgccccgaggactcattgcccctagccgtgttttatgggccgctggacgcgaaaaacccgctcctggcctcttgtgagaaggagatccaggagttgttaggctttatgaggaaaaagaaggctttagccaccacggaggaagagaagcacgaattccgccggcgttgttcttgggggaatgctttccaacttttgctcattcagtatgatattggctgtgactttgtcattgatggctcttattatcttgaggaatacaaactggcccttttacaatgctatggaagatatcttcagcagttcaataccaattttgatgagaataaagtggatgtaactcaattcaaagctacctttttcccaaaaggctttaaagataaaactgctggacttacatttcatgctttgagtggcaaaaatatgtgcaactaccagctggtctgcgacagtgatgaaaacctgaagaataaagaatctgtggtc

SEQ ID NO: 130790 - DNA, 576 bp, Homo sapiens; identical to SEQ ID NO: 119483

SEQ ID NO: 130791 - DNA, 659 bp, Homo sapiens
gactcccgggtcgactactactactaaatttccgacagcgtcgacctgaagatagatcgccatcatgaccgaccaccggaactatcccgcactaagaaaagttcatgacccaaccgacttacttcaggggaaaccaaatgggtcatttgatgtcctttcaccccgggaaggcggacagtgccctaagcacagaaaattcggggaaaaactagcccaaaatgtacamagaccacacccggatgtcatctttgtatttggattcagaactcattttggtggtggcaagacaactggctttggcatgatttatgattccctgggattatgcaaaagaaaaaatgaaccccaaacatagacttgcaaagacatgggcctggtatggaggaaggaaaaagaccttccaagaaaggcaacggaaaggaacgccaagaaccagaattgaagaaaagtccaggggggacttgcaaaaggcccattgttgggtgctgggcaaaaagaagaaatgaagtgtcttggcagtgagctggagattggttcacagccgaaggagttaaaggtgctgccaatgatgttagctgtggccactgtggatttttcgcaagaacattaataaactaaaaacttccaacaacaaaacaaacaaaaaacaaagtcgacgc

SEQ ID NO: 130792 - DNA, 1959 bp, Homo sapiens
atgggcctgctcctgctggttctcattctcacgccttcactagcagcctaccgccatcctgatttcccgttattggaaaaagctcagcaactgctccaaagtacaggatccccttactccaccaattgctggttatgtactagctcttccactgaaacaccagggacagcttatccagcctcgcccagagaatggacaagcatagaggcggaattacatatttcctatcgatgggaccctaatctgaaaggactgatgaggcctgcaaatagtcttctttcaacagtaaagcaagatttccctgatatccgccagaaacctcccattttcggacccatctttactaatatcaacctaatgggaatagcccctatttgtgttatggccaaaaggaaaaatggaacaaatgtaggcactcttccaagtacagtctgtaatgttactttcactgtagattctaaccaacagacttaccaaacatacacccacaaccaattccgccatcaaccaagattccccaaacctccaaatattacttttcctcagggaactttgctagataaatccagccggttttgccagggacgcccaagctcatgcagtactcgaaacttctggttccggcctgctgattataaccaatgtctgcaaatttccaacctcagctctacagcggaatgggttctattggaccaaactcgaaattctcttttttgggaaaataaaaccaagggagctaaccagagccaaacaccctgcgtccaagtcttagcaggcatgactatagccaccagctacctgggcatatcagcagtctcagaattttttggaacctccctcacccccttatttcatttccatatctctacatgccttaaaactcaaggagccttttatatttgtggccagtcgattcaccaatgcctccccagtaactggactggaacttgtaccataggctatgtaaccccagacatcttcatagcccctggcaatctctctcttccaataccaatctatgggaattccccgttgcccagggtgaggagggcaatccatttcattccccttctcgcgggactcggcattctagctggtacgggaaccggaattgctggaatcacaaaagcttccctcacctatagccagctctcaaaggaaatagccaacaacattgacaccatggctaaagccttaacgaccatgcaagaacaaatcgactctttagcagccgtagtccttcaaaatcgtcgaggactagacatgttaacggcagcacagggaggaatttgtttggccttagatgaaaaatgttgcttttgggtaaatcaatcaggaaaagtacaagacaacatcagacaactcctaaatcaagcctccagtttacgggaacgagccactcagggttggttaaattgggaaggaacttggaaatggttctcttgggttcttccccttacaggcccacttgttagtctcctacttttgctcctttttggtccatgtctcctaaatctaataacccaatttgtctcctctcgccttcaggccataaagctccagacgaatctcagtgcaggacgccatcctcgcaatattcaagagtcacccttctaaggaggacccctaggactgctcgctagtgggaacacgacagagggcgaaatcctgccccgttttcccgtgggaccggggtgggatatggttttttggccaatccacagaggccatcctgccctgacagctagcaagaggccaagacccacacgaacaaccactacagcccctctgtcagcaggaagcagttaaagaagactgaccttcgtccattttcccaagataattggggtcttggactcttgagggggggaaatgttggagcaggtagctagtcagacatgagcagggcaggggagggcccccttcaccaggaatgtcagggcaccatcaggtgatggt

SEQ ID NO: 130793 - DNA, 447 bp, Homo sapiens
tggtttcagttccctttatttttatatggcttacatgtaaatcttttttaaaattcgacttaaaatccaatacaaatgttcttcagtcattagtaaatttcaaagcgaagtcagtaaaagacagaagctggcaactgtcttttcatccttcacaagtacaggactatgtcaggggtctgtggccttcatcagcaggtgccctcctttggcgagcggatctgattctgtgtggagaggaggaagtgtcttcttcagtttcagaccctgaaggctcatgatctccctcttgggatcctgtgtctcccaccagttcccggagaaacttgaattttgataaaaaaagatgccatacaaaataccaaccgcacaccatcagcagcaggacgatcagcagcgtggccacgaacacaagcagagtcagcccgacgctgtgccacatcttggggg

SEQ ID NO: 130794 - DNA, 2388 bp, Homo sapiens
atgatccgcagcggctgtggcgcggcgacccgggcgggcggcgatgcgctgtccaggcatattcttcccacgatatttaatgatcgaatggctaaaatttgtgaggctttagagataaaacatttggatcgaaatctgacgagcacctactatgtgatacataaatggacgggcagccagatccgcggctttggagaaggccagcccacggtcgtccgactgaggcgacttgagcaagaccaaaggcagagccgcccgagaatgaaagcagcgaagcccgagtggcggtgcattctgggagttgtagtccctgcgagacaacgccgtcccgactccaccaggctctgcactccatctcccagccgaccccgcgccgcggaggaggcgagcttggtgatgagctgccccagcggtagggggcctggggcggagaagccgctacagccgcggccgggcgacgctgacatctggcatccctggggtctcagagacacgggtggacagcgacgagggccttgtggccgccatgtggcacagcgtcgggctgactctgcttgtgttcgtggccacgctgctgatcgtcctgctgctgatggtgtgcggtttaagtacctcgtggtctgtgtagacaccttcacaggatgggtagaagcctgcctcacaaggactgaaaaggcacaggaggtagctaaattcctcctaaaggaactcattcctcagttcagccaacccaggtcattgcagaatgacaatggtccatccttcatttcccaattaactcaacaggtcaccatgggcctgctcctgctggttctcattctcacgccttcactagcagcctaccgccatcctgatttcccgttattggaaaaagctcagcaactgctccaaagtacaggatccccttactccaccaattgctggttatgtactagctcttccactgaaacaccagggacagcttatccagcctcgcccagagaatggacaagcatagaggcggaattacatatttcctatcgatgggaccctaatctgaaaggactgatgaggcctgcaaatagtcttctttcaacagtaaagcaagatttccctgatatccgccagaaacctcccattttcggacccatctttactaatatcaacctaatgggaatagcccctatttgtgttatggccaaaaggaaaaatggaacaaatgtaggcactcttccaagtacagtctgtaatgttactttcactgtagattctaaccaacagacttaccaaacatacacccacaaccaattccgccatcaaccaagattccccaaacctccaaatattacttttcctcagggaactttgctagataaatccagccggttttgccagggacgcccaagctcatgcagtactcgaaacttctggttccggcctgctgattataaccaatgtctgcaaatttccaacctcagctctacagcggaatgggttctattggaccaaactcgaaattctcttttttgggaaaataaaaccaagggagctaaccagagccaaacaccctgcgtccaagtcttagcaggcatgactatagccaccagctacctgggcatatcagcagtctcagaattttttggaacctccctcacccccttatttcatttccatatctctacatgccttaaaactcaaggagccttttatatttgtggccagtcgattcaccaatgcctccccagtaactggactggaacttgtaccataggctatgtaaccccagacatcttcatagcccctggcaatctctctcttccaataccaatctatgggaattccccgttgcccagggtgaggagggcaatccatttcattccccttctcgcgggactcggcattctagctggtacgggaaccggaattgctggaatcacaaaagcttccctcacctatagccagctctcaaaggaaatagccaacaacattgacaccatggctaaagccttaacgaccatgcaagaacaaatcgactctttagcagccgtagtccttcaaaatcgtcgaggactagacatgttaacggcagcacagggaggaatttgtttggccttagatgaaaaatgttgcttttgggtaaatcaatcaggaaaagtacaagacaacatcagacaactcctaaatcaagcctccagtttacgggaacgagccactcagggccataaagctccagacgaatctcagtgcaggacgccatcctcgcaatattcaagagtcacccttctaaggaggacccctagactgctcgctagtggaacacgacagaggcgaaatcctgccccgtctcccgtggacctggctggatatggtttttgccaatccacagagccatcctgccctgacagctag

SEQ ID NO: 130795 - DNA, 642 bp, Homo sapiens
atgaccccctggactgggaagcagttagtaactgcatatgctgcccttcagactcataagagcatggcagaacaggctacagtcatcatgcagatgacttacccaatagcaggatggctgctacgttcatgggtagcgacccttccagactgggacagcacagactgggacagcactttatcaaagttggcatgctccaactgcattgtggactgggcccacacctacgctgaggtgaccaatgtctccaactgttggatctgtactacccttccagcagcagctgtggatggcttgccctggcacatgcacccagcttctgtgaaaaactggacacgactagaaacttgtggttccacagacaatttgtgggatgcaacacggcaggctttggacacaataactatccctggagcaggtgtcgttactatagaaatgcaagttacagcccttgcagagcacacagctcgggccctgaattacacccgagttgctctccttttgctaactgatgaggttgatcagatcaggaaggtggtgctgcaaaatcggatggccttaaacatagtcacagttgctcagggtggcacctgtgcccttggagggacacaattttgtacatttatccctgacatccactag

SEQ ID NO: 130796 - DNA, 996 bp, Homo sapiens
atgctcatagacttctttgtggagaggaagataatttcttttgatggatgcattgcacagctcttcttcttacactttgctggggcttcggagatgttcttgctcacagtgatggcctttgacctctacactgctatctgccgacccctccactatgctaccatcatgaatcaacgtctctgctgtatcctggtggctctctcctggagggggggcttcattcattctatcatacaggtggctctcattgttcgacttcctttctgtgggcccaatgagttagacagttacttctgtgacatcacacaggttgtccggattgcctgtgccaacaccttcccagaggagttagtgatgatctgtagtagtgaaatacaaactaccatcagagattactacaaacacctctatgcaaataaactagaaaatctagaagaaatggataaattcctcgacacatacactctcccaagactaaaacaggaagaagttgaatctttgaatagaccaataacaggagctgaaattgtggcaataagcaatagcttaccaaccaaaaagagtccaggaccagatggattcacagccgaattctaccagaggtacaaggaggaactgagaaagccctaccacaagaagcggaagtatgagttggggcacccagctgccaacaccaagactggcccccgccgcatccacacagtccgtgtgtggggaggtaacaagaaatactgtgccctgaggctggacgtgaggaatttctcctggggctcagaatgttgtgctcataaaacaacgatcatcgatgttgtctacaatgcatctaataacgagctggttcgtcccaagaccctggtgaagaattgcattgtgctcattgacagcacactgtaccgacagtggcccccatggcacttagtcaagaaggtgccccactgcgactgttccaaaagggaggatgagggctctgaagaagctaaagtcacagtgaaatga

SEQ ID NO: 130797 - DNA, 496 bp, Homo sapiens
  misc_feature (1)...(496): n = a,t,c or g
gccggttttggcatacagtttgaatctttgccaggctgtttcctgtggttggcagtttaattaacggtgtaacagtgatttcacatctaggtttaccgctgagaaataaggcaagatgtaacgtagtgtactgataaaatcactctcgtctttggtgtctagatgctcactcccaagcctgacaagttgatgacagtgcagtttgagagctcctatggctcaccaatcagctcagtgcttgtgtagttcatccgggcttgtaccaccttcatgtacgctccatctggattccctaccgatgcttattcagcacaatgtgtggtgtttgtcagacatgcactgttgcaatgcagcttgactgtcttgcagacagcttcaatgctgtttttaaattgacagaggcagcaggccatatggctaggtaagatcagtttttccagttcagcagtcatcttgagantgttgtcatggcgatcatcatcattnnnngnagctc

SEQ ID NO: 130798 - DNA, 789 bp, Homo sapiens
tttccctacggttgcagttttattacaagatttctttccaaacgcaagatcaggccaacaagctcagcgactctgacgcttcacatcttcacccactcgcaccgtgttccgaacccacccgcaccaacgtacacacaaaactcccacgcgagcgaccgcagtcccaaattgcatctccatacccactcccaccctgccccgaacgtcttaaaaaacaaacaaacaaaaaaaaaaactggtaagaaccctcaccccacattctcccaccccgcaacgctgcagcgcacacaggacagagccgggcgtccaagtcccttcccgcgcccccgccgacagtctcgccgcgtccccgcccgggcgccccaggcacgtagctgcccgcccggaggcggcggcagagcgcagagagcggggcgagggtccgggtctccggggtccttcttgcagcagcgctggcgagggcggacccagatggcgctcagtacagccccaggatggctgcgcccacgtccttggagggccggcgctcctgcaccagaaagttgatcatgctctcggacttgatgagcaggttgcagcccaggaagaagacgccgaagaccacgaaatttccaaggaaactatatttcttacattgatggaaatgtatggaaagtgtacagttggaccgagaaactgtgagtatattctctccaaatatgacaaaaagctaactgcattgtaagatctttcttggtccagcattttgaggtcggtacctctgaggaaagatatttctcctccatgccc

SEQ ID NO: 130799 - DNA, 364 bp, Homo sapiens
gggcacaaatgatgaggcatctcctggaagcttaacttcttatccatcccatctcttggacagatgatgccagttaattactttgaatgtggcctagggatttctgggaggatccgaagaacaaggctgtctgcagtaggagcctcctgttcctcgccacctaagcttcagccctgcccaactaacagctctccatgttctaaagaaggtgggagtgctggaccaccccagccttctggaaccccagttctgtgacattatccatctcctgggaaatatgctggttttaaccatgcaaactggccaagcatcaggcagaaatagcagctgtgcctgggaaggacaggtgacatctgtgaaagaa

SEQ ID NO: 130800 - DNA, 663 bp, Homo sapiens; identical to SEQ ID NO: 115204

SEQ ID NO: 130801 - DNA, 548 bp, Homo sapiens
cggcacgagtcagactcttcttagaagtctagcttctgcctgtatctttcagcccaaagtgagacttttgagtcgggaagagatacctctgaatttaaactactgatcagtgtcacccaattctaatcccaaccacctttattctaggcataccatactcactgccatgcttacccttcagttgggcacctgtgtcctccttcccattggccttctggttccctaccccaactgtcccagtcccacaggccttcaggtaacaccttttctgcccagcccttgtggtagcggttggcctgcctcctttacctactcaagtaaccgctttaccactaatttattgttttgtgttttcatcttataggatcttacctagccatatggcctgctgcctctgcccaatttaaaaatagcattgaggctgtctgcaagacagtcaagctgcattgcaacactgcatgtctgactaacagcatacattgtcctgaagaagcatctgtagggaatccagaaggagcgttcatgaagatgttacaagcccggaagct

SEQ ID NO: 130802 - DNA, 2010 bp, Homo sapiens
tcagtacagccccaggatggctgcgcccacgtccttggagggccggcgctcctgcaccagaaagttgatcatgctctcggacttgatgagcaggttgcagcccaggaagaagacgccgaagaccacggtaagcgacagcacgcagagcacggcgatctgcgccacccgcgacacccacaggctgcgctcgtcgggcgccagccccgcggggaccccgtcgctggcggccagcggtgcgccccctggacagcagcccagccacgtgcccagcccgtgggtgcggtttcccagggcggccccggcgccgccgcccacgccgtccacctcctccaagccgctgtggttcaggaaggtcgcgttcatcgccgcgcggcgccgggggtctcggcgcgcatgtcccgggtgcactgggctgctcgccggggtccgcgctctcagggacgctccggacccctcggaccggctcctctccatggtgctgcttgagtgtcctcatgacatggcggctggcttgcctcagagtaactcttgaagaatgtgctagaaggtgagcacctggcaggatgcttcgaccttgttctgatgcctggggacttctggtgagttccctggccatccatcctggtctgttcaccttctcaggactccagttgagttgggctgcgtgtgacagacccctgagtcgctgctgtcctctagtggccactggataaattgcacagcacgccggccttggggaaaacgccgcagctgcaggtgccaccagtgagtcttctattcaaagtaattaactggcatcatctgtccaagagatgggatggataagaagttaagcttccaggagatgcctcatcatttgtgccagtgaccccgcataatttcttgatgaattgtgcaaactgggaagctgatagctctggaaatgagaaagcaggtgttattttctgtttctgaatatccccaacaagggtgcaatgattcttttacttatcggggtcattgttttcctacctattcaaggatataaactgtgtttcttcacagaaatttccaaggaaactatatttcttacattgatggaaatgtatggaaagcatacagttggaccgagaaactaattctcagagaaaataacttgactgaattacacaaggattcatttgaaggcctgctatccctccagtatttagatttatcctgcaataaaatacagtctattgaaagacatacatttgaaccactaccatttttgaagtttataaatcttagttgcaatgtaattacagaactcagctttggaacatttcaggcctggcacggaatgcagtttttacataagttaattctcaatcacaatcctctgacaactgttgaagatccgtatctctttaaattgccagcattaaaatatctagacatgggaacaacgctagtcccacttacaacacttaagaacattctcatgatgactgttgaactggaaaaactgatcttacctagccatatggcctgctgcctctgccaatttaaaaacagcattgaggctgtctgcaagacagacaagctgaattgcaacagtgcatgtttgacaaacaccatacattgtcctgaagaagcataggtagggaatccataaggagcgttcatgaaggtgttacaagcccggaagaactacacaagcactgagctgattgttgagccaaaggagccctcaaacagaactggcatcaacttgtcaggctttgggagtgagcaactatacaccaatgacgagagtgattttatcagtacactacgttgcatgttaccttatttctcagcggttaacctataagtgaaatcactgttactaccgttaattaaactgccaaccacaggaaacagcctggcaaagattcaaactgtaggccaaaaccggcagagagtgaagagagtccttattggccccaaggagcatccagaaaaggcacttcaaagaggtaggaaggcagagcatcaggagggaacagg

SEQ ID NO: 130803 - DNA, 416 bp, Homo sapiens
  misc_feature (1)...(416): n = a,t,c or g
gttagagattacaatttgactgaagaacagaaggcgatcaaggccaagtatccgccagtcaataggaagtacgagtatttggatcatacagcagatgtccatggattgtattacacagagcatgaatatacttctttaggttacacgcatggggagatactctggaggaagcatttgagcaatgtgcaatggccatgtttggttacatgacagatactgggacagtggagcccctccaaacagtagaagtagaaacccaaggtggggagaagaattttcattgtccaagcaccctcagggaacagaagtcaaagcaataacatattcagcaatgcaggtctataatgaagagaacccggaagtttttgtgatcattgacatttaagacacccaaaaatanaagactcctacgaaaa

SEQ ID NO: 130804 - DNA, 478 bp, Homo sapiens
ttgggaaatacatgggggtaacaaccctgcaaacgcctgaaaatatggttatctttagaatttacgaagataaatgtgattaggcacatgtggaagaagttcaagagactgtaaatgagggaggccaggtttcgcgactattaaaccaggtggctttttccttcagcatccccaggagaagtacgaacgcgactacaacagccggcacaaatgggatcatgcctgaagtacccatggggcacagtagaaagagcagcaggaagccgcgggtaaggagaggggatgcctgtgtgcttacatgtaaagagagaagtaagccacctactcacactcgtacttcctattgactggcggatacttggccttgatcgccttctgttcttcagtcaaattgtaatctctaacatcttcctcttcctgcacgaaatcgtcgacccgggacagccgtccatgtcctgcaggcgtacagctttcaatt

SEQ ID NO: 130805 - DNA, 626 bp, Homo sapiens
aacgctttgaggaactctgcacgagctcgtgccggtctaatcctgcagtcatggcgcaggaagaggaagatgttagagattacaatttgactgaagaacagaaggcgatcaaggccaagtatccgccagtcaataggaagtacgagtgtgagtaggtggcttacttctctctttacatatttggatcatacagcagatgtccagtgagtatagcgggagttcattcctttgaaaccacgtcagtaggaagactgaatgtttcaatcttggttacacgcatggggagatactctggaggaagcatttgagcaatgtgcaatggccatgtttggttacatgacagatactgggacagtggagcccctccaaacagtagaagtagaaacccaaggagatgacttacagtctcttctgtttcactttttggatgaatggctttataagttcagtgctgatgaattcttcataccccgggtggggagaagaattttcattgtccaagcaccctcagggaacagaagtcaaagcaataacatattcagcaatgcaggtctataatgaagagaacccggaagtttttgtgatcattgacatttaagacaccaaaaaataaaagactcctacga

SEQ ID NO: 130806 - DNA, 668 bp, Homo sapiens
tttatgagatcgtatagtcagtgtggtggaattcggtggatgaagggcggaagtagagtgtctaatcctgcagacatggcgcacgaagaggaagatgttagagattacaatttgactgacgaacagaaggcgatcatggtcaagtatccgccagtcaataggaagtacgagtgtgaatttggatcatacagcagatgtccatggattgtattacacagagcatgaatatacttctttaggttacacgcatggggagatactctggaggaagcattcgagcaatgtgcaatggcccatgtttggttacatgacagatactgggacagtggagcccctccaaaccagtagaagtagaaacccaaggagatgacttacagtctcttctgtttcactttttggatgaatggctttataagttcagtgctgatgaattcttcataccccgggaagtgaaagtacttagcattgatcaaagaaatttcaaattacgattcaattgggtggggagaagaattttcattgtccaagcaccctcagggaacagaagtcaaagcaataacatattcagcaatgcaggtctataatgaagagaacccgggaagtttttgtgatcattggacatttaagaccacccaaaaaattaaaagactccctacgggaaaaaaaaa

SEQ ID NO: 130807 - DNA, 942 bp, Homo sapiens
agagcaagactccgtctcacacacaaaaaaatgaaagattggaatgccacccctttcctagcatgcagaacatatggcaggatcctgctcttctgtcccctgtagcgggttgtcccgtgttccccttaaggaagaaatcacagtttttgtcctcctggtgcttccggctggaggttcacctgctagtccctgatcctctttgcttagtgatgcacatgagtctactcatccccccaccactcccagcccccactggtttaagaataagaggtgataggcagttcggcggtccagtgggtctgtctcttgcttcaacagtgtttggacggaacagatccggggacggtcttccagcctccgaccgccctccaatttcctctccacttgcaacctccgggaccatcttctcggctatctcctgcttctgggacctgccagcaccgtttttgtcgttagctccttcttggcgaccaaccatgagctcccagattcgtcaaaattattccaccgacgtggaggcagccgtcaacagcctggtcaatttgtacctgcaggcctcctacacctacctctctctgggcttctatttcgaccgcgatgatgcggctctggaaggcgtgagccacttcttccgcgaattgaccgaggagaagcgcgagggctacgagcgtctcctgaagatgcaaaaccagcgtggcggccgcgctctcttccaggacatcaagaagccagctgaagatgagtggggtaaaaccccagatgccatgaaagctgccatggccctggagaaaaagctgaaccaggcccttttggatcttcatgccctggattctgcccacatggacccccatctctgtgacttcctggagactcacttcctagatgaggaagtgaagctcatcaagaagatgggtgaccacctgacgaacctccacaggctgg

SEQ ID NO: 130808 - DNA, 419 bp, Homo sapiens
  misc_feature (1)...(419): n = a,t,c or g
tttcgttgtaccacaacagtagtcagaagcggcactggaccttctccagcgaggagcagctggcaagactgcgggctgacgccaaccgcaaattcagatgcaaagccgtggccaacgggaaggttcttccgaatgatccagtctttcttgagcctcatgaagaaatgacactctgcaaatactatgagaaaaggttattggaattctgttcggtgtttaagccagcaatgccaagatctgttgtggctcacttgtgcatttttggcctgcaaagtagatgaattcaatgtatctaatcctcagtttgttggaaacctccgggagagtcctcttggacaggagaaggcacttgaacagatactggaatatgaactacttcttatacagcaacttaatttccaccttattgtccacaatcn

SEQ ID NO: 130809 - DNA, 781 bp, Homo sapiens
tcatccacatgcaggcgtccattttccgttgactgaaacagaaatgttagagttgagaattttagttgaaaagaagtacaacgtaaaagcagctgtttctaaggaagtttctgagttacctttgaattcaataagttggcagaaaacagtgtcttctttagaaatagttaacatctgttggttgacctggtgccacgttctgtactctaagcaccgaaaggcaagcaaacacttgagagttgtttgacaaaaataaacatcctgtcgtctcagtgggcgcctaacgaacccgggatacggtctgttcctagtccgctccggaaatgcaacgcgtacgggctggccgcgtaatcgtgacgacagcgcgccagcgccggctgccggacgccctaggcttccgcgagatcttctccagcgaggagcagctggcaagactgcgggctgacgccaaccgcaaattcagatgcaaagccgtggccaacgggaaggtgaggttttcccaacggttgcccagttgcccggtcactaaattctgagcagctgcgggagctctctggctcccaggacaatctcgctccgtcgtttctctgcctctgcggcgcgagtgcgtttttctatcaaaataagcgagcaccttgccaggttccgtgggtacaaagacgaacaacgccatccccgtcgtcgaatggcagacaagtaaccagtctttgtaacgtagtgaagaagagagtaagtagtgtgctaaggtagtgcgtggcaagagccgttcacttgtcaagag

SEQ ID NO: 130810 - DNA, 1389 bp, Homo sapiens
acgccagcttgggacgaggctacgaacccgggatacggtctgttcctagtccgctccggaaatgcaactgcgtacgggctggccgcgtaatcgtgacgacagcgcgccagcgccggctagccggacgccctaagcttctgcgagatcttcggtgggggtacgggtgttttacgccaggacgctgatgcgtttgggttctcgtctgcagaccctctggacctggtcacgattccataatgtaccacaacagtagtcagaagcggcactggaccttctccagcgaggagcagctggcaagactgcgggctgacgccaaccgcaaaattcagatgcaaagccgtggccaacgggaaggttcttccgaatgatccagtctttcttgagcctcatgaaggaaatgacactctgcaaatactatgagaaaagggtaattgaaattctgttcggtgtttaagccagcaatgccaagatctgttgtggggtacgggcttgtatgtatttcaaacgtttttatcttaataactcagtaatgggaatatcaccccaggctaaataatgctccacttgtgcatttttggcctgcaaagtagatgaattcaatgtatctagtcctcagtttgttgggaaacctcccgggagagtcctcttggacaggagaaggcacttgaacagatactggaatatgaactacttccttataccagcaactttaatttccaccttattggtccacaatccttaccagaccatttgagggcttcctcatcgacttaaagacccgctatcccatattggagaatccagagattttgaggaaaacagctgatgactttcttaatagaattgcattgacggatgcttaccttttatacacaccttcccaaattgccctgactgccattttatctagtgcctccagggctggaattactatggaaagttatttatcagagagtctgatgctgaaagagaacagaacttgcctgtcacagttactagatataatgaaaagcatgagaaacttagtaaagaagtatgaaccacccagatctgaagaagttgctgttctgaaacagaagttggagcgatgtcattctgctgagcttgcacttaacgtaatcacgaagaagaggaaaggctatgaagatgatgattacgtctcaaagaaatccaaacatgaggaggaagaatggactgatgacgacctggtagaatctctctaaccatttgaagttgatttctcaatgctaactaatcaagagaagtaggaagcatatcaaacgtttaactttatttaaaaagtataatgtgaaaacataaaatatattaaaacttttctattgttttctttccctttcacagtaactttatgtaaaataaataaaccat

SEQ ID NO: 130811 - DNA, 930 bp, Homo sapiens
atgcaaacccccagctgctggtgtgcaggaaaagaatccaggagatcacctgatgaagcccagcattttacagataggcagtggagcaggggaatccagttgacactgtggctaaatttcagaaaacctcccatgagatcttgcaaaggagatggagaaaatatggctgaatgccagcaagaacatctcctctttgaccacaagtactggctcaactgcatattggtggaggatacagagatccaagtgtctgtagatgataaacacctggaaacaatatacctgggactcctgatacaggaaggccacttcttctgcagagccctgtgctccgtgactccaccagccgagaaggaaggggaatgcttgacactttgcaagaatgagttaatctcagtgaagatggcagaagctggctccgagttggaaggcgtgtctttggtgacaggcagaggacgctgtaaggccttgacgggttatgagccaggagaaaaggatgaactgaatttctaccagggagaaagcattgagatcatcggctttgtcatacctgggcttcagtggttcattggaaagtcgacaagttcaggacaagtgggctttgtccccaccaggaacatagatcctgattcttattccccaatatttgcagttgagcttcgagggtgccctggtgacatggagccagaaaagcacatgctgacaccaaggttgatacagagagtgatagaaaggagagaatgcgtcagttcagtttattttaacaggtggtcactgaggacttcctctgtgcaaggagggaagcaaaactccaagacaaagggcatgctgttaggcactgagggtgtggttttggtacttggatcctgctacccaccctgtctaaccacagggccccttcagaggaagggcacacacagggagaaatag

SEQ ID NO: 130812 - DNA, 3990 bp, Homo sapiens
atgggtggctgcttctgcatccccagggagcggagtctgacccggggcccaggtaaagaaactccttccaaggatccaactgtatcgagtgagtgtatagcctcatctgaatacaaggaaaaatgttttctgccacagaacattaatccagacctgacactctccttctgtgtaaagagccgctccaggaggtgtgtaaatggacccctacaggaagctgctcggaggcggctctgggcactggagaatgaggaccaggaggtgcgcatgctgtttaaggacctctcagcaaggttggtcagtatccagtctcagagggcccagtttctcatcaccttcaagaccatggaggaaatctggaagttctccacctaccttaatttaggtatggtacaaggcaagcagaaatcttgttggcttgacttcttaggctacgtatccatgtgtctagaacatctcctctttgaccacaagtactggctcaactgcatattggtggaggatacagagatccaagtgtctgtagatgataaacacctggaaacaatatacctgggactcctgatacaggaaggccacttcttctgcagagccctgtgctccgtgactccaccagccgagaaggaaggggaatgcttgacactttgcaagaatgagttaatctcagtgaagatggcagaagctggctccgagttggaaggcgtgtctttggtgacaggcagaggacgctgtaaggccttgacgggttatgagccaggagaaaaggatgaactgaatttctaccagggagaaagcattgagatcatcggctttgtcatacctgggcttcagtggttcattggaaagtcgacaagttcaggacaagtgggctttgtccccaccaggaacatagatcctgattcttattccccaatgagcaggaactctgcctttctcagtgatgaggagagatgctccctgttggccctgggaagtgataagcagactgagtgttccagcttcctccacactcttgctcgcactgacatcacatctgtctaccggctcagtgggtttgaatccatccagaatcctccaaatgatctgagtgcatcccagcctgaaggtttcaaggaggtcaggcctggcagagcctgggaggagcatcaggccgtggggtccagacagtccagcagctctgaggactccagcctggaggaggagctcctctcggccacctcagacagctatcgcctgccggagcctgatgaccttgatgacccggaactgctcatggacctaagcactggtcaggaggaggaggctgagaacttcgcccccatattggcttttctggatcatgagggttatgctgaccactttaagagtctctatgacttctccttctctttcctcacttcttccttttatagcttctctgaggaggatgagtttgtggcctacctggaggcatcaagaaagtgggccaagaagagccacatgacctgggcccatgcccgtctctgcttcctcctgggccggctgagcatcaggaaggtcaaactctctcaggccagggtgtacttcgaggaggccatccacattctcaatggagcatttgaggacctatccttggtggccactctgtacatcaatttggctgccatctacctgaaacagaggctgagacataaaggctccgccctgttggaaaaggcaggtgccctgctggcctgcctgcctgaccgtgagtctagtgccaagcatgaactcgacgtggtggcctacgtgctgcgccaggggattgtggtgggcagcagcccgctggaggccagggcctgctttctggccatccgcttgctcctgagcctaggccggcacgaggaggtcctgccctttgccgagcgcctgcagctcctctctggacaccctcctgcctctgaggctgtggccagtgttttgagttttctgtatgacaagaaatatcttccacaccttgcagtggcctctgtccagcaacatggtatccagagtgcccaagggatgtctcttcctatttggcaggtccaccttgtcctccagaacacaaccaagctccttggctttccttccccaggctggggtgaagtttctgccttggcctgcccaatgctcagacaggccctggctgcctgtgaggaactagcagaccggagcacccagagggccctgtgtctcatcctttccaaagtgtacctcgagcacaggtctcctgacggtgccatccactacctgagccaggccttggtgctagggcagctgctgggtgagcaggaatcctttgagtcttctctctgcctggcatgggcctatctcttagccagccaggccaagaaggctttggatgtgcttgagccactgctatgctccctgaaggagacagagagtctcactcaaaggggagtcatctataacctcctgggacttgcactccaaggtgaaggccgggtgaacagggcagccaagagctatcttcgggccttgaacagagcccaggaggtgggagatgtgcataaccaggcagtggctatggccaatcttggccacctgagccttaagtcctgggctcagcatccagccagaaactatctcctgcaggctgtacgactctattgtgaacttcaggccagtaaggagacagacatggaattagtacaggtgtttctctggttggcccaagttctggtgtctggacaccagctgacccatggccttctttgttatgaaatggcattgctgtttggcttaaggcatcgacatctaaagagtcagcttcaggccaccaaatccctctgccatttctacagctctgtgtccccaaaccctgaggcatgcatcacctaccatgagcactggctggccctggctcagcaactcagggaccgggagatggaagggaggctgctggagtccctggggcagctttatcggaacctaaataccgccaggtccctcaggaggtcactcacatgcatcaaggagagcctgcgtatcttcattgacctgggggagacagacaaggctgctgaggcctggcttggggcggggcgactccactacctcatgcaggaagacgagctggtggagctgtgcctgcaggcagccatccagacagccctgaagtcagaggagcctttgctggctctcaaactttatgaagaagcaggtgatgtgttcttcaatgggacccgccacaggcatcatgcagtggagtactaccgagctggagctgttcctttagcaaggaggttgaaggcggtgagaactgagctccggattttcaataagctgacagagctgcagattagcctcgaaggctatgagaaggctttggaatttgccaccctggccgccaggctcagcacagtcacaggagatcagaggcaagagctggtggcctttctccgcctggctacagtgtactactccctgcacatgtatgagatggctgaggactgctacctgaagaccctgtccctctgtccaccatggctgcagagtcccaaggaggccctgtactatgccaaggtgtattatcgcctgggcagactcaccttctgccagctgaaggatgttacaggcactgcggggaagggattttacccagacagggttacgggcatcaggaagggctttctggaggacgtgatatccaaactgagttctgaaagggacacttacttaattctaactgcagaccagcaggggtgtcttctccccagagaagcagagacaagtgactgcttagggggtggggattctccccagctgccatggtgcaggatcaagaataacttgcgtggccaggactgcacagtggggctgcttggcttggcttcccagtacagactgcgaggcagatgggacactgaggcccaggaaagggaacaccttgacatcagcatcaatgtcaatgccaatgtcaatgtcagagctgggcctgagaccaacatcttctacttgcagacatga

SEQ ID NO: 130813 - DNA, 207 bp, Homo sapiens
ttgtgccttcaggacctgctcaagcctgatcacatatacaccacttccatttgatgatggaatgctgctgtgcacaacccactttatggcaggagtcgtgttaatttgctcaagcaatgaaaccacatctggtacagcagctgcaattggagtcaccacttggttaagcttatgataacccactgtcattctccaagatccatctgt

SEQ ID NO: 130814 - DNA, 2703 bp, Homo sapiens
cagaaccccttgaatgaaggggaggccgggtccccttgaggaaggatcccactacattaccaacaatttatgcagtgaatctttctcccatccttccccaagacctctggccttttaccagggtaactgtgcactggggaaagggaaatgatcagacatttcagggactacaggatactggctctgagctgatgctgattccaggggacccaaaacgtcactgtagtcctccagttaaagtagggtcttatggaggtcaggtattacacagcaagtgggcaccaatatatcatttcctcagtagtcataactgcaatggattttgttacatcagtatagccaatttaccaaagaagtttggtcaaaacatcaaagaatgccttaccaataatcggatagtgccttttaactgtgtccaagaccctacatactaaccaagcgctgccccgtgagcagtctccaccacctcccctgcaaacgtccagtggtgcagaggtaatggacgttggctctggtggtgatggacagtccgaactccctgctgaggaccccttcaacttctacggagcttctcttctctccaaaggatccttctctaagggccgcctcctcatagacccgaactgtagtggccacagcccgcgcaccgcccggcacgcacctgcggtccggaagttctcccctgaccttaagttgcttaaggatgtaaagattagcgtgagctttaccgagagctgcaggagtaaggacaggaaggtgctgtacacaggagcagagcgcgacgtgcgggcggagtgcggtctgctccttagccctgtcagtggggacgtgcatgcttgtccctttggcgggagtgttggtgacggggtaggcatagggggtgagagtgctgataagaaggatgaggagaatgagctggatcaggaaaagagagtggagtatgcagtgctcgatgagttagaagattttactgacaatttggagctagatgaagaaggagcaggcgggttcacggctaaagcaatcgttcagagagacagagtggatgaagaggccttgaatttcccctacgaggatgactttgacaacgatgtggatgctctgctggaagaaggcctttgtgcccccaaaaagaggcgaacagaggaaaaatatggcggagacagcgaccatccgtccgatggagagacaagtgtgcagccgatgatgaccaagattaaaacagtgctcaaaagtcgtggccgcccacctacagagccgctgcccgacgggtggatcatgacattccataactctggagtcccggtgtacctacacagagagtctcgggtggtcacctggtccaggccatacttcttgggaacgggaagcatacggaaacacgaccctcctctgagtagcatcccttgtctgcattataagaaaatgaaggacaacgaggaacgggagcaaagcagtgacctcacccctagtggggatgtgtcccccgtcaagcccctgagccgatctgcagagctggagtttcccctggatgagcctgactctatgggtgctgacccggggcccccggacgagaaagacccactaggggctgaggcagcccctggggccctggggcaggtgaaggccaaagtcgaggtgtgcaaagatgaatccgttgatctcgaggaatttcgaagctacctggagaagcgttttgactttgagcaagttactgtgaaaaaattcaggacttgggctgagcggcggcaattcaatcgggaaatgaagcggaagcaggcggagtccgagaggcccatcttgccagccaatcagaagctcattactttatcagtgcaagatgcacccacaaagaaagagtttgttattaaccccaacgggaaatccgaggtctgcatcctgcacgagtacatgcagcgtgtcctcaaggtccgccctgtctataatttctttgaatgtgagaacccaagtgagccttttggtgcctcggtgaccattgatggtgtgacttacggatctggaactgcaagcagcaaaaaacttgcgaagaataaagctgcccgagctacactggaaatcctcatccctgactttgttaaacagacctctgaagagaagcccaaagacagtgaagaactcgaggtgagtgttgtggtcctgccctgctgggagctgtgtgtgcagtgcggctaccctgccctgttagtgtgatctatcaggaagaagaagaaagaagaagaagaagaaaaaagaagaagaagaaagaagaagaaaaaggaggagaaggagaagaaagagaagaaggagaagaaggagaagaagggggatgagagtgaccaaagagctccaggagaagggctgtggggcttgtactccctcaccaagtttgtctgagctctgatatttccaccggtgatcggggttgctgcccataaaggtggcgtttacaaaacgtcagtttctgttcatcttgctcaggatatggctctgaaggggctacgtgttttgctcgcgccaggtaacgacccccagggaacagcctcaatgcgtcacggatgggtaccagatcttcatattcatgcagaagacactctcctgcctttctatcttggggaaaaggacgatgtcacttatgcaataaagcccacttgctggccggggcttgacattagtccttcctgtctggctctgcacagatattga

SEQ ID NO: 130815 - DNA, 1120 bp, Homo sapiens
gaatcttgtaagcaccctgggaccacagagaccacccaggtctagctccctatctcaagattctgaatttattgacaactacaacgtctctcttgcttcatgtgtaacaccaacacccaccgaaaccaaacggctctgggcagaggacacagccattcacgccccctgccaggaaaagctgcagctgacacaggctcctacagcgtcggcgggccacgtgcgggaggaggggccgccttctggttggcgcccggtgtccgttcctcctatcggcgtaggccccgcgaggaagacaagggcgcgccctggctgggagggcgtggccagagacctgtccatcaccgagtccacgagtggcagcacctaccacaccgcagtaccttggcgaggcggagcaggggcaggcagccgccagccgccgtgggagccggaggatggcggcggtagcagcggccgcccgagaggaggcggtgccgagatcgggggcgccgagcgcggcagcagagagcgggcggacatgggcgccaaacagagcggcccggccgccgctaacggccgcacgcgcgcgtactcgggctcggatctaccttccagtagcagcggaggcgccaatgggaccgcgggcggcggcgggggcgctcgggccgccgccgcggggaggttcccggctcaggtgcccagcgcgcaccagcccagcgcctccggcggcgccgcggcggccgcggcggccccggcagccccggcggccccgcgcagccgctccctcggcggggccgtggggagcgtggcgtcgggggcccgcgcggcgcagtcccccttcagcatcccgaacagcagcagcggcccgtacggctcgcaggactcggtgcacagcagccctgaggacggcggcggcggccgggaccggccgtgcactgaaaagaactgtgatgagacgtggacaggagcatgctgctgcttgttcagggaaggaggctgcttcactgttgccacaggggtggtgaaccagttctgtccgcttcactccctggtgttcgcaaggcagttttcggaatcagaaactctagaggaatttgagaacactgatacgcttacttcacagaaaactgaagtctgttga

SEQ ID NO: 130816 - DNA, 1207 bp, Homo sapiens
gcacctagtcagtgcggggaattagctcctggggcctaacaaaaagaaacctgccatgctgctcttgctcctctctgcactggtcctgctcacacagcccctgggctacctggaagcagaaatgaagacctactcccacagaacaatgcccagtgcttgcaccctggtcatgtgtagctcactggagagtggcctgcctggtcgcgatggacgggatgggagagagggccctccgggcgagaagggggacccaggtttgccaggagctgcatggcaagcagggatgcctggacaagctggcccagttgggcccaaaggggacaatggctctgttggagaacctggaccaaagggagacactgggccaagtggtgagcaactgggtgtcgacttcaggtgtttccaggtggtggtgcagctgcaaggatatgccagtgggcacgcacagagcccatcccaggaagaaggacctccaggacctcccggtgtgcctggtccagctggaagagaaggtcccctggggaagcaggggaacataggacctcagggcaagccaggcccaaaaggagaagctgggcccaaaggagaagtaggtgccccaggcatgcagggctcggcaggggcaagaggcctcgcaggccctaagggagagcgaggtgtccctggtgagcgtggagtccctggaaacgcaggggcagcagggtctgctggagccatgggtccccagggaagtccaggtgccaggggacccccgggattgaagggggacaaaggcattcctggagacaaaggagcaaagggagaaagtgggcttccagatgttgcttctctgaggcagcaggttgaggccttacagggacaagtacagcacctccaggctgctttctctcagtataagaaagaggggccaggtatgggagtccccagtgatgctgctgcacatcccaaggcagcccagaaaccagatactgttctgggaactaggactggggttctgctctgggggtacaaggcaggtgggggcctgaccttgggctgctctgggtgccaccctgagcccatggagaatcttaaggacgatgagtcagggtgcagcctgcattctgagcagcccaacaaagccaggggcacagccttctctggagcttccagtgtcctttgcggaagatttccatgcatgggcccaagagccacaaagacagactaa

SEQ ID NO: 130817 - DNA, 1651 bp, Homo sapiens
atggcagccagtcatccacgaaatagccagcaagggcctaatgtggggaagcggaggggcaaggatggcaaaaggagatggattcaaggaatgtttagaagctgcatcaaactgtggctaattggttacatgtctgcatcatacaaaactgagagttccatgaaggtctggcttggaagtttaaagtttgtattgtttaagacagtgattaaaatgtctgtcatggatgaactactcttggatctcttccacaaactgaccagtgggaggcagctggcagcaggcaatgggctttgcggtatatcacataaggaacaggaggtatggaagccaggacataatattttagtgaaaatgagaaaggaagataaatcactggtgtggcttatacattcaacacttgctcgctacacacaagttaccaactttttaggtacctccagatcatcagtcactagatgtaaaccaggagccaactgccccagttcacacagtggcatcagtagacaactgtccccactgtctgtcaccgaagattcctctgctcctattcttgaacttcaaaaccaaggatcctcaggagtttgtggacacagagttgagagacagaacagatcagcagacgatgggacacagactcattctgagaacagcagccaagaaaacagaatcaaggctcgctgcctgtcctgcacgtccatggttctgaagggcatctggggactcttgatcatcttgtcagtatcatcatcttgggttggaactacacagattgtaaaaattacttataagaacttctattgcccatttttcatgacttggttttcaacaaactggaacattatgtttttcccagtctattattctggtcatctagccactgctcaagaaaagcaatctccaatgaaaaaattcagactcattaataccatctgccaagaagttactccagaagttactcccgaagctctcatgactgaacaagggaagaatagagttagtgtggaatgcagtcggatttttggtgaagatggtctgacgctgaaactctttcttaaaagaactgctcccttttctattctatggactttgactaattacctttatttactggctttaaagaagctgacggccacggatgtctccgctctgttctgttgtaacaaagcctttgtcttcttgctgtcatggattgtgctgaaagacaggttcatgggagtgaggatagttgctgcaataatggcaattaccggcattgtcatgatggcatatgcagataatttccacgctgattccatcataggagtggcatttgcggtgggctcagcctctacatctgcattatataaggtcttgtttaaaatgtttcttggaagtgccaactttggggaagctgcacactttgtctccaccttgggtttcttcaatttgatcttcatctccttcaccccagtcatcttgtatttcaccaaggtgggagcactggtcctcttttgctgctctgccatgggggctgtctctgtggggatgggcaggggctgtgggctgggccttcaacatcctgggggaaatgttgggggttggtgctggacataacccaatcctaaatctccaattggggacagtgctcagcgtttccggggaaatgcag

SEQ ID NO: 130818 - DNA, 595 bp, Homo sapiens
atgatgaaaagtttaagtaatcaccatggaaacctagagcagattcaaggcgagtcagatccccagcacagtaaccagcagtgggtgggcctggccgggcagcaggcaggaccatctgtgtttgggctcttcagggattcctgtcttctgttgctgctgctgctgctgtttctgcttttgctcaggaaaccaccctgttcactgacaccagacagagacattgaaggccaggttatagccactgcaggagtggcagcagcagcagcagcagctttgaaagccttatataaaacatgctcggtattgcccgtgaggcagcttggccacagatcagctggagaggcagccgatggtttggggagtatagcgatagacacgacccagctcaacatgtccgtgacagatcccacagcctgggctacagccatgaataacctgggcatggttcccgtagggttgcctggacagcagctcgtgtctgacaccttggatcccacatgggccaagtttagctgtattgtagtttatagctcttttgtttttgataaatacaccaaacaggtgcagaaagatgatgcggaagacagttctcctg

SEQ ID NO: 130819 - DNA, 1032 bp, Homo sapiens
atgtgcacatgtgtttctccggctgcacagaaggcatttcagccaccaaggaggtgtggcaccaaatacgacacacccatagagaaaagagatgtgaattctcctcagatgactccatttaaaaaattcaatgaaatttctcttttggagagtaattctatagctgacgaagaacttgcattgataaatacccaagctcttgtgtgtggttcaacaggagaaacactatttatatctgtcagtgaatcctctaggagtgctcccaccagttcagaagattatctcagtatgaaacgacgttgtactacatctgtgatcaaagaacaggagagttcccaggccagtacggaagaatgcatccagaatttgctcctccatccacggggactgagagccattactattgctgtatttggtaagcaaaatacgtacatcaggctcgaaccctttaagatcaacgttcttgagcagatcacgaagcatatcgaaaaactgcatgtgagagcggcaaattggtaccacagagaatggggcactgctgtaaagatacccaaagatgtgaaagcaactttggaactgggtaacaggcagagactggaaataatggaagggctcagaagacaggaatatgtggcagctctggctggccaggctaaaaggggtcaatgtacagttcagaccattgcttcagggggtacaagccccaagcgttggcagctgccacatggtgttgcgcctgtgtgtgcacagaagtcaataactgaggtttgggaacctccacttagatttcagaagatgtatggaaatgcctggatttccaggcagaggtgtgctgcaggggtggtgccctcatggagaatctctgctagtgcagtgcagatgggaaatgtggggtcagagcccccacacagaggctccactggggcactgcatagtggagctgtaagaagagggccactgcccaccagaccccagaatggtagatccaccgacagcttgcagcttgtgcctggaaaagccgcagacacttaa

SEQ ID NO: 130820 - DNA, 1435 bp, Homo sapiens
ttatgaacctgtaaaatcaaaagcaagttggttacttcctagatacaatgggggtacaggcattgggtaaatacacctattccaaatggaagaaattggccaaaacaaaaaggctataggccccatgcaagcccaaaatccagcagggtagccaaatcttaaagctccaaaatgatctcctttgactccatgtctcatatccaggtcatgctgatgcaagaggtgggctcccatggccttgggcagctccacccctgtggctttgcaaggtacagctccactcctggctgctttcacaagctggcattgagtgtctgcggcttttccaggcacaagctgcaagctgtcagtggatctaccattctggggtctggtgggcagtggccctcttcttacagctccactaggcagtgccccagtggagcctctgtgtgggggctttgaccccacatttcccatctgcactgcactagcagagattctccatgagggcaccacccctgcagcacacctctgcctggaaatccaggcatttccatacatcttctgaaatctaagtggaggttcccaaacctcagttattgacttctgtgcacccacaggcccaacaccatgtggcagctgccaaggcttggggcttgtaccccctgaagcaatggtctgagctgtacattgaccccttttagccatggccagccagagctgctgggaagcagggcacaaagtttcaaggctgcacacagcaggggggcccaggacccatctcatgaaaccatttttccctcctaggtctccaggcctgtgatgggagaggctgccatgaagtcctctgccatgccctgaaaatggggctttcttttctatcacatcatcaggctgcaaattttccaaacttttgtgctctgcttcctcttgaatgctttgctgcttagaaatttcttcaaccagataccctaaattgtttctttcaagttcaaagttccacatgtggatctccacatattcctgtcttctgagcccttccattagttccagtctctgcctgttacccagttccaaagttgctttcacatctttgggtatctttacagcagtgccccattctctgtggtaccaatttgccgttctcacacttccctctgattgttgcatgttgttcactgttatgtaacattgtgttgcagcaagaaaagcaatgaggaatggcatatcccccattattattgataataccaacctccacgcctgggaaatgaagccctatgcagtcatggtaggaagaagtatcattctgaattttcagttatggacattttgtgagaaagttgaagcatctgttctttcctctttttctgatgttccatgatttcatatttgctaacagtggttctcccagggagaaggtaacgaggttttattttagtgtttctctgct

SEQ ID NO: 130821 - DNA, 389 bp, Homo sapiens
tcccctgaaggttatgttcaaagcaggtcagggtgtgattaaatagattaaggaaatatactgtgctgtttgataattcttcactgttgtttgttaaacaatttgcacaatttgcctcctgccatgtggtattaaaaaattctgagagaatcacaactatttgcattctatctgccattaagagacttctggcacaactctgactctctgaagtattccccgcggctcggctgatgttgtccatcttgctgacgacctgttggaagagggggtagcaggtctgacagaggcgcacgggccgggcgctgcgcaccagacaccctgtcagctctgcgctgctgttggcgaagtccagcaggagctcccggcactcaggatccagatccggc

SEQ ID NO: 130822 - DNA, 855 bp, Homo sapiens
cttcacgccccaacgctttaaacaccgggcccgtcttttgaattattgggtcccaacaaaaaaaatgctttctttcccaccccgggcacgaaatttggaatttccttaagggcgccccccttaattttttttccatcaagtttttattgagcggtgttctcagcctgctatctccaatcgaggttcaactgcctggttccagatcttggaacttgtggtcagtcgtttccatctgactctcctagaatccttgccctctttatcttccacatattcacagccattttcatccctggacagtccccatctactttctgtactctcagtctggttacagaatactactacagaaatttgttggggaaactgaggcccccagcgctgaccatcattacaccctcctcctttcccaactctcctgagccacagtcccggacgtggtcctgtacccacccccgcggctcggctgatgttgtccatcttgctgacgacctgttggaagagggggtagcaggtctgacagaggcgcacgggccgggcgctgcgcaccagacaccctgtcagctctgcgctgctgttggcgaagtccagcaggagctcccggcactcaggatccagatccggcaggtccgggggcagcgacagaggccccagccctccaccctgcaggagggacagggacaagtcctccacctccagcaactgctgctccgacaggaggtcgtggaagaccctgtgcggactgctgccgaaggggagcgcgcccagggccagccccgaccacagcagcagccccagcggcagccacggcggcaacgaacacctccgctgcgcggctgtcgggcccggctccat

SEQ ID NO: 130823 - DNA, 401 bp, Homo sapiens
cccagattttagagcaggagtcggctctgagttccctttttgggttttgggtggcagcagccagaggaggaatatggcgctcttaggcagccgagcggagctggaagcggacgaggacgttttcgaagatgccttggaaaccatctcaatatcttctcactcagatatggcaacaagcagccttcactttgcatcatgtgatacacaacaggcgcccagacagcgcggagcgtctactgtcagcagttcatcatcaaccaaggtggatctcaagagtggcctcgaagaatgtgctgtggcattgaacttatttctaagcaacaaatttacagacgccttagaattgcttcgcccctgggctaaggagagtatgtaccatgccttgggctacagtaccattg

SEQ ID NO: 130824 - DNA, 817 bp, Homo sapiens
tcaaatgtagccaacggttgaaaccgtgtcaaataaagcaaactgtgggctgtaaccaatccagctgtctctgtacctcacttccgttttctgcacgtcactttcattctctgtccataatcttcttccaccacatggctgcactgcagtctccgagcctgctctggctccagagatcgactgattcacgaatctttcattgctcaattgaactcctttaaatttaattctgctgaagtttttatcatatgtcatgctaaggtatttgcatgttactttaaaggcaatgagaagctgtgcacagattttaagaggcaaggcgaaaatggacttgcattttagaaagagcagtctattgtcagctgctagcagcaatctgaaatccatgatagccttggccattaattttcctaagaagcgaaacttcatcttaacctttgcgatatgagctggctttgctgtcctaccaaagggaagcgcaaacaggccctggaggttttgaatatacttggtcccttcttggctcccttttggattgctaagagttacttcttcacctctccaaagacccaagtcagctctctgtagttcctgagatacaagcgcataaaactccagtgtaggcccaagacctgtaccaacccctcccgtacccgtagctgtgccctgccaggtcggttcataccccctttctgaattctttggcgtggaaactcctcgtgctcccaggattaccaactgctttttccttactcccctagcattctttccccgggaagccagctgtagtactgcatgttcttcagtaggtggcaac

SEQ ID NO: 130825 - DNA, 768 bp, Homo sapiens; identical to SEQ ID NO: 127672

SEQ ID NO: 130826 - DNA, 1095 bp, Homo sapiens
atggagcgtgagaagccctaccatatgctgtctgcaagctggagagctgcagaggctggtagcgtggctcagtccaagcacagaggcctcaaaaccatggaagctgatggtataactcagtctgaggatgaaggcttcagaacctgggggactacaggtaagaagggccgttcagagactttcatgtcagattgtggagatcatggtgtgcatctgcgggtttcactgctagcagctgacaatagactgctctttctaaaatgcaagtccattttcgccttgcctcttaaaatctgtgcacagcttctcattgcctttaaagtaacatgcaaataccttagcatgacatatgataaaaacttcagcagaattaaatttaaaggagttcaattgagcaatgaaagattcgtgaatcagtcgatctctggagccagagcaggctcggagactgcagtgcagccatgtggtggaagaagatttatggacagagaaaggaaagtgacgtgcagaaaacggaaggctaaggagagtatgtaccatgccttgggctacagtaccattgtggtgttgcaggctgtcctgaccttcgagcaacaggacatccagaacggcatttctgccatgaaggacgctttacaaacctgccaaaaaagcaagcagagtccttccacctacagtccaggtgggtggtgtgtcagaggcctctcggggaccagtgaccgtgacccaaggctgccctcaggccacaccatctgcgagatgcggtggccacctggcgagggaaaaggactggcaccggaccaaagaccaggtggatgcttccacggaccccagcagccagaggaggaatatggcgctcttaggcagccgagcggagctggaagcggacgaggtacgatccgatggggattgcgggcccggcccctgaagccctggacaggagtccgggagagaagacgacgcctgggctttacgaagtctgaccctgaagtcctggcactggctctctgggtgttcgtggaatcatccctcgacctgggaatctcaccttctatggaagtttcctggtggcagaaccgaaaggcttacgattga

SEQ ID NO: 130827 - DNA, 396 bp, Homo sapiens
  misc_feature (1)...(396): n = a,t,c or g
nttcaactgctcttgatggatcaacatacttccttttggtaccaacaagaagtgcaaatagatacctcagctcacgcataaaaggcaaattccgatgttccttttggtttcggggtaaatcttgagcatttgatggaggcttgtaattcagaactaatcttctaaattccaaaagattaaataatgattgtatctgcttggcttcccacactgatgtatctatcattgccaggaagtgctgtttggtagtaagttgtctcctcctgctgaggggtcttagcattcttcgcagtaaggaaagccactgctaattccaagtttccattactatccttcaaggcttgctgtagtatctgggtgacattaatccaagtaatttctctccggacgcgtggg

SEQ ID NO: 130828 - DNA, 683 bp, Homo sapiens
gcggccgccgtggccctcacagtcggcgtttcgccgtcatcccgcggtgcccgcgcacgccggccgccatcgccttcgcgcctggctggcgggggcgctgtcctcccaggccgtccgcgccgctccctggagctcggcggagcgcggcagccagggccggcggaggcgcgaggagccgggcgccaccgccgccgccgccgccgccgccgcgggggccatgaccgtggagcagaacgtgctgcagcagagcgcggcgcagaagcaccagcagacgtttttgaatcaactgagagaaattacggggattaatgacacccagatactacagcaagccttgaaggatagtaatggaaacttggaattagcagtggctttccttactgcgaagaatgctaagacccctcagcaggaggagacaacttactaccaaacagcacttcctggcaatgatagatacatcagtgtgggaagccaagcagatacaaatgtgattgatctcactggagatgataaagatgatcttcagagagcaattgccttgagtttggccgaatcaaacagggcattcagggagactggaataactgatgaggaacaagcaattagcagagttcttgaagccagcatagcagagaataaagcatgtttgaagaggacacctacagaagtttggagggattctc

SEQ ID NO: 130829 - DNA, 2706 bp, Homo sapiens
atggcaccagcatctgcttctggtgagggcctcaggaagttgccaatcatggtggaaggagaaggggagccagtgtgtatagattacatggcaagagacaagcaagagggaggccctaccttcaacattggggatcaaatttcaacaagagacttggtgagggccaaagaaaccgtatccaaaccataccagctcgtttgcagtgtagggggtgcaagttcaaggcttgtgaaattcctagaaaggcgaggggagagaacgcgtgacacagaaaggggccggagttcgggaccctacgcagttttgggacgttatgggcatggagggaaatgtttgctttggaggctttggtcggcgtttcgccgcctgcccgcggtgcccgcgcacgccggccgccatcgccttcgcgcctggctggcgggggcgctgtcctcccaggccgtccgcgccgctccctggagctcggcggagcgcggcagccagggccggcggaggcgcgaggagccgggcgccaccgccgccgccgccgccgccgccgcgggggccatgaccgtggagcagaacgtgctgcagcagagcgcggcgcagaagctccaggagccagccaggtgcgtgttacagccgttctttgttcccaccgtttggcgagttctgggtttttgtccagtgaccaagaataatgaggtacgtggacaccagagaagaaaaaaaatccatacaaggagcatctcagagcccagaagaggagctctagatatggaagtggattggatgggaaccaccttggatttggaattgctggtcagggagaggaccatatttaggacatttccagttgaggatcagggcgtatcacaggtcagaagtttcataaatgggaagcaccagcagacgtttttgaatcaactgagagaaattacggggattaatgacacccagatactacagcaagccttgaaggatagtaatggaaacttggaattagcagtggctttccttactgcgaagaatgctaagacccctcagcaggaggagacaacttactaccaaacagcacttcctggcaatgatagatacatcagtgtgggaagccaagcagatacaagactgaccagtcagggaagcgaccagtcagggaagcggctacttctgtcacaattaggaaagcggcctcttggactactgagttcaagaacatacttctatagctgcagcccaggaaacaggaagccaggattagatgtgattgatctcactggagatgataaagatgatcttcagagagcaattgccttgagtttggccgaatcaaacagggcattcagggagactggaataactgatgaggaacaagccattagcagagttcttgaagccagcatagcagagaataaagcatgtttgaagaggacacctacagaagtttggagggattctcgaaacccttatgatagaaaaagacaggacaaagctcccgttgggctaaagaatgttggcaatacttgttggtttagtgctgttattcagtcattatttaatcttttggaatttagaagattagttctgaattacaagcctccatcaaatgctcaagatttaccccgaaaccaaaaggaacatcggaatttgccttttatgcgtgagctgaggtatctatttgcacttcttgttggtaccaaaaggaagtatgttgatccatcaagagcagttgaaattcttaaggatgctttcaaatcaaatgactcacagcagcaagatgtgagtgagtttacacacaaattattagattggttagaagatgccttccaaatgaaagctgaagaggagacggatgaagagaagccaaagaaccccatggtagagttgttctatggcagattcctggctgtgggagtacttgaaggcacttcttccatggcggcgacaagagaaaatgaggtagaagtaaaagtggaaacccaggataaacccttgagatttatctggggtttccacttttacttctacctcatttcctcttgctgctgccatcctaggaacttggtgccctgtgtctcagctgctccagcttttgctagaaggggccaaggtgtagctcggcccattgtttcagagggtgcaagccccaaaccttggcaccttccacgtggtgttgagcctgcgggtgcacagaagtcaagaagtgaggtttgggcacctccacctagatttcagaagatgtatagaaatgcctggatgtccaggcagaagtttgctacagagttggggtcctcatggacaacctctgctagggcagtacggaagagaaatgtggggttggagcccacacagagagtccctactggggcaccacctagtggaactgtgagaagaaggccactgtcctccagaccccagaatgttagatccactgatagcttgcattgtgtacctggaaaagctgcagacactcaacaccaacccgtgaaagcagccaggagggaggctgtaccttgcaaagccacaggggcggagctgcccaggaccatgggaacctacctcttgcatcagtgtgacctggatgtgagagctggcatccaaggagagcatttcagagccttaaaatttgactgccctgttggatttcagactgtaacccctttgttttggcctgtttctcccatgtggaatggctgtatttacccagtacctgtactccaattgtaa

SEQ ID NO: 130830 - DNA, 555 bp, Homo sapiens
gatcacaactcctcaccagcaagggaacaaacagtatggagaataagtttcacgaattgacagaagtaggcttcagaaaaataaccagtttagagaagaacataaatgacctgatggagctgaaaaacacagcacgagaacttcgtgaagcatacacaagtatcaagagcagaattgatcaggcgaaagaaagcatatcagagattgaagatcagcttaatgaaataaaatgtgaagacaaggttagagaaaaaagaatgaaaagcaacaaacaaaacttccaagaaatatgggactatgtgaaaagaccaaacctacgtttgactggtgtacctgaaagtgacagggagaatggaaccaagttggaaaacactcttcaggagattatccaggagaacttccccaacctagcaagacaggccaacattcaaattcaggaaatacagagaacagcacaaagacaatcctcgagtagagcaaccccaatacacataatcgtcagattcgccaagtttgaaataaaggaaaaaatgttaagggcagccagagagaaag

SEQ ID NO: 130831 - DNA, 839 bp, Homo sapiens
gatcacaactcctcgccagcaagggaacaaaactggatggagaatgagtttgacgaattgacagaagtaggcttcagaaggtgggtaataacaaactcctccgagctaaaggagcatgttctaacccaatgcaaggaagctaagaaccttgataaaaggttagacaaattgctacctagaataaccagtgtagagaagaacataaatgacctgatggagctgaaaaacacagcacaagaacttcatgaagcatacacaagtatcaatacccaaatcgatcaagcagaagaaaagatatcagagattgaagatcaactcaatgaaataaaaccaaatctacgtctgattggtgtacctgaaagtgatggggagaatggaaccaagttggaaaacactctgcaggatattatccaggagaacttctccaacctagcaaagcaggccaacattcaaattcaggaaatacagagaacaccacaaagatactcctcgagaagaacaaccccaagacacataattatcagattcaccaaggttggaatgaaggaaaaaatgttaagggcagccagagagaaaagtcgggttacccacaaaggaaagcccatcagactaacagtggatctctcggcagaaaccagaaaagagtgggggccaatattcagcatttgtaaagaaaagaattttcaacccagaatttcatatccagccaaactaagcttcataagcgaaggagaaataaaatcctttacaaacaagcaaatgctgagagattttgtcaccaccaggcctgccctacaagagctcctgaaggaagcactaaatatggaaaagaacaaccg

SEQ ID NO: 130832 - DNA, 507 bp, Homo sapiens
atgattggagcagatccagaatcccagtccctgaatagcaatcagtgttggaagctaagagccggcatccactatcatcacatgaaacatggaagaaacggcaaatcctatacagctgttagtgacctaactgggggacacctcccagtagggaccgacaggcacctcatacaggagagctctagctggcatctggcatgtgcccctctgggaccaagcttccagagaaaggatcgggcagcaatagttgctgttctgcagcttctgctggatcacaacccctcgccagcaagggaacaaaactggacagagaatgagtttggtgaattgactgaagtaggcttcagaaggtgggtaataacaaactcctctgagctaaaggagaatgttctaactcagtgcaaggaagctaagaaccttgaaaaagggttagatgaattgctaactagaatatccagtgtagagaagaacataaatgacctgatggagctgaaacatgcagcatga

SEQ ID NO: 130833 - DNA, 2370 bp, Homo sapiens; identical to SEQ ID NO: 129512

SEQ ID NO: 130834 - DNA, 1569 bp, Homo sapiens
atgtgcgatgccaactctttgctgtttaatgcacagcaggcacggtcaaaagggcaagtgcctctccagtttctgaggccagagtggagggttgctgttgctctgatgtttgctcagtgcaaggtggagaaggaaagcacaaggagaagacagaaatatcaagagtctcaagaacctttgaatgaagtaaacagtttcccacaaaaaatcagctatacacaattcccaaactcattttatgagcctcatcaagattttaccagtccagatatattcaagaagtcaagatctccatcttggtataaatacacttccacagtcagcacggggatcacagacttagaaagttcaactggactttggcctacaatttcccagtttactcttagtgaagagacaaacgcagatgtttattattatcgcatcatcatacctgtccttttgatagcacgtggggaaaggggcggctgtgggcacagcttcagcagacttaaatgttcctgcctgctggctctgaaaagagcagcagatctcccaccacaacactcgagctctgctaagggacagactgcctcctcaagcaggggtcaaaagacaactcatacaggagagctccagctggcatctggaggatggccctctgggacgaagcttccagagaaaggaacaggcagcaaaatctttgctgttctgcaacctccactggtgatacccaggcaaacaaggtctggagtggacctccagcaaaatccagcagacctgcagcagagggaaagcaatagcatcaacatcaacaaaaaggacatccacaccaaaaccccatatgaaagtcaacaatatcaaagaccaaacgtagataaatccacgacgatgaggaaaaactcgcacaaaaaggaggaaaattccaaaaaccagaacaccttttctccaacggatcacaactcctcgccagcaagggaacaaaactggacagagaatgagtttgacaaactgacagaagtaggcttcagaaagtgggtaataacaaactcctctgagctaaaggagcatgttctaacccaatgcaaggaagctaagaaccttgaaaaaaagttagaggaattgctaactaaaataaccagtgatggggagagtggaaccaagttaaaaaacactcttcaggatgttatccaggacagcttctccaacattccaattcaggaaatacagagaacaccacaaagatactcctccagaacagcaaccacaagacacataatggtcagattcatcaaggttgaaatgaaggaaaaaatgttaagggcagccagagacaaaggttgggttacccacaaagggaagcccatcagactaacagcagatctctctgcagaaaccctacaagccagaagagagtgggggccaatatttaatattcttaaagaaaagaattttcaaactagaatttcctatcccgccaaactaaccttcaggagtgaaggagaaataaaatcctttacagacaagcaaatcctgatagatcttgtcaccaccaggcctgccttacaagagctcctgaaggacgcgtga

SEQ ID NO: 130835 - DNA, 685 bp, Homo sapiens
  misc_feature (1)...(685): n = a,t,c or g
gaattttttatctattacttagcgatctttcagtgtaattggcctgaagtgaaaaccacagcctctgatggtgaacagaccacacgtgagcctgtgctcaaagccatgtttttggctgacacccatttgcttggggaattcctaggtcactggctggacaaattacgaagggaatggcagatggagagagcgttccagacagctctgtggttgctgcagccggaagtcgtcttcatcctgggggatatctttgatgaagggaagtggagcacccctgaggcctgggcggatgatgtggagcggtttcagaaaatgttcagacacccaagtcatgtacagctgaaggtagttgctggaaaccatgacattggcttccattatgagatgaacacatacaaagtagaacgctttgagaaagtgttcagctctgaaagactgttttcttggaaaggcattaactttgtgatggtcaacagcgtggcgctgaacggggatggctgtggcatctgctctgaaacagaagcagagctcattgaagtttctcacagactgaactgctcccgagagcangcacgtggctccagcccggtgtggacctgggcctctgctgcccacgtctgcccctgtcctcctgcagcattatcctctgtatcggagaagtgatgctaactgttctggggaagaa

SEQ ID NO: 130836 - DNA, 1785 bp, Homo sapiens
atggcagtgattatgaacttggactctggtgaccctggctcacgagtgaagctacagaccttcacggtgagtgttacagctcttaaagtggagcgtctggagttgttcgttcctccctttgggctcgtggtctcgctggcttcaggagtgaagctgcagaccttcgcgggcgggaaagcgtggctgttacaaacgcattctgacttgggggagcagaagttaactactttcataccaatctctctctctttaaaagtgatcttttggtgtaattggcctgaagcgaaaaccgcagcctatgatggtgaacaggccacgtgtgagcctgtgctcaaagccatgtttttggctgacacccacttgcttagggaattcctaggtcactggctggacaaattacgaagggaatggcaggtggagagagccttccagacagctctgtggttgctgcagccggaagtcgtcttcatcctggaggatgtctttgatgaagggaagtggagcacctctgaggcctgggtggatgatgtggagcagtttcggaaaatgttcagacacccaagtcatgtgcagctgaaggtagttgctggaaaccatgacactggcttccactatgagacgaacacatacgaagtagaacgttggaggaacagaaacaaccccagtttcattatgggtagcatcacacccacagactatgccctctccaagtgccacctaccacctgaggacgtggtcttgatcatctactgtggagtgaaattaccagatagaatagtagactctaaagcaggactcctgaaactacctgtgttgaagaatgtgatttccacccaactccaattcccatctatcatggaccaacttttggtctacaacttgttcaatgagacgagtccattggtcatgtgcctggatgtcatggcaatgtcaaatcgaggaaaccaccatctggctgcaacacgcctaaggaaggtattggatcacaactccttgccagcaagggaacaaaactggacggagaatgagtttgatgaattgacagaagtagtcttcagaaggtgggtaataacaagctcctctgagctaaaggagcctgttctaacccaatgcaaggaagctaagaaccttgaaaaaaggttagagaaattgctaactggaataaccagtttagagaagaacataaatgacctgatggagctgaaaaacacagcacaagaacttcatgaagcatacacaagtatcaatagccaaattgatcaagtggaagaaaggatatcagagattgaagatcaacttaatgaaataaagtgtgaagacaagattagagaaaaaagaatgaaaaggaacaaacaaaccctccaagaaacatgggactatgtgaaaagaccaaacccatgttggattggtgtacctgaaagtgatggggagaatggaaccaagttagaaaacactcttcaggatattatccaagagaactttcccaacctagcaagacaggccaacattcaaattcaggaaatacagagaacaccacaaagatactcctcgagaagagcaaccccaagacacataatcgtaagattcaccaaggttgaaatgaaggaaaaaatgttaagggcagctggagaaaaagaagatgaaactgacaacaatgagttcttcttgtggagccagaaagggaagagggccggaaccctgaacgaccacgtggaggaaagctgtccaccaaccaaaaatgcctgccttggaacacccattcattgctatgtgggcaagaaataa

SEQ ID NO: 130837 - DNA, 1259 bp, Homo sapiens
gagtggactttcagcaaactccagcagacctgcagcagagggtcctgactgttagaaagaaaactaacaaacagaaaggaatagcatcaacatcaacaaaaaggacagccacacaaacacccgatccgaagatcactgacatcaaagaacaaaggtatataaattcaccaagatgaggaaaaaccagctcaaaaaggcttgaaaattcccaaaacccgggatgccctcttctccctccaaagggatcacaactgctcgccagcaagggaaccaaaactggacagagaataagtttgatgaattgacagaagtaggcttcagaaggcgggtaataacaaactcctctgagctaaaggagcatgttctaacccaatgcaaggaagctaagaaccttgaaaaaaggttagatgaattgctgactagaataaccagtgtagagaagaacataaatgacctgatggagctgaaaaacacagtacgagaacttcctgaagcattcacaagtttcaatagccaaattgatcaagtggaagaaaggatatccgtgattaaagatcaacttaatgaaataaagagagcaggcaagattagagaaaaaaagaataaaaaggaacaaacaaagcctccaagaaatatgggactatgtgaaaagaccaaaatctacgtctgattggtatacctgaaagtgacgaggagaatggaaccaagttggaaaacactctgcaggatattatccatggagaacttccccaatctagcaaggcaggccaaccgttcagattcaggaaatacagagaacgccacaaagatactcctcgagaagagcaactccaagacacataattgtcagattcaccaaagttgaaatgaaggaaaaaatgttaagggcagccagagagaaaggtcgggttaccctcaaaggaaagcccatcagactaacagcggatctctcggcagaaaccctacaagccagaagagagtgggggccaatattcaacattcttaaagaaaagaattttcaacccagaatttcatatccagccaaactaagcttcataagtgaaggagaaataaaatactttatagacaagccaatgctgagagattttgtcaccaccaggcctcccttacaagagctcctgaaggaagcactaaatatggaaaaactggtacctcccactgcaaaaacataccaaattgtaaagaccatcaacactatgaagaaactgcatcaactaatgggcaaaataaccacctag

SEQ ID NO: 130838 - DNA, 630 bp, Homo sapiens; identical to SEQ ID NO: 130694

SEQ ID NO: 130839 - DNA, 1542 bp, Homo sapiens
atggcaatgattattgatgatgatgatgatgatgatgatgataatgatggtgatgatgatgttgatggtgatgatgatgggttagaagcacaggcttgcgttctgggggatgagtacaggacccctgtcatgctacgagcagatggcatcgatcctgactttgctgccatgaaatcccctcaagagagccccacatcaggggtcctgagtttgcagacagtcattagagacatccttgtttgggaaacagctgccctccaccctgatttcacagctggggaaacagggcctggagaggagactcatctggtgagaaaactaaagctcaagaaggccacggcacacacaggcagcgagggcagcaggaagattggaaatcagctctgctcccaatgcctgtgcccactctgttccaacacagccttccaaagctcatacgctgtgaagttttctgcccatcacattggccaaagagctctagccagagttgaagccagtgctgatcactttcctgacaacctggctggcagagatgggaccgtatgtagcacagggaagagtgggggtaataatagtgggaactcccagagttgtggagaagattcgacaagtgaatgcacacttcctggccacagcgagatcttgttaggaaagaaagttgccaggatgagcgggggcgccacatccagcgttctctgtggaagcctgcagcccctatgccatgacagcacgagattcaccactcgcttcaccttctccaccaactaccagtccctaggctccgttcagcctcccagctatggtgtccagctggtcagcagcgcagccagcgtctatgcaggcgctgggggctcgggctcccggatctctatgtcccgctccaccaacttccaaggctgcttggggtctgggggcctggctgcggggctggccgggggtctggagagaatgggaggcatccacaaggagaaggagaccatgcaaagcctgaacgactgcctggcctcctacctggacagagtgaggagccaggagaccgagaaccagaagctggaaaacaaaatctgggagcacctggagaagaagggaccccaggtcagagactggggccattacttcaagaccatcgaggaactgaggactcagatctttgcaaatactgtggacaatgcccgcattgttctgcagatcaacaatgcccgtcttgctgctgatgactttagagtcaagtatgagacagggctggccatgcgccagtctgtggagagcgaaatccatgggctctgcaaagtcactgatgacacaaatgtcactcggctgcagctggagacagagatcgaagctctcaaggaggagctgctcttcatgaagaaaaaccacaaagaggaagtaaaaggcctacaagcccagattgccagctctgggttgaccatggaggtagatgcccccaaatctcagaacctcaccaagatcatggcagacatccgggcccaatacaaggagctggctcggaagaaccaagaggagctggacaagtactag

SEQ ID NO: 130840 - DNA, 1376 bp, Homo sapiens
ctgagtcctgtcctttctctctccccggacagcatgagcttcaccactcgctccaccttctccaccaactaccggtccctgggctctgtccaggcgcccagctacggcgcccggccggtcagcagcgcggccagcgtctatgcaggcgctgggggcctggccaccgggatagccgggggtctggcaggaatgggaggcatccagaacgagaaggagaccatgcaaagcctgaacgaccgcctggcctcttacctggacagagtgaggagcctggagaccgagaaccggaggctggagagcaaaatccgggagcacttggagaagaagggaccccaggtcagagactggagccattacttcaagatcatcgaggacctgagggctcagatcttcgcaaatactgtggacaatgcccgcatcgttctgcagattgacaatgccccgtcttgctgctgatgacttttagagtcaagtatgagacagagctggccatgcgccagtcctgtggagaacgacatccatgggctccgcaaggtcaattgatgacaccaatatcacacgactgcagctggagacagagatcgaggctctcaaggaggagcttgctcttcatgaagaagaaccacgaagaaggaagtaaaaggcctacaagcccagattgccagctcctgggttgaccgtggaggtaagatgcccccaaattttcaggaccttcgccaagattcatgggcagacatccggggcccaatatgaacgagctggctcggaaagaaccgagaggagcctagacaaagtactggttctcagcagatttgagggagagcaccacagtgggtcaccacacagttttgctgaggtttggagctgcttgagacgacgcttcacagagctggaggacgtacagtcccagttccttgggagatccgacctggggattcccatggaggaaatcttgaagggccagctttggagaacagcctgagggaaggttgaaggcccgcttacgcccttacaagatggagcaagcttcaacggggatcctggcttgcacctttgagtcagagcttggcacagaccccggggcagagggacagcgccaggcccaggagtattgaggccctgctgaacatcaaggtcaagctggaagctgagattcgccacctaccgccgccttgttggaagatggcgaggactttaatcttggtgatgccttggacagcagcaactccatgcaaaccatccaaaagaccaccacccgccggatagtggatggcaaagtggtgtctgagaccaatgacaccaaagttctgaggcattaagccagcagaagacgggtacctttggggagcaggaggccaataaaaagttcagagttc

SEQ ID NO: 130841 - DNA, 485 bp, Homo sapiens
agggtgcggactctgaagacttcgacctccacgtgtttatactggtttgagaacaaagacagcgtcatccagaacgtagtagtccataatacatgtcgccttcacacaggtatggtagtctggtgaaagcttcgataacaaaaccagcttttctgaaaacttcaggcagactattcacttgttcttcccagttctgtcctttgatttccaaaatttctgatggtttctcccacttgccaccgttttccacatagggatgaaaggggaggacaagggcaaggatgaccctgcctctagttggctccaagacacttctgatataattggataaatagccagcccgatttctcaatgctgttgtttaagaagatctgtgttccttgatcaaggtaactctgaacaaagacagcctggagtgattcgcataatttctctctgttgcacacataccactggtggttatccttcctgccgcccgcggccgc

SEQ ID NO: 130842 - DNA, 498 bp, Homo sapiens
gcggccgccgccggcccacccgggccgctagtcatgttcacgtacagggagcgggtgagcgggctccgcagcgtccacatcctccgcgccagccacacggacgccaggctcaggcaagaagaacccactgagaggttacagtttcattcctcaggtctattaatcaggttttccagagaaacagaaccaattggtgtgtatataaaagaagattaggaggaatgggcttacaagatgatggtgtttgcgaagtcccacgatctgccatttgcaaactgagacccaagaaagctggtggtgtaactcaggctgaaggcctgagaaccagggggccaatggggctaagtcccagtccaagggcaaaaaaagatgagatgagatcacccagctcaacagtgaggcagaaaaacaaaaggaggcgaactcctgtctctctgttttgttccattcgggccctcaatggatagcatttaaaagacagaaacccctaaattatga

SEQ ID NO: 130843 - DNA, 467 bp, Homo sapiens
cttctccatacttcaacaaagaatgagttgtggcaatgagggaagagagaccctctcatagtgttttatactcagtacctgttttaagaaaaaacaacaaggaagtaaaaccaaagacaggcaggcagcctggcgctaggcccgaaaccaggcctgcgcctgcctggcctaaacccagtagttgaaaatcaattcataacttagaaaccgatgttattcatagattccagacattgtatagaagaacatttgtgaaactccctgccgtgttctgtttctctctgaccgccggtgcatgcagcccctgtcacgtaccgcctgcttgctcaaatcaatgacgaccctttcatgtgaaatcttcggtgttgtgagcccttaaaagggacagaaattgtgcacttggggagctcggattttaaggcagtagcttgccgatgctcccagctgaataaagcccttccttctac

SEQ ID NO: 130844 - DNA, 631 bp, Homo sapiens
gccctgaagggggctggatgggcaaggcggccgcgatggctcgagctcgggcggtggcggcggtggccggaggcggcggtgcctcctcctcctcgccccggcgccggcggtgatccgagcgagcggccgcggcccccgatgagactgctggcgggctggctgtgcctgagcctggcgtccgtgtggctggcgcggaggatgtggacgctgcggagcccgctcacccgctccctgtacgtgaacatgactagcggcccgggtgggccggcggcggccgcgggcggcaggaaggagaaccaccaggttgctaggaagaggctcaatgtttgtgttttcaccagatcagtttcagagactgcttaaaattaatccagactggaaaacccacagacttcttgatttaggtgctggagatggagaagtcacaaaaatcatgagccctcattttgaagaaatctatgccactgagctttctgaaactatgatatggcagcttcagaaaaagaaatacagagtccttggtataaatgaatggcagaatacggggttccagtatgatgtcatcagctggctgaacttgcttgaccgctgtgatcagcccctgactttgttaaaagatatcagaagtgtc

SEQ ID NO: 130845 - DNA, 1774 bp, Homo sapiens
  misc_feature (1)...(1774): n = a,t,c or g
atgattgcagattcggctgctcaggttatagtgttgcagttattagcttttgacaatgctaatgccgattgccaggctgctctgcaacctgtcagagggaaagcacatttagttgattacatcaaggcctgtgatggtatcagaggtaatctgcataaagctactttgttggcacaggaaatggcaggactgagagtggataaaggaaatactccatttcctggagcttgttttaactatgggaagcatggtcatactaaaaaagaatgtagaaaaaaatcagtgagtcaggcagccagatggggaaaaaggaaaactgctgatcctgaaatatgtccaaaatgtaaaaaagggaaatattgggctaatcagtgtcactctaagtttgacaaagatgggaccctgatttcgggaaatgccatgagggctgagcaagactgtgaatggtttacatttacaattcctgcagtaaacaacctgcagcctgctaagcattttcatcgtttcacagatgtgtctagtaatggtaaagcttcttattctggatcaaaaggaggacaggcaagggtccagctttttgagaatgcatcagtaagggccactaactctgaccttcctcagtcctccttgtggtgtaggaggaaaactagtgtttctgttgctgtgttggtgagtgcaactattccgatcagcagggtccagggaccatcacaggttcttgggcagggggagaaacaaacaaaccaaaacgttgtacccaacccctataccctgctctctcaaataccagaggaagcaaaatggttcactgctctggacctcaaggatgccttcttctgtattcccctgcactctgactcccagtttctctttgcctttgaggatctcacagaccacacatcccaacttacgtggaccatcttgccccaagggtttagggatagccctcatctctttggtcaggcactggctcaagatctaggccacttctcaagtccaggcactctggtccttcagtatgtggatgatttacttttggctaccagttcagaagcctcatgccagcaggctactctagatttcttgagctttctagcaaatcangggatcgaggctatcaagctacagatgatcttacaaatggaaccccaaatgagctcaactaacaacttctaccgaggacccctggaccaaccagctggccctttgactggcctaaagagttcccctctggaggacactacaactgcagggccccttcttcacccctatccagcaggaagtaactagagcggtcatcggccaaattcccaacagcagttggggtgtcgtgtttagagggggaattgagaggagcttgctacaagtgctggaaatctggccactgggccaaggaatgcccacagcccagaattcctcctcatccacgtcccatctgtgtgggaccccactgaaaatcagacttttcaactcaccaggcagccactcccagagcccctggaactctggcccaaggctctctgactccttcccagatcttcttggcttagcggctgaagacggacgctgcccagtctcctcagaagcccccgagactatcacgaatgccgatcttctggtaacactcacaatggaggctgaagtgcagggctgtgcagtcagaattcttacacaagaaccaggaccacaccctgtagcctttatatccaaacaacttgaccttactgttttgcctagccctcaagtctccgtgcagcagccgctgccaccctaa

SEQ ID NO: 130846 - DNA, 1632 bp, Homo sapiens
ctaaacaggacacccccaactgccgttgggaattgggcgatgaccactctggctaattcctgctggataggggcaaagaaggggccctgcagttgtagtgtcctccagaggggaactctttaggccagtgaaagggccagcaggtcgatccaggggtccttggtagaagttgttagttgagcacatgtggggttccatttgtaagaccatctgtagcttgatggcctcgatcctggaggaaacaaatttgacaaaaagattaaaaatagaaggcccaaaggcgagtaatagcacgatggctctcatgggacagttttggtttgtttgtttcccccactgccgcccaagaacctgcaatagtccctggaccctgctgatcagaatagttgcactcactgatgcagcagctgaaagactagttttcctcctagaccacaaggaggaccgaggaaggtcggatttagtggccattaccgactcatcctcgaaaacctgcacctttgcctgtcctcctagaccacaaagaggatgcttggcaattgtcccttggtcgtcgccaaaatgtgtctggaatttgttccttccagtgggcttgtggtctcgcttgacttcaggagtgaagccgcagaccattgcaatgaacgttgcagctcttaaaggtggtgcgtccggagttatttgttcctcctggtgggttcgtggtctcactgacttcaggagtgaagctgcagaccttcacggtgagtgttaacagctcttaaaggcggcacgtctggagttgttcgttcctccccagtgggttccgtggtctccccgacttcaggagtgaaagctgcaagaccttcgtggtgttacagttcataaaggcggcacgtccggagttgttcattcctcccagtgggttcgtggtcttgctgacttcaggagtaaagctgcagaccttcatggacacccaactgctattgagaatttggccgatgaccgctctagctacttcctgctggataggagcgaagaaggggccctgcagttgtggtgtccttcagaggggaactctctaggccaggggaagtgccagcggacaccgagttgtagaaggaagggctttattcagctgggagcattggcaagctactgccttaaaatccgagctcctcgagtgcacaatttctgtcccttttaagggctcacaacactaaagatttcagatgaaagggtcgtgattgatttgagcaagcaaggtgtacgtgacaggggctgcatgcaccggtggtcagagagaaacagaacagggcagggaatttcacaaatgttcttctatacaatgtctggaatctatgaataacatctgtttctaagttatgagttgatttttcactactgagtttaggccaggcaggcgcaggcctggtttcgggcctagcgccgggctgcctgtctttgatttcacttccttttttttaaaaaaaacaaaacaaaacaggtactgagtataaaataatataaaacaatataaaacaatatgagagggtctctctcttccctcatttccccccctttgagactctcactttttatcagtgggagttctcactcttatttttgctacttatgtattttcgtgcaatagat

SEQ ID NO: 130847 - DNA, 622 bp, Homo sapiens
tggtggatttcattaaaattaaaaaactttttctctctgaaaaatcctgttaagctgggcgctgtggttcatgcctgtaatcccagcactcttgggaggctgagttgggaagaaattaatagcttgaggccaggagttcaagatcatcctggggcagcaaagtcatacactcttgagggaagagagagaccttctcatattgttttatattgttttaatacctcagtaccctgttttaaaggaaaaaaaacaaggaaagtgaaaatcaaagacaggcagccccggcacccaggcctgaaacccagcccctgggcctgccctggccctaaaccctagtagttaaaaatcaacttacggacttagaacctgatgttatccgtagattcccaagcattgtataaaaaaattgtgaaactccctgttgtgttctgtaccagtgcatgaaacccctgtcacatatcccctagattgctcaatcaatcacgaccctttcatgtgaaatctttagtgttgtgagcccttaaaaagggacagaaattgtgcacttgaggagctcagattttaaggctgtagcttgccgatgctcccagctgaataaagcccttccttctacaactctgaa

SEQ ID NO: 130848 - DNA, 2544 bp, Homo sapiens
ggctgcgcgccggctgctcctccccacccccagcctttgccctgaagggggctggatgggcaaggcggccgcgatggctcgagctcgggcggtggcggcggtggccggaggcggcggtgcctcctcctcctcgccccggcgccggcggtgatccgagcgagcggccgcggcccccgatgagactgctggcgggctggctgtgcctgagcctggcgtccgtgtggctggcgcggaggatgtggacgctgcggagcccgctcacccgctccctgtacgtgaacatgactagcggcccgggtgggccggcggcggccgcgggcggcaggaaggagaaccaccagtggtatgtgtgcaacagagagaaattatcgcgaatcactccaggctgtctttgttcagaagttacctttgatcaaggaacacaagatcttcttaaacaacaagcattgagaaatcgggcttggctatttatccaattatatcattcttttgtgtcatctcgtttttagcctgtttatgtctagaacatctatcaatgggttgctaggaagaggctcaatgtttgtgttttcaccagatcagtttcagagactgcttaaaattaatccagactggaaaacccacagacttcttgatttaggtgctggagatgggagaagtcacaaaaatcatggagccctcatttttgaagaaatctatgccactggagctttctgaaactatggatatgggcagcttcagaaaaagaaatacagagtccttgggtataaaatgaatgggcagaatacggggttccagtatgatggtcatcagctgcctggaacttgcttggaccgctgtgatcagcccctgactttggttaaaagatatcagaagtggtcttggagccaactagaggcaggggccaccttgcccttggtcctcccctttcatccctatgtggaaaacgcctgggcactccgacagcccagtgggagcttgtcccccgatcaagcccagcaggcgctggctggtggcgccaagtgcggggcctgccgagcctgcgcccacccggaacccacgctggctcccgcctgcacctctcccttcacacctccctgtgagcagagggagccggctctggcctcggccagccccagagaggaggcccctacagtgcagccgtgggctgaagggctcctcgagcacagccagagccgacgccgtggccgagggggcgccgagagcgagcgagggctgctagcacgttgtcacctctcaatcccccgtctaaacaggatacccccaactgctgttgggaatttggctgatgaccactctagctacttcctgctggatagatgggactgtctagttgcaggaaaacaagctcagggctcccacggattctacattatgaaggaaacaagcaaagaaatctccaaaggaccacaaaaacccccaggctatcagttatgtcccttgcaagctgtagggggaggggaatttggcccaacctggatacatgtccccttctccctctctgatttaaagcagatcaaggcagacctggggaagttttcagatgatcctgatagggatcaagaggaagaggcccaaaaggaaaagcaagatcagagaaaggctgcagcattagtcatggccctcagacaaaccaaccttggtgattcagagaggacagaaaatggagcaggccaatcacttgccgttgagggccaggaaattgacttcctcctggacaatggtgcggctttctcagtgttaatctcctgtcccagacagctgtcctcaaggtccgttaccatccggggaatcctgggacagcctgtaaccaggtatttctcccacctcctcagttgtaattgggagacttttctacagataagttcccctctggaggacactacaactgcaggccccttcttcacccctatccaggaggaagtagctagagtggtcatcatccaattcccaacagcaattggggtgtcctgtttagaggggggattgacaggtgaagccaaccgggcttctgagtcagaaacacaaactaccatcagagaatactacaaacacctctatgcaaataaactagaaaatctagaagaaatggataaattcctcaacacatacactctcccaagactaaaccaggaagaagttgaatctctgaatagaccaataacaggatctgaaattgagtcaataattaacagcttaccaaccaaaaaaagtccaggaccagatggattcacagccaaattctaccagaggtacaaggaggagctggtgccattccttctgaaactattccaatcaatagaaaaagagggaatcctccctaactcattttatgaggccagcatcatcctgataccaaagactggcagagacacaacaaaaaaagagaattttagaccaatatccttgatgaacattgatgcaaaaatcctcaataaaatactggcaaaccgaatccagcaacacatcaaaaagcttatctaccatgatcaagtgggcttcatccctgggatgcaaggctag

SEQ ID NO: 130849 - DNA, 435 bp, Homo sapiens; identical to SEQ ID NO: 130554

SEQ ID NO: 130850 - DNA, 583 bp, Homo sapiens
cgcgcccctcgagatcgtcgacattagtccgtgcggtggaattctcgatctgctgctcgtctcaggctcgtagttcgccttcaacatgccggaaccagcgaagtccgctcccgcgcccaagaagggctcgaagaaagccgtgactaaggcgcagaagaaggacggcaagaagcgcaagcgcagccgcaaggagagctactccgtatacgtgtacaaggtgctgaagcaggtccaccccgacaccggcatctcctctaaggccatgggaatcatgaactccttcgtcaacgacatcttcgaacgcatcgcgggtgaggcttcccgcctggcgcattacaacaagcgctcgaccatcacctccagggagatccagacggccgtgcgcctgctgctgcccggggagttggccaagcacgccgtgtccgagggcaccaaggccgtcaccaagtacaccagcgctaagtaaacttgccaaggagggactttctctggaatttcctgatatgaccaagaaagcttcttatcaaaagaagcacaattgccttcggttacctcattatctactgcagaaaagaagacgaga

SEQ ID NO: 130851 - DNA, 821 bp, Homo sapiens
tgctattggctaacattacagtttcgctttaaccaatgggattgcggttttgaaaaacacttattttgattggacaaagttaatatacgtttccaggactcaccactggttaaacgcacaacttcattctctaccccacttgcgttaagaagcagtgaataagcggtaggttgacagagctaccgtcttcctgtttttttcctccaattttccggcagttactcccagtcatgcccgagccctcaaagtccgctcctgccccgaagaaaggctccaagaaggcagtgacaaaggcccagaagaaggacggcaagaagcgcaagcgcagccgcaaggagagctactccgtgtacgtgtacaaggtgctgaagcaggtccaccccgacaccggtatctcgtccaaggccatgggcatcatgaactccttcgtcaatgacatcttcgagcgcatcgccggcgaggcttcccgcctggcgcattacaacaagcgctcgaccatcacctccagggagatccagacggccgtgcgcctgctgctgccaggggagctggccaagcacgcggtgtcggagggcaccaaggccgtcaccaagtacaccagttccaagtaactttgccaaatttccaagttgatcgtgatgttgatccgggactcggtgtggtgacggcccgccctgagcacgaaagtgcacgctcttgacaacttccttatgtttggagctttctccaccaccacccccgcccattttcttgtaaaatttttaccatgcagatatgtaataactgcaagtaaaggctgaagacaatgtgagctgaacacg

SEQ ID NO: 130852 - DNA, 273 bp, Homo sapiens
atggctggagaatcccaaatagccataggatttcccagtaacaacttctgccgtggattcagggggatggtcgtgggtgaaggaaagaggcttctggtggcattcattgcccatggaattctaagtgttcgagagtgctatatcttggacttagagggtcagaggctgatgaagcttgtgaagaagcagaagcagctgacacaggatgatgatactgatgcggttgagattgctatcgacaacacggcttttatggacgagttcttttctgag

SEQ ID NO: 130853 - DNA, 546 bp, Homo sapiens
atgattaactggcctgataacacttccttcccctccctgcccttactgtcccactcccctaatgatatttcttgggatcgcctccaaaacaagtcaaatccttgtttctggggctgtgtctgggggaataatctaaatcaaggcaatggcttttctgagtacttcactcggaccttgacagaagcagctggcaagatcctcttccgcagaagccacatccgggacgtagctgtgaagagactgaagcccatcgatgaatactgccgggcacttgtccggctgcccccccacatctcacagtgtgacgaagtcttccggttcttcgaggctcgacccgaggatgtcaaccctccaaaagagcaaggcccctcacccccagatgcagtcctcccatatggtgtcaacaagggcaaacaggagctaaaggcaggcccaaactggcccggcaggactcaccacgtggtcaactgcgtgacccagaaatgcctctttgtgttccattttaaattctcatccagtggaaataaggaatctaaaagtctttga

SEQ ID NO: 130854 - DNA, 873 bp, Homo sapiens
atggtcttccggcagcaggggcaatgggatggatttggttttgcaattaaaataacagctggttctgtttccacagcacggttctggaagatgcagcttttggataagtttcccattgaaggtggccagaaggaccccaagcaaaggatcatccccttcctcccagaagagctcccttcacagtgggcttccccccgggctcagactggccctggacctgcacaggtcaggaccacagtgatcagtcagaccttggcaagaagcagggcctgcaccttgctaacccctggcacactgccagcccacagccagtgcctgcttgctgacttgaaaacggatgtaggggcacctccctcagagagcggctcctctctgaaaggcgtttctcctgcattcctccatcctcaaaagcagcgaaagatgacaaaatgggcctggttaaagtacttgcttcaaggttgttgcgaggatgaagggagggaattcagtgaaaagctcttagtgtgcaccagggcttccagaggtagcagccatagagcccaggcctccgatgagcacacagcagtcccagtggagaagggacctgtttcagggtcacacagccagcctgtggcccagggagatggcccggccctctggcttcagagaaaagatgatgaaggagagcttgagcaagagtccaggagaggaacaagaatgacccagcaagcactcattgagcatctgctgaatgcaaagcctagtgctccatgtagtgtgggggcagacaggaggggcaagatcctcttccgcagaagccacatccgggacgtagctgtgaagagactgaagcccatcgatgaatactgccgggcattcactgtttctggttaa

SEQ ID NO: 130855 - DNA, 597 bp, Homo sapiens
ttaagagctataaaactcatcaggaaggtccacagctccattcttgaagtcagcaagaccacgaacccaccagaaggaacgaactctggacacagtgttcccttggccatactttcctgcccctccacttccaggcaaaacactcctcgggacaggccttgggacatgtcccagatacacaatgggggcgctggacttggtgataaggggccgtcctctctggggcccctgctccccctgcagcgggaacctctctacaactggcaggcgaccaaggcgtcgctgaaggagcgcttcgccttcctcttcaactcggagctgctgagcgatgtgcgcttcgtactgggcaagggtcgcggcgccgccgccgctgggggcccgcagcgcatccccgcccaccgcttcgtgctggcggccggcagcgccgtctttgacgccatgttcaacggcggcatggccaccacgtcggccgagatcgagctgccggacgtggagcccgcagccttcctggcgctgctgtctctctgtgtgggggacactgctgatgattcccaagattgagatgatgacggtgatgacgactgggtgaacagccat

SEQ ID NO: 130856 - DNA, 647 bp, Homo sapiens
taaatttcagaaaattaagaagctgactttatatttggtggtttgaactatctatgctgtgtagcattcgtaataatgctattaaaggcctaataaaactgccgcaagaaaatagttcacttgcagtttataaatgaacgatattgtgtacaatgatagtaatgtgctatggagtacagttttaaagctattaatggaattttgggtaaatacacgacaatgtgatataaacaggatctaagactggattcccatgtcactaaactgcaccactatacctgtctctctgtgtgggggacactgctgtatgattcccaagattgagatgatgacggtgatgacgactgggtgaacagccatcacttcaacattgtgataatccttcacagcaagaaaccgaataaaatactaacatttctaacaactgctctgacattgtaaagagatccaacagaatcactcctgctgaaaaatacgctttctgccacctacacatttctatttagggaagtaaaatttgcttcatgggtcatgaccccattagtcagtgttacagctgtgctgggggatagggaagtatatctgggcagatttgatattttattacactttttttattaaaggcaggttttaaaatatagtaacat

SEQ ID NO: 130857 - DNA, 363 bp, Homo sapiens
ttaatcaaaggaatttggcagctgtagggttgtcttttcatccatatcgtccctggaattaactgtcctgctataccagtcagattgagcagcatctggtggtggccccgagcggcctcggaggccgcggcgtagctcctgggtgaaggcgtctctaaatcgctcagcgcggcggcacagggagcccacgggcccagccgcgaggtcctgcaggcggcgggccgcgtcctggccccgcagctgggcctgcagcagtgcgaaggccgtgagctgcgccgcacgtcggataggccgcgactctgacagacgttccaccagctgcgggctgtgcagcagggcggccagcagccgccgcagcaccat

SEQ ID NO: 130858 - DNA, 994 bp, Homo sapiens
  misc_feature (1)...(994): n = a,t,c or g
aaccaccccatctctacaaaanaatccaaaaagtaatctgcttccctcatgtgaatgtcgttgtaaggagtgagataacacatagagtgcaatgagcaagtcccagcacagaagactcatttcataaaatacgtgtttattattaccataggcctacagtccccggtattcttaacacatcttgcctgagaagtatcacactcatgcctatcaaccagctcacacatttaatcaaaggaatttggcagctgtagggttgtcttttcatccatatcgtccccggaattaactgtcctgctataccagtcagattgagcagcatctgtcaaggagtttcagtcgcacttgcagaggaaaggctctctggcttcggtccgtggctctccgtaggtgccgtgtctggacccagcctaccttcatctctgttaggcttaggggtctttctctcacactgtgtcttgtccaatcacaagacttcaacggagcgggcggtctggcctaaggctcttatgcgtgggatgtcttgcaggccaacaatcccagtcgggattcgaagccgcgcgcagtgcccggaatgacccctccacattgatgccactgtagagcccggaaggaaaagcaaagcggcctcggccccgcacagcccaggattaaatgtttgcgccagggcccctctggctaccttggtggtggccccgatcgccctcgccccgccgcggcgtagctcctggttaaaggcgtctctaaatcgctcagcgcgccggcacagggagcccacgggcacagccgcgaggtcctgcaggcggcgggccgcgtcctggccccgcacgctgggcctgcatgcagtgcgaacggccgtgagctgcgccgcacgtcggataggccgcgactctgacagacgttccaccagctgcgggctgtgcacgcagggcggccagcagccgccgcagcaccatcttctccaagcgcccggaacccgacctcgcctcgtgcc

SEQ ID NO: 130859 - DNA, 690 bp, Homo sapiens
cctccaaaggtgagctggtattatgaagaggctttgatttctttctctttatcaggatattcttccacctctgaggagaacattaactcttcactaagatccatgcctggcctataagacaaaaatagccaaagataatccaaccaagaagagccaccacgagattcacctcaatccatggctggagaatctgtccctcaattccctgcttcccagaggctaccattaacagaagaaggtgtgtaaaggtggattctgtcacttgtcatttgctgactcagagatagtataagagcagtaaagtacaagaaagatgctaaagctgtaggatccagggccaaaaaatttcggattgctactgatattttagcaaagtcaatcctgtcaaaagctgaaattgtactcagagccaaaagcaagtacagaagactctggaatggatacgctagggtcttgtattgttgcagaaggtttgagaggttggatagctgatctcctgctagaacatatatcacaacaatattccacacagcacagccagccaagaatcccatgagaaaagagaccaatcatcctgaaagcccggtgcactgtaagtgccacatctctggtggtccaggaaggcttcacgtccattgacacatctatgttttctgtggtctgtatcaactctgaacgaattacacggca

SEQ ID NO: 130860 - DNA, 1813 bp, Homo sapiens
atgtccaagggcaggaggagtggaaggaagcatccagcatggaagaaagatgaaatccacaaggctcagcaagcaaggttatccctcttctggccgccatctagccgtttggcagctgactgcatggtgcccacctacattgagggtgggtcttcctctcccagtccactgactcaaacgtcaatctcctctggcaacaccctcatagacacacccagaaacaatactttaccacaggagtccccaaaccccgctgtggacccatacgggtcagtggcctgttgggaacccagcgtcacagcagatgagcagcagggtggatcagcggccacattaaattctcataggagcaccaaccctattgtgaactcacacacaagtgatctaggtcgtgctgctccttatgagaatctaatgcctgatctgagatggaacagtttcatcctgaaaccatcccccaccccatgccccctcgttttttcttcctcagcctttcttattccttcatttatttcttttcctaacttaaagcccaaagttacagcaagtgcttctttggaaggccttgctcagacctgcgtggtcgaaggccctcttgagggcaatgagccatcaactaaagaactcaaagaggcacccagaggctcctgttcaaagaaggacagaaaaagacaagggcttacctctttgaattgggagactttcctccacccaaaagaagttcatctagtttcatctttattaccgaaatgaaaatggtattgatgcggagccagctcgaggaggcagttattcaaaaacctcgggagggaagaccaaagaaaaccccagcccagcagaatttaccagtatggccaattgaagcttagggagttagaagattgaagacataatcactggattgagccaactactgttgggaacagcagtctggtattcactggcacccactggcattagccagcctgtaggcaaagtatttgtggaaaaaagccggagattccaggctgctgatcgttcagagttgataaagaccacagaaaacatagatgtgtcaatggacgtgaagccttcctggaccaccagagatgtggcacttacagtgcaccgggctttcaggatgattggtctcttttctcatggattcttggctggctgtgctgtgtggaatattggtgtgatatatgttctagcaggagatcagctatccaacctctcaaaccttctgcaacaatacaagaccctagcgtatccattccagagtcttctgtacttgcttttggctctgagtacaatttcagcttttgacaggattgactttgctaaaatatcagtagcaatccgaaattttttggccctggatcctacagctttagcatctttctatgggtcctgcactgggaaagatctcttcagaactatatccaatggtacctcagctgttgtatatgagaccctaaagctcaagttgaggagaagactagctatgggaaaaaatgtttcaaaggctgttgagcacatcaataaaactattgagcctgccctgattagcaagcacctgaatgttatagaacagaagaggattgacaaattgatgatagagacagttgaccctgacaataggtctaaatttggagtgaacattatactgggaatctcttttgctgtttgtaaggctggagctgccgaaaagggattctccctgctgtcacagaattgtgaatttgctggcaattctgaaggcatcctgctagttccagctttcactgtgaccagcaatggttctcaatctggcaataagctggcagtatag

SEQ ID NO: 130861 - DNA, 846 bp, Homo sapiens
atggcagaagaaactcgacaaagcaaattggccatagccaaggaaaagatccccttgatgacaagaccagtgccagagtccataccactcctgaggcacactggactgggccccgcaaccctggtgcctctggattcctccaccaaagtctcgtcagtcagccccaccccttcagcaagcagcccagtccctgcccttgccaatctccccagggtgactttgggaggagtggaatgtagtgatatcacaatcggcctaggaactgtcattactgcaatactggcctttgatcttacaacccagtcccctaagcattgtcaccctatttctggttcctctggtcacagcacaaatttccagctggaagaagaatggagactatgggacctaggagcaagaggtttcaggctgccttactcccttaacatagacattgacagtgggaaaagcctacacttcccccatgagctcaaaacattgacaatatctctgggtggcaatgagagaatgggtttgttaaaagaatattggcagagaaacagccttggtgttccagcaggagtgaagaggaacaggaaaacgagtggcagtagccctgaaacagccacttctggtggttgccactcacctgaggatagcccatgccaagaactagcagtagtcctggacccgaggtccataaaaatcagtcaactgaataacaccatcaaatctttgacacccctggagaggggtataaacacctttgttttatcaacccaaagtgccattgatttaaagacacctctatttgagaaatgttggaaatcgtatgtcttagaattgatcaaatacaccagaatgtga

SEQ ID NO: 130862 - DNA, 459 bp, Homo sapiens
  misc_feature (1)...(459): n = a,t,c or g
nacaggtaaggcactgggatgtcgggcttccccagtcagagaagcaggcgcggggatgggacacgcagcttccgggtcaagcgctttttctttttcctcccggaaacaacggtgtcattctctagttccggatctaaggtgacccagttgcgaagtccagccttctcgtctgctcatggagccttcagggccatatttgtccattataatgcctctcattgcaaggtttgaccatgttgtaatccattcatccgcattcaagtttgcagttatggtggaaattttggcctgttgatctgcctgctgattaaatagtcagactatggaggattcaccaccagtctgggaagcaacagcctgggctccagagtcggccactcgtccgtgcacagacgaggagaggtctcagaattccnccncgctggtctagangtcgtcaaagacatcatgcggcgcctg

SEQ ID NO: 130863 - DNA, 1653 bp, Homo sapiens
atgagggctaagtggacatctgcattatcggagaaggcttttactttgagcctttgtaaggctaaaactcagaaatactggtcctcagggtacggtgcaggtatgattcaatcattttctgtaccacatgttgggtccaccagggtagctggcacagggtacctacagagttggacagtaggaccccagtcctgtcctcttgaaactgacctggagatgaccccagctgatggagaaccctggaaacctggaggatcctcctgctcattctctgtgcccctggacacatgggtggccaactctggagcccagcctgttactgcccactctggtggtgaatcctccatagtctggtatggagccactagaaaacactatgactttcattggggagagacagacagcatggcttctgaacaagataaacaagcggtgcaactggccctggatctatggtccatacaggatgggccaggagaactgcaagtaactgtcctagatcaacaggctaattggagccttagaaacaagatgggaagaggactacttaatcagcaggaagaacagcaggccaaaatttccaccataacggtaaacatgaatgcggatgaatggattacaacgtgttcaagccttgcaatgagaggcattataatgtatggtgctataattgatagcgattaccagggagagttaaaggtcattttatacactccagattcttttgctctaaaaccacaaatgtgggttgctcaattgttagtggtaccttgtcaacaacccctgaggaaatctctgccccaacagaggctacatacagaactgggggattcggatcccctggtacagggctgctgcagtttgctggggggtcacttcaggctctattcatctggtttactcctgtacctggagatgtcactcaaggaggttggagaacagcaaagaatggtgcctgctccttcctctgagatcactgatgtcaagaggcaccaacctgaatccaaactagcagaaagaaaggctaagtctgctggtccacagaaactgcaaccacctctcccgctaggggttcaggcccagggagatcacagttctgtccctgagcccctggctggagctgttggagttcttggagggaggccctgcccatcctttgactccaacggacttcgtcacccccacgacctggtgttgggtctgatcaccccaacacctcatgttacttccactcatggtagaaagcagaagggaagcaggtatgtgcaaaaagattatatagcaagagcaagggtgcagaactggacagaggatgagatggacgaagtgacagaagtaggcttcagaagatgtgtgacagcacactccgctgagctaaagaaacatgttctaacccaatgcaaagaagttaagaaccttgataaaaggttagaggaactgctaaatagagtaaccagtttaaagaggaacataaatgacctgatggagttgaaaaacacaacacaaaaacttcgtgaagcatacgaaagtatcaatagccaaattgaccaagcagaagaaaggatatcagagtttgaagaccaccttgccgaaatgaggcatgcagacaagtttacagaaaaaagaattaaaaggagcaaacaaagcctctga

SEQ ID NO: 130864 - DNA, 404 bp, Homo sapiens
agagctctgaatgtctcaccatggcctggatccctctcctgctccccctcctcattctctgcacagtctctgtggcctcctatgagctggcacagccatcctcagtgtcagtgtctccgggacagacagccaagatcacctgctcaggcgatgtcctggcaaaaaaaaaatatgctcggtggctccagcagaggccaggccaggcccctgtagtggtgatttataaagacattgagcggccctcagggatccctgagcgattctccggctccacgtcagggaccacagtcaccttgaccatcagcggggcccaggttgaggatgaggctgactattactgttactctgcgactgacaacaatctgggggtgttcggcggagggaccaagctgaccgtcctaggt

SEQ ID NO: 130865 - DNA, 438 bp, Homo sapiens
tgtgtgttgattttgtactctgcaactatgccaaaactatttgttagctcatagatgttttgtggattatatgctaaataatgttatctgcaaatagagtagttttacttctgcctttcaatttgaatgtcttttattttttttttcttgcctatttgctctggctagaacttttaatacagtgttgaattgcagtggtgtgaaagcactatcattgcctgttcatgatcttagggggggatctttcagtctttcactatggagtatgttacctatgagttttttgtatatgtgctttattatgtggaggaacaggcagcagtctttgctgtttggcagcctccactggtgataccgaggcaaacagggtctggagtggacctccagcaaactccagcagacctgcagcagaggggcctgactattagaaggaaaact

SEQ ID NO: 130866 - DNA, 507 bp, Homo sapiens
tttcgtgtggccgcgaagctagggccaccatggcggaccgcatgtcggcggctccggccggggacgttggccccggtgcgcgagggcgtgaactgcaggtccagctcttatcaaaggtgctggaagtgcttgatcctgaccggaagctggaggacacatgggcttattgtcaggacaccaggaaaggaatgaaggaacccacgaagcttttaaaaaaacattctacccaagtctacctgggaccttccaagaagacgtctgcgtcaaacgcaggccaatggctttatgaagaaaagccacataaaatggatttgctccatgaaaatggtcctcgtcctggtcttcatgaaaatgtatgcaaagcagttagtgacttctgcaagtgggttactacttttggaatttcggacatcgatgaagagttcatcttgaaacagtttgacattgactatgagaccaaaccaagccatgatgcgctccacacgatgaagctaaatcaggttcctc

SEQ ID NO: 130867 - DNA, 1131 bp, Homo sapiens
atgcaggttgagagtggagagagaggtggttctccaaggaaaaatccagatattcatgcgagggaaagtagacagtgggcagtcaaaaaccacagaaatcctttagaggcgcttcactcagtggggcatttggggacagggctcttatcaaaggtgctggaagtgcttgatcctgaccggaagctggaggacacatgggcttattgtcaggacaccaggaaaggaatgaaggaacccacgaagcttttaaaaaaacattctacccaagtctacctgggaccgcaaatagggtctggagtggacctccagcaaactccagcagacctgcagcagagggacctgactgttagaagaaaaactaacaaacagaaagcagtaacaccaacatcaacaaaaaggacacccacacaagaaacctcattcaaaggtcatcagcctcaacggtcaaacatagataaatccatgaagataaggaaaaaacagtgcaaaaaggctgaaaattccaaaaaccagaatgcctcttcttctccaaatgatcgcaactcctctccagcaagtgcacaaaactggacagagaatgaggttgacgaattgacagaagtaggcttcagaagaaataatgctaggggatcctttagagccaccgagcaggtcattcaagtctgtagtcttgttatctttgataataaagcaggggaagaaaccaggacggtgttagaagaaaactttgcacctaaagcagatttatttgaggttgtcgatgaactgggcaaattgcaggtggtcatcctggggcagcaggagggtctccagagccttgctcagaaattcaatgaactttccatagtggcaagagctgatgtgtgcatcattggcaactggcacaatggagatttgtcaatggacatgaactttccagagctacagcagcctggagtgccagccaggccaggtgcagtcattgtgcagtgtcgcacacaggatgtctggaagcactatggcacagtgcacactctttatcaccagggggatgagagctggcagctcattcttgcccagagagtggctgagggcacaagcccagagcacatcattgatggctgtgtggctgtgtgggtatcctggatgtag

SEQ ID NO: 130868 - DNA, 567 bp, Homo sapiens
atggtcagtaccgcccaggataaaagcaggcagaggaacgtggaagaaccagactggctgagttttccaggcttcatctttctcccgtgctggatgcttcctgcccttgaacattggactacaagttcttcagcttttggactcttggacttataccagtggtttgacagggactctcgggccattggccacagacagaaggctacactgtcggcttccctacttttgaggtttggggactcggactggcctccttgctcctcggcttgtagacggcctattgtggaacttcgccttcgtccaccagctacagcggcgatggaggcgatggaaatgcgcctatttggagttgagctgttctgctggatctgcactctctccagcacgcaggctcctactcccaccgaccgcccttctgtgcagctacatgtggccggacaagaatacagccaggctgcccgattccactgtacattcacggtcatcaacgtcaaatgggtccttaatgtcgcccggcaaacataccatgcttctgtggcctattccctttcccgttaccctacatga

SEQ ID NO: 130869 - DNA, 2253 bp, Homo sapiens
gaggtagtgaagggcagggagctggacctggaggcgccgccgcgacagcagcagccatggaggacgagatgcccaagactctatacgtcggtaacctttccagagatgtgacagaagctctaattctgcaactctttagccagattggaccttgtaaaaactgcaaaatgattatggatacagctggaaatgatccctattgttttgtggagtttcatgagcatcgtcatgcagctgcagcattagctgctatgaatggacggaagataatgggtaaggaagtcaaagtgaattgggcaacaacccctagcagtcaaaagaaagatacaagcaatcatttccatgtctttgttggtgatctcagcccacaaattacaactgaagatataaaagctgcttttgcaccatttggaagaatatcagatgcccgagtggtaaaagacatggcaacaggaaagtctaagggatatggctttgtctcctttttcaacaaatgggatgctgaaaacgccattcaacagatgggtggccagtggcttggtggaagacaaatcagaactaactgggcaacccgaaagcctcccgctccaaagagtacatatgagtcaaataccaaacagctatcatatgatgaggttgtaaatcagtctagtccaagcaactgtactgtatactgtggaggtgttacttctgggctaacagaacaactaatgcgtcagactttttcaccatttgggacaaataatgggaaattcgagtctttccagataaagggtatttcatttgttcggttcaattccccatggaaagtggcaggcacatggcaattgtttctgttaatggtactaccattgaaggtcatgttgtgaaatgctattggggcaaagaaactctttgatatgataaatcccgtggcaacagcagaatcaaattggatatccccaaccttatggccagtggggccagttggtatggaaatgcacaacaaattggccagtatatgcctaatggttggcaagttcctggcatatgggatgtatggccaggcatgggaaccagccaaggatttaattcagacacagtgtttctggcaccatgggatggggacccaaattttgggagttgcaaccggcttcaagggcaaaatgggcagcctgttgcccaatccggccttctgggtatcgagtggcagggtatgaaacccagtgaataaggactccagaatctaaagccagtggcttgaggctacagggagtgtagtaaagccgttgtttacttaaagatttatcaaatcagtcagtgcaaatgtcagatacaatgtattcatttaaaagattcatttttaatcatgaaattacttatcatccacattgttttaaaaagaaacaagatgctggatgtctgccaatttttgccttcattaccttttttgataaagtttctcagatccttgtttcaaacacaaatgcagggattgctgccactttttaactattaagaggcagaaaattgcacaatattgaacttttttccactgaagtagtgtgcagttctagtttgcattcctgatatgatttaaaacatgtaatataaagatgttaaaaaaaaaaaccaaaactgtgcagagtctagaagttgtttgtcatcttcagcttgtgcacaattctgttttaggttaaaaaaaggcattgtttgagctgtcccatctccactgttatccctttgggttttttaatataaattattagtttacatcatttttgtatctacatcttttttcacaaatttgtcttgccttattaaagttctgtaaaatatacttaaatggaaaaaatgatgttcatttagattgaaaacttttctcagatggattgataattgcattcatcttgtgttttatatgagaaggtgcctcaagaatttcctgttggatttgtttaaaaggatttttatctttcgtgataaactttgctgtgtaccaggaactataaaaacaaaaacttgttactaaagaaaatatctgaaatgtgataagttcttatgccatgttaatttcatgtgtcaacttcaacatttacatgtattatttcattatgtaaaatgttttagcaatttaatattttgcacagttagcaaactttgtatgtcatttccttcaaggcatcatgcagagttgacatgagatttataaggttttaagttgtttgcatgtgaaaatcaaatacatactttggtagtctttgaaaaaaaaaa

SEQ ID NO: 130870 - DNA, 1565 bp, Homo sapiens
agcgcctaagttcaggtagacgatctcgtctgagcaaggaccggggcggcggtggggcagttttgtttagctcgggttcccagcggaaagcatgtcctaggtagcggctgccggcagaggtgatgcttctgcctgggcctacttgggaccggaagtgagcgctcgcgcggtgaggatgccgggaagcaagtcccaggggatatgtgtgtgtcgctgcagacccatcccggaagccggccgggagactatcaagatctccacttagggaagtgggaatcttatttgcggaacattgggcagaagctttgccattggctggtggagaaggaggaggcagaatgtctgcattgctacaccatacagctcatacttcagaagattttgggttaagcagctatcattagtctgccaatgatcgtgttttcaccttgatattagaaactaatgaaacaccttttaagtcttatgaattcaggttacactgttttccagatgccttggcagctggtacagggcctctgaaaaatggaaccaaattctctgaggactaaagtcccagctttcttatctgatttggggaaggccacattgaggggaatcagaaagtgtccccgatgtggcacatacaatggaacccggtgactgagctgtatgaacatgacatgtggaaccatattccgttacggtgcacgcaagcagcctattgttgaagctgtcaaaaatcattacagggctctggatcttcaggtctactcagtgcggcaaagagaccggggccctgattaccgatgctttgtggaacctcggggtttccagagacaacaatccagacagtggatggggacgcatcatcactcagctgagctctggacggtgttatgtccccctcatgcctgaaagctgccactcaaggcgttgtggaaaaccagtgccagcacatcaagctggcggtgaaactgccaggcagaggccacccctctgaccctgaagagctcggtcctgaatgcaatgcaggcctccccggaaaccaaacagaccatctggcagttggccacggacacccacaggtcctctggtgcagagaattactaaaaacatcttggtggtgaaatgcaaggcaagccagaagcacagtttggggtatttgcatacatcttttgtgcagaaagtcagtggcaaaagcttgcctgagcgccgcttcttctgctcctgtcagactctgaaatcgcacaagtcaaatgcctccaaggatgagacagcccagagatgcattcatttctttgcttgcatctgtgcctttgccagtgatgagacactggcttcaggaattctcagacttcctaaattttgattccagcggtcttaaagagattattgtaccccagttaggttgccattcaggaatcaacagtatctgcttgtgagtctactgcctcttaagtcaaagaagagggaggaaagggatggaagtatctgaacaactaatgcgtcagactttttcaccatttggacaaataatggaaattcgagtctttccagataaaggatattcatttgttcggtag

SEQ ID NO: 130871 - DNA, 401 bp, Homo sapiens
  misc_feature (1)...(401): n = a,t,c or g
gttcacgcatgattctgcatttaggtagtcctcaaatttactatcaatgtaatcgataacaggctgccagctgtacagtctttttaattctgtgagaaggacctggatactctggagaatacaaatctatgaggaataatgagttgattaatgtcgactttcccaatccacatttcgcccaagctcaggggggacgacgtgcgcggccgcnggcttgantggcgctggccattgaggggcttctgcgccaccgtgcgatggtgcccgccaggtgctgccggttggtgcgcatngcctgttcgcgcagagtctgcctttntgcgcccggccaagtcgtaaatctcctcctcgtagcttacaggcgacnggcggccagccgaagcctctggacacagaagcgc

SEQ ID NO: 130872 - DNA, 463 bp, Homo sapiens
tttcaatattcaattattatttatattaatatgatgtcatgaattcctttcttcactgggttataattctgtgactgtcaccattttattctgatgttcaaatcgccccatatttggcctgttggaatcttttcaagttggcttctctgctttttttgggcatgtctccatcattctttgagcattgccttactttcttgtacaaaaagatattctgggctcatcttatactttctgtgctctagctttgaaattaccgtttcttcaaagagctctgtttccttttagaggaggatggtttttagaaaccaagttctaggtagcaggtgtgcttgttgctgttgaggtgttgcagctcccaggccctttccgtgaacagagccaggctcagatgaggcgagtgggcggccggggctgcagctggcgttggccattgaggagcttctgcgcgacagtgcgatcg

SEQ ID NO: 130873 - DNA, 1107 bp, Homo sapiens
atgggcccacattggctgtggctccacctggccttggtgctcttgccgccctctgctctgctgctcccttcatgtgagaagggtgtgttaagagtccgtttttatcatgaaaaatggatctatgtccataaagaaagcacaaaagaaaggcatggctattgcaccttgggagaagcctttaatcggttagacttctcaagtgcaattcaagatatccgaaggttcaattatgtggtcaaaccccttctaccccgctacaagtttcaaagacttaatgctattacaaaggaccgtcagaggtcaagctcaggggtgcaactccctcatgccgggcagcctcagggggccgaccctacccaggatgagcggcgccaggtagccggggacactcccggggatccccgggccctggctgggggaggcgttgtggaccgcacgtacccaggctcatatgaggcgagtgggcggccggggctgcagctggcgttggccattgaggatcttctgcgcgacagtgcgatcggttgcaccttctgcgacaggtgccggccggttggcgcgcaacgcctgctagcgcatagtctggcccttgctgcgcccggcgccgaaaaacgggaagtcgtaaagctcctcctcgtggcttatgtgcggcggcggccgggcaaaaacctaacgacacagaactgccagctcagcagccggttacatcccgcccggccaccagtaggcagcgtccgctcatgcgcgctcctggaagaaccagcagcccccaccgcgagttctgattggctctgcatgatgattattccccaccttctaagagacaaagaccaacgagccaccacagccaccagtcccagaacccgccaatgctggggaacggaaaatgagggagttcaactctggccctcacaatccagtggaggagacgaaactcatctgcctctgtccctctgggcacgcctcatgccaggtgcatctgtggacaggggccatgctcctgggcttccaaagttggagaaagctgccaggctcaggtggccaggtgcatatcttggtgtgaggaccttcgctgtatctgggaatgcctactggttaccttggtaa

SEQ ID NO: 130874 - DNA, 498 bp, Homo sapiens
gaggagaggagcatcaacagcagcaccatggtagctcaacagaagaaccttgaaggctatgtgggatttgccaatctcccaaatcaagtatacagaaaatcggtgaagagaggttttgaattcacgcttatggtagtgggtgaatctggattgggaaagtcgacattaatcaactcattattcctcacagatttgtattctccagagtatccaggtccttctcatagaattaaaaagactgtacaggtggaacaatccaaagttttaatcaaagaaggtggtgttcagttgctgctcacaatagttgataccccaggatttggagatgcagtggataatagtaattgctggcagcctgttatcgactacattgatagtaaatttgaggactacctaaatgcagaatcacgagtgaacagacgtcagatgcctgattaacagggtgcagtgttgtttatacttcattgctccttcaggacatggactttaaaccattgg

SEQ ID NO: 130875 - DNA, 793 bp, Homo sapiens
caggagaccgccactcacgcggagccaatcggaactcgcggcggggttgctgggtcttccaggatcgcgcattagcggacgctggctacgggtggccgggcgggatgtaaccggctgctgagctggcagttctgtgtccccaggcttcggcccggccgccgccgcacataaactgcgaggaggagctttacgacttcccggtcttcggggccgggcgcagcaagggccagactctgcgctagcaggcgctgcgcgccaaccggccggcccctgtcgcagaaggtgcaaccgatcgcactgtcgcgcagaagctcctcaatggccagcgccagctgcagccccggctgcccactcgcctcacctgagcctgggtggaacaatccaaagttttaatcaaagaaggtggtattcagttgctgcttacaatagttgataccccaggatttggagatgcagtggataatagtaattgctggcagcctggtatcaattacattgatagtaaatttgaggactacctaaatgcagaatcgcaagtgaacagatgtcagatgcctggtaacagggtgcactgttgtttatacttcattgctccttcaggacatggaccgttacataactgaagactcccaccttcaggcaggattgggtagtacatgtttgtaacaacctggcattgccttttgttgagacttaaaccattggatattgagtttacaaagcatttgcatgaaaaagtgaatatcatcccacttattgccaaagcagacacactcatgccagaggaatgcca

SEQ ID NO: 130876 - DNA, 804 bp, Homo sapiens
gtggccgggcgggatgtaatcggctgctgagctggcagttctgtgtcgctaggcttctgcccggccgccgccgcacataagctgcgaggaggagctttacgacttcccggtcttcggggccgggcgcagcaagggccagactctgcgctagcaggcgctgcgcgccaaccggccggcacctgtcgcagaaggtgcaaccgatcgcactgtcgcgcagaagctcctcaatggccagcgccagctgcagccccggccgcccactcgcctcatctgagcctgggcgaatctggattgggaaagttgatattaatcaactcattattcctcacagatttgtattctccagagtatccaggtccttctcagagaattaaaaagcctgtacaggtctacatattggtatttttaattgatgataagctggaataatattaatacacacaaagcacgtgttgtaactttcattatgcttccctagagctggcagcctgctatcaattatattgatagtaaatttgaggactacctaaatgcagaatcgcgagtgaacagatgtcagatgcctggtaacagggtgcagtgttgtttatacttcattgctccttcaggacatgggtggcagacaagaaacatggattattgcgtggagttccattagtaggaataagactcattctacattcttgttgttcttagtgttttttgtttttcatgagaaggaattgtatcagcacaaggcaatattctaacatgacaatgacagcagacagaacctcaataaactctgacttggtactgcaaaaa

SEQ ID NO: 130877 - DNA, 746 bp, Homo sapiens
ccggaattcccgtgtcgacgatttcgtggatgtaacccgctgctgagctggcagctctgtgtcgctaggcttcggcccggccgccgccgcacataagctgcgaggaggagctttacgacttcccggtcttcggggccgggcgcagcaagggccagactctgcgctagcaggcgctgcgcgccaaccggccggcacctgtcgcagaaggtgcaaccgatcgcactgtcgcgccgaagctcctcaatggccagcgccagctgcagccccggccgcccactcgcctcacctgagcctgggagcttgaaaaatcacatttgagaagaggattggatcctagccataacataaatataagggtggaaccaaagttttaatcaaagtatggtggtgttcagttgctgcttacgatagttgataccccacgatttggagatgcagtggataacagtaattgctggcagcctgttatcaattacattgatattaaatttgaggactacctaaatgcagaatcgcgagtgaacagatgtcagatgcctggtaacagggtgcagtgatgattatacttcattgctccttcaggacatggaccattacataactgaagactcccaccttcaggcaggattgggtagtacgtgtttgtaactacctggcattgccttttgttgaggaagggtagatgtctacccaaatggaatattgagtatcagagacttcaaatgataacttttgtttgtttggag

SEQ ID NO: 130878 - DNA, 732 bp, Homo sapiens
tcatggcggggctgctgggtcttccaggagcgcgcatgagcggacgctgcctatgggttgccgggcgagatgtaaccggctgctgagctggcagttctgtgtcgctaggctactcgcccggccgccgccacacataagctgcgatgaggagctttacgacttcccggtcttcggggccgggcgcacgaagggccagactctgcgctagcaggcgctgcgcgccaaccaggccggcacctgtcgcagaaggtgcaaccgatcgcactgtcgcgcagaagctcctcaatggccagcgccagctgcagccccggccgcccactcgcctcatctgagcctggctggcagcctgctatcaattacattgatagtaaatttgaggactacctaaatgcagaatcgcgagtgaacagatgtcagatgcctggtaacagggtgcagtgttgtttatacttcattgctccttcaggacatggactcccaccttcaggcaggattgggtagtacatgtttgtaactacctggcgattgccttttgttgaggtggcgagacaagaaacatggattattgcgtggagttccattagtaggaataagactcattctacattcttgttgttcttagtgttttttgttttttcatgagaaggaattgtatcagcacaaggcaatattctaacatgacaatgacagcagacagaacctcaataaactctgacttggtactgcaaaaaa

SEQ ID NO: 130879 - DNA, 595 bp, Homo sapiens
gatcgaccaagaataacgggcggtgggaaatctggaacagagtatcctgagaatctgcccaccttgaaggctacaattgaaaataaaaattctgttctgaatacagccaccaaaatgaaggatgtacaaacatccacaccagcagaacaagacttagaaatggccatcagagggagagcaaaagaggcttgaagaatatgaaaataaccagccacaggtgaaaaacccaaatacattctagggatgaccttgatgacataattcagtcatctcaaacagtctcagaggacggtgacatcgctttgctgtaattgtaagaatgtcatattactcattgatcaacatgaaatgaagtgtaaagattgtgttcacctattgaaaattaaaaatacattttgtttatggaaaagattaataaaacttaaagataaccactgtgagcaacttagagtaaaaattcgaaaactgaaaaataaggctagtgtactacaaaagagaatatctgaaaaagaagaaataaaatcgcagttaaagcatgaaatacttgaattggaaaaagaactctgtagtttgagatttgccatacagcaagaaa

SEQ ID NO: 130880 - DNA, 831 bp, Homo sapiens
atggaacaggtgaaaaaccaaatacattctagggatgaccttgatgacataattcagtcatctcaaacagtctcagaggacggtgactcgctttgctgtaattgtaagaatgtcatattactcattgatcaacatgaaatgaagtgtaaagtgtcttctcagaaacaaccagctgagaaggctacaagtgacgagaaagattctgtttcaaatatagccacagaaataaaggagggacaacaatctgggacagtgtcttctcagaaacaaccagcctcaaagactgcaagtgacaagacagattctgctttgaatacagctacagaaataaaggatggactacaatgtgggacagtgtcttctcagaaacaacaagccttgaaggctacaactgacgaggaaggttctgtttctaatatagccacagaaataaaggatggagaaaaatctgggacagtgtcttctcagaaaaaaccagccttgaaggccacaagtgatgagaaagattctttttcgaatataaccagagaaaaaaaggatggagaaatatctaggacagtgtcttctcagaaaccaccagccttgaaggctacaagtgtcaaggaagattctgttttgaatatagccagagaaaaaaaggatggagaaaaatctaggacagtgtcttctcataaacaaccatccttgaaggctacaagtgacaaggaagattctgttccgaatatggccacagaaacaaaggatgaacaaatatctgggacaggtaattttgcaaacacatttaatatgatgttcgttcaagatagaagagatcttctcttcaccaaataa

SEQ ID NO: 130881 - DNA, 543 bp, Homo sapiens
atgctgaaaaacccaaaagtccagcatgcctcttctcctccaaatgatcgaaatgtctctctatcaagggcacagagctggacagaggatctgatgaacgaattgacagaaataggtttcagaagatgggtaataaaaaactacaatgagctaaaggagcatgttctaacccaaggcaaagaagctaagaaacttgataaaagagcacctggggaaagcagcggctgtgggcacagcttcagcagacttaaacgtccttgcctggcagctctgaagagagcagcagacctcccaacacagcgttcaagctctgataagggggctgacagacacctcatacaggagagctctggctggcatctggcgggtgcctctctgggacgaagtttccagaggaaggaactggcagcaatttttgctgttctgcagcttccgtggttgatacccgggcaaacatggtctggagtggaccgccagcaaactccagcagacctgcagcagagggccctgactgttagaaggaaaactaacagaaaggaatag

SEQ ID NO: 130882 - DNA, 532 bp, Homo sapiens
gctgagctcctgctctatagagcaaagatcacccatcaaggcatccagatccacagtctctccctgattcagagcttcattcaagttgtatatggagaagcggtaagaaaagttggccatgtttgtttcctggcgaagaggagatctttttactggttccatgggcttgtcagaatccaaactctgagtgagtttgtctagttctccaagccaggctccaaacattttgtccaggtcctgatcttccttgtcactgtcttcttcagcaccatgatcaatttcttcatctgatagctgctccatcgcggcagtcggtcggccttcccgcggccccgggcaaggaaaccgccgctcgcgctcctccagccgctgcctccgcctcctccccaggcgcggcgctccctcgccagagacgcagcgactgccagcagctcccgcgccgcgcgctcagtgactgactgactgactgactgactgactgactgactgactgactggcgggcggctgcgggagcgggggcggggcggccgc

SEQ ID NO: 130883 - DNA, 1357 bp, Homo sapiens
caagcagtcctttctgaacatctgcaaggaggcaacatcaaaccacaagcacttccaggaagacacagtccatggcagggtacaggaaggctctggggatgatgataatcagagcagcatacaagaacattgtagttactctttcattagtggacattttagaggcttgcccttcactgtccttggttggaaaatccattccttaaaggtagcacagtcagatggtcaggctggttcaaggacggcaaactgcctgcctaccggctgctgccttgaggactcagctgctcctatgggactgaacacctgggaagcgtcaaaacagactgctttccgctggaaattagaaggactagcagcgagtcctgtgctagggaacagagaacatgtttgggaaagggttagaacatgccccagaaataacacaaggctgaacaggctccagagcagagatgctgctgcccacatgagcatctgcaagttgggtgcatttgacagcttggatggtgtgattctcccagtggctaatgagcagctcaggaatgctaatgaaggacttcctttggttgtctcctgtgagtcagcaaatgagctctgtaacttggagagccagaagttaattagtgccctggaagaacaggcagcaaaattgaaagctgagaagatcagagttgccctagagaaaattaaagaggcacaagtgaaaaagctggtgatcagagtccacatgtctgatgacagttctaaaacaatgatggtggatgagaggcagacagtaagacaagtactggataacctgatggacaaatcccactgcggttatagtttagactggtcactggtagaaaccgtttctgaattacaaatggaatgtgatgttccttgcaccttttcccagcagaatatgacagggatgttccttcagttgggcctttgccaggcagggtatgataaggacgttcctgtgccttgtggtcagatggttagacatgctgtttctcaggccccaaacaccattgggatgtttcacttttgccaaggtcatcctgtacagttctacagcatgaataggcctgcctctcgccatactcccccaacaatagggggctcgttgccctatagacgccctccttccattacttcacaaacaagccttcagaatcagatgaatggaggacctttttatagccagaatccaggcctatttcagacttctgacctccagaattgtaagataataaatgagtggtttttgaacaacagaaatctatttctcacagttctggggtctggaaagtccacgatcaaggtgctggcagagttggtgtctgatgagggcctatttcttgattcatag

SEQ ID NO: 130884 - DNA, 1186 bp, Homo sapiens
atgaacataaccgaacaatattctggagatgtagcaatggagaggtgctgttcactctctgtttacgatgcggttgtcgtggagtgtcttcagtataaaggacttcaccagtgtcttctgcactgcccccatcccgtagggtccaaaagaccagctgcattcctgctgaccgccactaactctgttttctgcatagttgtcttccctgcttctgtagtgagtttggattctgacaagcccatggaaccagtaaaaagatctcctcttcgccaggaaacaaacatggccaacttttcttaccgcttctccatatacaacttgaatgaagctctgaatcagggagagactgtggatctggatgccttgatggctgatctttgctctatagagcaggagctcagcagcattggttcaggaaacagtaagcgtcaaatcacagaaacgaaagctactcagaaattgcctgttagccgacatacattgaaacatggcaccttgaaaggattatcttcttcatctaataggatagctaaaccttcccatgccagctactccttggacgacgtcactgcacagttagaacaggcctctttgagtatggatgaggctgctcagcaatctgtactagaagatactaaacccttagtaactaatcagcacagaagaaccgcagtcagcaggcacagtgagtgatgctgaagtacactctattagtaattcctcccattccagcatcacttccgcagcctccagcatggactctttggatattgataaagtaacacgccctcaagagctggatttgacacatcaagggcagccaattactgaggtctctcgggatctggtgtgctttctccagctggatcatgtcaacgtttattatggccaggactatcggaacaaatacaaagcacctacagactattgtctggtgctgaaggaagaacaggcagcaaaattgagagctgagaagatcagagttgccctagagaaaattaaagaggcacaagtgaaaaagctggtgatcagagtccacatgtctgatgacagttctaaaacaatgatggtggatgagaggcagacagtaagacaagtactggataacctgatggacaaatcccactgcggttatagtttagactggtcactggtagaaaccgtttctgaattacaaatgggttag

SEQ ID NO: 130885 - DNA, 2382 bp, Homo sapiens
gccaagcacctgtgcagaatggagctacgccgccgcagtcggcagtggaaggcgctcagaaggtgaagccacagggtatctcgggatgcagcttgtggggccgctcctgctgctgctcgcctggctggaggccagcggaacgggcgagccatttcagggaggccaggcctcagctcgtaaggtgctgggggagggaatgtctttaaggtgtgtttgttgctaaataaaaacagaacaggaggtggtagagggcatggatatctctactcgctccaaaggtgagtaaaaatctcaggagacaaagctttcgagctttcaagatgtcaggttgacatttgtgtccgagggtaatgatcctgctgaaagatgctcctacatcaatgggaagtgccatctcgatgccaggtgtgtttgcgtggcagatccatcaaagcctcagggcctttgcccataccttgaaggtcccctccttgccttcctctccttactccccatcaattttaaggctcaaaatgaggatgagttctgccttttgtttttgctcatcctgttttactaccaccttgcctgctgctggtgagcgtataatattgtcacctcggccagcagaacaactgcagttcctcgtatttattcacaatcccacgaaatcaatggctcttcggtgcactgcaccggagactttcagctcagccgagctgctgttgagggtgataaattataggctgtcgacatcattaaggaaattaaacacccacaaaaacacaagaagctcccggcctttcagctgcggccctttcccttgagggaggagacaattccctgtaatggtgtgtcatttcctaggtgtgagccaccgtgcctggctgaagtgtacatgtgtttaaatgagatgctgaaagatgaaaagaaggggtgcatgaacaagagtggggctggtgagaatccacaagagagaacagcccagaaaagaaagttccccagccctccacattcttccaatggccactcgccgcaggacacatcaacaagccccattaaaaagaaaaagaaacctggcttactgaacagtaacaataaggagcaggtaaagcagccgctagaatgcatcgagacccagagtaaagccatgacaatgctcaccattgaacagttatcctacctgctcaagtttgccattcagaaaatgaaacagccaggggtaagaagaaagttgaagcccgttccattggaacagcaccctgactatgcggaatacatcttccatccaatggacctttgtacattggaaaaggttggcctccgtcaaatgtatggctgcacagaagccttcctggctgatgcaaagtggattttgcacaactgcatcatttataatgggggtgagtggcttagaacgcaaatagcgaaagtagtcatcaaaatctgtgaacatgaggtatgtgtttcccaagtatgtccagaatgttatctagctgcttgccaaaaacgagataactggttttgtgagccttgtgtaagttggatttatgactgctgcgtgccagcctgtgtagtggaagctggtgattcaaatgtttctgcccatgtgaaggctgacatcctagcggggaagaaggatgatacacaagtgaactaataggctggctgtagtctctcagctgtgactgctctgcagggacctccatctctcacccgtcagacagcgactgaaggtggcttacagagcatgaaggacggcgtgtgagttggccagctaaataattgctacctcatgtctaaagaaattcctttttctgtgaaaaagactaagagcatcttcaacagtgccatgcaagagatggaggtttacgtggagaacatccgcaggaagtttggggtttttaattactctccatttaggacaccctacacacccaacagccagtatcaaatgctgctcgatcccaccaaccccagcgccggcactgccaagatagacaagcaggagaaggtcaagctcaactttgacatgacggcatcccccaagatcctgatgagcaagcctgtgctgagtgggggcacaggccgccggatttccttgtcggatatgccgcgctcccccatgagcacaaactcttctgtgcacacgggctccgacgtggagcaggatgctgagaagaaggccacgtcgagccacttcagtgcgagcgaggagtccatggacttcctggataagagcacaggtcagctccgtgcgggggagcggggaggaggccccttggacacgggggtttcccatgggtgcacacttggtgggcccaagcaggtgagcatcaagcagcaagcatcagttcttcaggataccatgaatgtccccaagagttaaaataatgaggattt

SEQ ID NO: 130886 - DNA, 190 bp, Homo sapiens
ccccagcaccttacgagctgaggcctggcctccctgaaatggctcgcccgttccgctggcctccagccaggcgagcagcagcaggagcggccccacaagctgcatcccgagataccctgtggcttcaccttctgagcgccttccactgccgactgcggcggcgtagctccattctgcacaggtgcttggc

SEQ ID NO: 130887 - DNA, 498 bp, Homo sapiens
cccacgcgtccggaactaggagcctgtcctccatgttttataagtattgacattacacagtgttaacaatgcatccacagagcttggctgaagaggaaataaaaacagaacaggaggtggtagagggcatggatatctctactcgctccaaagatcctggctctgcagagagaacagcccagaaaagaaagttccccagccctccacattcttccaatggccactcgccgcaggacacatcaacaagccccattaaaaagaaaaagaaacctggcttactgaacagtaacaataaggagcaggatggacggaatgatttctactgctgggtttgtcaccgggaaggccaagtcctttgctgtgagctctgtccccgggtttatcacgctaagtgtctgagactgacatcggaaccagagggggactggttttgtcctgaatgtgagaaaattacagtagcagaatgcatcgagacccagagtaaagccatgacaatgc

SEQ ID NO: 130888 - DNA, 534 bp, Homo sapiens
atgtttcaatgtcccgtgtccctgaagaagccattttcatgtgactttcctgcttcagaccaggcccagttcactgagttaaaaaccaaaatgctcatcgtggcctacaagttcctccgtgacctggcctgtagccagttttctgcccagatagcagataatggtggctctggagccaagcacctgtgcagaatggagctacgccgccgcagtcggcagtggaaggcgctcagaagcttggctgaagaggaaataaaaacagaacaggaggtggtagagggcatggatatctctactcgctccaaagcctgcgatgccttcggcttcctgcctgttaaccctctctcggactcggggcctggctgggaaaaactaggccttgagatcgcagcgaaggcctgtggaaaaataccagctgcagctctcccggcagatgcagaaagagagagagagagccgctgtctctcagcctttgcttcccagggaggcgtgtaccttgtgaatccagggcacaggcagtgcctctcgggctga

SEQ ID NO: 130889 - DNA, 535 bp, Homo sapiens
  misc_feature (1)...(535): n = a,t,c or g
taatcttcaatctggcnttttcttcaatcctccgaatctatcttcttcatctggttccattcacatcctcttccgtaggttcataaattgcattaataatttcaaatcgnttatcaaatagagctgntagagaacagcatacttcctttcaagatcgtnacttcctcatagaatttggcttctatctgtgcacatntaacttgcaggtttttgagagnattcactcggtcttttaactaccctagnacggctttcaatgatcctgttggtgtttctaccagnccatcaagtctttcttgaacggntgcaagaatctgagattttgcatcatctgaacacgttagctgacgtgctttgacgtttngtttcttcaccacgtttcctcttcttctacttcttcaacatcatccaaatcttgatcaagttcagactgttctttgcggcgactagtatggggacncaggcggccggagtgcgcaggcagtgactcagggcggcagcggcagcagcagcgggaggagcanggagngcgccg

SEQ ID NO: 130890 - DNA, 467 bp, Homo sapiens
  misc_feature (1)...(467): n = a,t,c or g
gcgccgcctcctgctcctcccgctgctgctgccgctgccgccctgagtcactgcctgcgcantccggccgcctggctccccatactagtcgccgcacgtcagctaactgttcagatgatgcaaaatcctcagattcttgcagcccttcaagaaagacttgatggtctggtagaaacaccaacaggatacattgaaagcctgcctagggtagttaaaagacgagtgaatgctctcaaaaacctgcaagttaaatgtgcacagatagaagccaaattctatgnaggaagttcatgatcttnaaaggaagtatgctgttctctatcagcctctatttgataagcgatttgaaattattaatgcaatttatgaacctacggaagaagaatgtgaatggaaaccagatgaagaagatgagatttcggaggaattgaaagaaaaggccaagattgaagatgagaaaaaggatg

SEQ ID NO: 130891 - DNA, 837 bp, Homo sapiens
atgaaggtctgtgacaaggagaagggcgcaggcctgcctagggtagttaaaagacgagtgaatgctctcaaaaacctgcaagttaaatgtgcacagatagaagccaaattctatgaggaagttcacgatcttgaaaggaagtatgctgttatctatcagcctctatttgataagcgatttgaaattattaatgcaatttatgaacctacggaagaagaatgtgaatggaaaccagatgaagaagatgagatttcggttagtaccaactttattttgctgctgaaagataccatgtcttcagtgccagaggatcaacaaagaaaaacaacttggcctcacatgataatgaccccaagtggttggtcaagaaaaagaagtggcaatgttagccaagttgtgaatgcaaaggaaatgttcttgaagaaaattaaaagtgctattccagagaatgcacaaatgataagaaagggaaacagccttctagttggtatggagaaagaacaaaccagccacaatagtcccttaaaccaaagcctaatccagagcaaagccctaactctcttcctttccatgaaggctgagagaggtgaggaagatgcagaagaaaagtgtgaagccagcagagattggttcatgaggtttaaggaaagaggccatctttataacatcaaagtacaagatgagacagcaagtactgatttagaagctacagcaagttatcctgaagttctagctaagataatttgtgaagacagctacactaaacaacaggtttttaatgtagacaaaacagccttatattggaaaaagatgccatctaggacttccatagcttga

SEQ ID NO: 130892 - DNA, 1647 bp, Homo sapiens
atctgctcgcggcgccgcctcctgctcctcccgctgctgctgccgctgccgccctgagtcactgcctgcgcagctccgggccgcctggctccccatactagtcgccgatatttggagttcttacaacatggcagacattgacaacaaagaacagtctgaacttgatcaagatttggatgatgttgaagaagtagaagaagaggaaactggtgaagaaacaaaactcaaagcacggtcagcgtaactgttcagaatgatgccaaaatcctcagattcttgcaagcccttcaacgaaagacttgatgggtctgggtagaaacaccaacaaggatacattgaaagcctgcctagctagggtagttaaaagacggagtgaatgctctcaaaaacctgcaagttaaatgtgcacagaaagaaacccaacttctatgagggaagttcacgatcttgaaaggaagtatgctgttctctatcagcctctatttgattaagcggttttgaaattattaatgcaatttatgaacctacggaaggaaggaatgtgaatgggaaaccagatgaaggaaggatgaggatttcggagggaattggaaagaaaagggccagattgaagatgagaaaaaggatgaaggaaaaagaagaccccaaagggaattccctgaattttggttaactgtttttaagaatgttgacttgctcagtgatatggttcaggaacacgatgaacctattctgaagcacttgaaagatattaaagtgaagttctcagatgctggccagcctatgagttttgtcttagaatttcactttgaacccaatgaatattttacaaatgaagtgctgacaaagacatacaggatgaggtccgaaccagaaccagatgattctgatcacttttcctttgatggacaagaaattatgggttgtacagggtgccagatagattggaaaaaaggaaagaatgtcactttgaaaactattaagaagaagcagaaacacaagggacgtgggacagttcgtactgtgactaaaacagtttccaatgactctttctttaacttttttgcccctcctgaagttcctgagagtggagatctggatgatgatgctgaagctatccttgctgcagacttcgaaattggtcactttttacgtgagcgtataatcccaagatcagtgttatattttactggagaagctattgaagatgatgatgatgattatgatgaagaaggtgaagaagcggatgaggaaggggaagaagaaggagatgaggaaaatgatccagactatgacccaaagaaggatcaaaacccagcagagtgcaagcagcagtgaagcaggatgtatgtggccttgaggataacctgcactggtctaccttctgcttccctggaaaggatgaatttacatcatttgacaagcctattttcaagttatttgttgtttgtttgcttgtttttgtttttgcagctaaaataaaaatttcaaatacaattttagttcttacaagataatgtcttaattttgtaccaattcaggtagaagtagaggcctaccttgaattaagggttatactcagtttttaacacattgttgaagaaaaggtaccagctttggaacgagatgctatactaataagcaagt

SEQ ID NO: 130893 - DNA, 476 bp, Homo sapiens
  misc_feature (1)...(476): n = a,t,c or g
tggcgccnnnaattgaannatcgaatgccggtacgcacggagccaccggtccggaattcccnnnccacgatttcgtggagacggagatcgagcgctgccgcttcgagtgccagtgggagcggatccctgagctcgtcaagcagctgtcggccaagctcatcgccaacgatgacatggcagagcttctcctcggggagtcgaagctggagcagtacctgaaggaacaccccctgaggcagggggccagtccccgaggccccaagccccagctgactgaggtccgcaagcatctgaccgccgccctggaccgagggaaccttaagtcagaattcctacaagaatccaatctgatcatggccaagttgaattatgtggaaggtgattataaagaagctctgaacatttacgcccgggtgggcctggacgatctgccactgacagctgtcccgccctacaggctgcgggtgatcgcagac

SEQ ID NO: 130894 - DNA, 1365 bp, Homo sapiens
atgaaggtgaagttgcccgcactgggcacccctctgccctcacaggtgggcacccctccgccctcacaggttccccgtgagcatcgccgcagcgaccgcccacagcaccagctgctgatggctcacacctcctggggctgcaaggcctgtccctggctctggcagcgagatgacagggctgttgccccggcaggggttgctgtggcagctgccagagtggcccgggccatggatgagggccaggatatggaaagcagaggcagaaatgagcccagaggccacagggcccagctctcaggctcccacggcgtgagccacagagcctggcatgctggcactgttctctgtgccctacctgtatttcctcatttcctcctcaacgagctccagggggaggtatcacagccaagaaatggaggcctggggatgttaaatgccatggcccaggcagcatccgtcctcatgaagccaccttatcagccggggctcccgttacgccgcggagccgggagccggagcccgagcccgcggcggcggcgggaggcggcgagggggcgccgcggcggcggcggtggggcctgcggggcgggcggccgggcccggccaggccgcgatggcgaccaagaaggcaggctcgcggctggagacggagatcgagcgtgccgctccgagtgccagtgggagcggatccctgagctcgtcaagcagctgtcggccaagctcatcgccaacggcacgggcacaggcaccctagacttccctgctaaaggctccctgaacccccatcgctgtctaaggactggcccagccccctgcaaacccttccctagcaaaccctcagtccatccggctgctccacgaccagctgtgtgccacactctgcctgatgacatggcagagcttctcctcggggagtcgaagctggagcagtacctgaaggaacaccccctgaggcagggggccagtccccgaggccccaagccccagctgactgaggtccgcaagcatctgaccgccgccctggaccgagggaaccttaagtcagaattcctacaagaatccaatctgatcatggccaagttgaattatgtggaaggtgattataaagaagctctgaacatttacgcccgggtgggcctggacgatctgccactgacagctgtcccgccctacaggctgcgggtgatcgcagaagcctacgctaccaaagcaacagcattctggaagcacagcaaagcatcatctggcaatttccacctgcccaactgccctggggctgctcatattgctgtcttctctgaagccccctgggaagagtcaatgatatttgatgttgtcgtagcacagtacattagaattatgtaa

SEQ ID NO: 130895 - DNA, 750 bp, Homo sapiens
atggcgccagtattgtcttggttcatcgttgtagatgcggttgctgcgtacaaattggccaatgagcctgctttggcaagagacaccccagatggccccgagccccggagctccccagcccttaacacccacctgcacctcctcggaagagaaacacagccagtgccccagtccaccctgagagatggggaaactgaggctcgtaaaggaaccaaggacgtcatgtggccttcccctatctcccgatgtcccggatacccgatgtgcctccacattctcagttgtgccatacttggtgtcttgttttctttggtatatcagggttgtaggcttgggtggtcggataatacggccctcacaaggtgcctggagctagaaaagctaggccttggcgacagcgtggacctgcatgtgtacgagattccggttgagtaccaaacagtccagagactcatccccgccctgtgggagaagcacagtccacagctggtggtgcatgtgggggtgtcaggcatggcgaccacagtcacactggagaaatgtggacacaacaagggctacaaggggctggacaactgccgcttttgccccggctcccagtgctgcgtggaggacgggcctgaaagcattgactccatcatcgacatggatgctgtgtgcaagcgagtcaccacgttgggcctggatgtgtcggtgaccatctcgcaggatgccggcagctggtggctgctggccatccttggcttgtag

SEQ ID NO: 130896 - DNA, 687 bp, Homo sapiens
ctctacatcacttgagttctcatcttcaacctctccttcttcagcttcatcatcatctgaactgtcttcctgcttgtcttttttccttttctcagctgacttgtcctcactggcatccctgcttctgatcttatcctgtgcaggcagggagctcatattgataagtgctcgtgtggctgtcatttcatccagccaaactacattacaggaggtatcatccaaccattcgatgtgagctggaggatattctttaaaataggaaaagacatcttgggtgctcatctcatctactccgcaaatatagattgtctccagtctcaccttggggattgctttcttcatcatgtctcggtccaaggctacatttctttgggcaagatttacttccgatcgaaaatggaagcgcttggctcgctgctctttcttttcaattgcttccttggaggtgacatcaattccagtgatgaagctgccagccttgttttcatatcttctgctcgtgtccgggatcagttccttgagcgagcgccgcacaggcacgatttccagctcgccctcctccacctccatgggctccggctcgccacggtcaacaccggactccgcctcaggggacgggagccccagggccggccccgccggggcctccgccttcaccgacacccgcaggccccgtacggccgccat

SEQ ID NO: 130897 - DNA, 864 bp, Homo sapiens
tttcgtgggctgggtggcacggctggcgagcccggaactcctctggtcacagctcagcgtccgcggagccgggcggcgctgcagctgcacttggctcgtctgtgggtctgacagtcccagctctgcgcggggaacagcggcccggcgctgggtgtgggaggaccaggctgccccaagagcgcggagactcacgcccgctcctctcctgttgcgaccgggagccgggtaggaggcaggcgcgctccctgcggccccgggatgacttctcagcgttcccctctggcgcctttgctgctcctctctctgcacggggttgcagcatccctggaagtgtcagagagccctgggagtatccaggtggcccggggtcagacaagcagcctggcctgcactttcactaccagcgctgccctcattaacctcaatgtcatttggatggtcactcctctctccaatgccaaccaacctgaacaggtcatcctgtatcagggtggacagatgtttgatggtgccccccggttccacggtagggtaggatttacaggcaccatgccagctaccaatgtctctatcttcattaataacactcagttatcagacactggcacctaccagtgcctggtcaacaaccttccagacatagggggcaggaacattggggtcaccggtctcacagtgttagttcccccttctgccccacactgccaaatccaaggatcccaggatattggcagcgatgtcatcctgctctgtagctcagaggaaggcattcctcgaccaacttacctttgggagaagttagacaataccctcaaactacctccaacagctactcaggaccttggcgatgaccttgagcagtag

SEQ ID NO: 130898 - DNA, 472 bp, Homo sapiens
ctgtgggttctggctaccacctgagcccactgggcatgtggtcatccctggcacctctcctttggagccaccttgtccctggctagacagtcacattttcccagtgccgttttggaaagatgttgcctttggagaaggcgtttgcctccccccaggagctccccagccccgccggatctgcccacgccggggtcagcagccggagttccagcaggaagaacccgagaccatccctgagaggacccctgctgaccctggagttctcccgcctgcgtttccgggaatttgtctacccaggaggctgccgggccccaccataccctggcccggcttgatgagctgtgccgccagtggctgatgcctgaagcgcgctccaaggagcagatgctggagctgctggtgctggagcagttcctggcatcctgcctgataaggtccggccctgggtggtggcacagtaccctgagagctg

SEQ ID NO: 130899 - DNA, 396 bp, Homo sapiens
atggggctgtatttggagacagggcctttacaagcctggctttctccggaccccctgtttctggaacagaggagggtcagagaagcaaagaccgaagaggacggccctgccaacaccgagcaggtgggtgggcacgagcaggtgggaggctgcgggccccaccagaccctggcccggctgcatgagctgtgccgccagtggctgatgcctgaggcgcgctccaaggagcagatgctggagctgctggtgctggagcagttcctgggcatcctgcctgataaggtccggccctgggtggtggcacagtaccctgagagctgcaagaaggcagcctccctggtggagggcctcgctgatgtcctggaagagccagatgtaaggaagccagaggaatga

SEQ ID NO: 130900 - DNA, 1100 bp, Homo sapiens
atgaaggagcagacagttgtcctgagtaacagaaaagagagaaaagagaaaggagagaaagggagaaaagcattgcctgtggcagggggcttgtctgcatcctcatccacgtgtgctcaggctcagagtgagtttcaggaaagagtcagtcagccagcccccaggtgtggaaaccagatctgtgacatcatggagaactgctccatggataagcccatgaaagccaagctccgcatgcaagtattccaagaagctgatgaaaatcatgtccctgacatggaaatcaagacactttcaccacattctactggtcaaggaagtcacaagcctcctcttgactgtgacagtttctcagatttttccttgtttttgatgaccttcacagttatgagcagtactggtaaggaacttgcttattttctggcacaagatgcttcagatccttaccagggtctgaagggcactgggaacttggaccgcctgacattgaaaaagactgaggtagctcgggggcagccaaaagaaaccagaggcggggatcctagtatcattcaggaagtggacccagccgcaaactcaggagcgttccaagtgtccagagcgtctggtagtcgcaatagccagtgagctccgccgcgctgggccgctgctgtcctggccgtgacccgatgtttgtcgcccgcgggcccccgcgctgcttctgcgaccaagcgtgcggcgcggcgcggcgcgggactgctgcgcagactatacgcgggtctgcccaggagggacgcagacactcaggacctaaaggggaagcactggctgtggagctgcgagccgagaaagacgcgcaggttatgaacctgggtgcgttcatctcgggggacctgaaggagagggactcgtggagagttgaggggtgtttcggaggaggggcgcaaggactgctcacaggacttgaagggcggcaggaaggtggaggattcggcccaggtgcgggacgcaggcggtggaagggaaatgagcacaagaggcgcaggcaggaaggagagcgcctggtgcgagagaggaaggagcgcacccaagattgtcacaatgctgaatttgacatttaa

SEQ ID NO: 130901 - DNA, 1113 bp, Homo sapiens
ttagcgtttaggagaaggctgagagttagtagttatccactggagagatgtccctgggtacatggttggtgggggaccccagggcttaaggggatccccagttgccaaaggatggagggcggagctggaggacctcaggctagtgagcacgcccttgcccaggcctgcagtggctgcactcgccagctggcccatggccctgtccgactcccctccctccaccccaagcctcggccccgggctccgaagcggctcgggggcgccctttcggtcaacatcgtagtccaccccctccccatccccagcccccggggattcaggctcgccagcgcccagccagggagccggccgggaagcgcgatgggggccccagccgcctcgctcctgctcctgctcctgctgttcgcctgctgctgggcgcccggcggggccaacctctcccaggacggtgagtgagggagggggcggcgcctggggaggtggggagtgacccgaggcgggggctgggatcgggagtctcgcggaaggagcctgttggctttgtttggaaccggggttaaagtcaccagccgctgctaatacccttgtgtctgtctctgagcatccgtgtctctgtggactgtgggtgtgccggtgtgtgcacccttctgtgtacaccactgagcgtgtgtctgcgtgtgcaccggggtttggctctcggggctgatgtccgttaggagcagcccggggtctggatgtgttgctgtccgtgtgcgcgcgcgtctgtgttggtgtctggctctgcgtttctgtgtcagtatctgtgtgtatgtctgtgtcagtgtgtgttgggggcggagtgagatttgtcgctgtttcagtcagggcgtgtgtcgggtgtttgtgtatgtatgtactaactgtgtattgattgctaattataagcacctttggctcatttacttctagttcagggtcaagaaggtcaggtgcatcaccttgctctgtcctcacagtcaccctttttagctccaaagggcatggcagtgacttctgcccaatggcctcttcttctgtgtgaactggaacctgccggtaaagccctgaagtgtaagaagatgccatccgccccat

SEQ ID NO: 130902 - DNA, 1177 bp, Homo sapiens
atggagtcccagagtcatctgataactcatagcgagacaagcacttctctaaacggggcttttacacgctccccttttacacacttactgataaagggacgaggagaaatagtcaacgtagcttcctgtgggacagcagagaaaagaggcttgaggggtttttccagggccccgcccatgctcacctggagcgcagacgaagagttaaggaaacggcccaaagaaacacagtttgtatgtggtagagctggaatccatgagtttaaccactatccacagcaagggactctgggaagatgggctttgccgtgggaaggttggcttttggtggaagggagcggggcttcttatgggaagagcagcctttctgagagagaagagagactttctgggggatctccagggagagtggctggtcaagaccatagatgttcccaatggcaggggctcatccccatacttcccagagtccacttggagactgtctgggatgtcggtgtcgcagatacctcacctgtaccccatcctgggcaaagaaggcacgggcgtcagcttgcatggacagctggaggcaagtggcatccccccagagcgggcagcgacggacgaggaggcgggcacgactcacctcaatggtgcgatagcactcgccaaagaggtccgcggcaaagaagtcgtatgtgaccggatgcgaaaaacacgaggacgtttaaggagcggacgcgcccagggcatgaccggaaagcaggagtggacgccaacccaccaagcaaccacacagacccgacacgatgagattttcaaaatagtgcaaggtgaagcaccaagtcctgatggagaagctgcagcaagttatccaggagatctagctaagatcattgatgaaggtggttgcactaaaccagcacgctggatctcggcgaggccaggcacacgacccgctcttgaaggatgctacgcgcgagctgaagcccggctcgcgcgtgttcgacgagcggcccgacgtggtctgcacccccagcgacggcatcgtcggcgcctgcggcctcgtgcagcgcggccaggtctaccaggccaagggcttcccgtactccacggccgagctcttcggaccgacgcaggacgccagcgtcttcgagggtggccgagtccatacatgtcactgcaagggaaatga

SEQ ID NO: 130903 - DNA, 549 bp, Homo sapiens
atggcattggtgatggcagtagaagtagtgggtacatcttgggaccttcctgtggcatacatgggcacagtagtggcagcagtggacttggaaggccagttcccaggcctccaggtggcacatgaagctttggcttactcaaatgcatctgcatttcgacgtctaaatctgtattactggtttgcctctgctctctcctttgtggattggccttttaaaacaatttccctttctgaggagatttggaaaagaggaaaaagagtttgtgaggctgggaaattcaagatcaaggccccattagattcaatgtctgatgagggtttgctggttcatagatgttgtattcttgctgtgtcctcccatagtgcaagagggaaagaaacttgtgtatggcacagtggaaacaatgaagttgaagggtacggcttaatggatgatgaaaatgagatgttcgggggacaagagaggggcaaagatttcatgatgaagacacaaaaggtggttgcaacgaaagcaaaaattggcaaatgggatctaattaaactctag

SEQ ID NO: 130904 - DNA, 421 bp, Homo sapiens
agagtcctccttagaagggtccaagttcccaggaagagggacggccacagttcagtcaacttacctgcttcagcctgccagctttggagaacacaggcagtccggatgagggagggtcccccatctccagtgcagcacattggctctaccaaaaagcagccagatccctgatcctgttcctcctgactgggtgagtcctcccagtaggggtctccagccacctcctacaggtgggtgtgggccagcaacaggtcagtaaccactaggacagagcttccagaggaaggagctggctgccatctttgctgtttcacagtattcactggtagtacctccaggtatgggagaaactgaggcaactggcatctggagtagaccgccagcaaatggcaacagccctacagtagaatggcatattaaa

SEQ ID NO: 130905 - DNA, 1655 bp, Homo sapiens
ggatttttgccgatttcggaaccaccatcaaacaggattttcgcctgctggggcaaaccagcgtggaccgcttgctgcaactctctcagggccaggcggtgaagggcaatcagctgttgcccgtctcactggctcacgtctgccaagatgccttcattgactttgcaaaaaggaggagtgatacagcaagtgggacatccacaggaaacacgtccacacttacgagctgcgtagttcagttacccagctgccagaaatccgtcaatcccagggattccgtgcaggaagcacaggggacgggccacggcaagcaagggctggtgactgagcctcagctgcagggctggacagagtcatctgggggagaggtggggcaggaggatgcctggaagccaagaggagacactgttccagaggaggtggctggagacccctactgggaggactcacccagtcaggaggaacaggatcagggatctggctgctttttggtagagccaatgtgctgcactggagatgggggaccctccctcatccggactgcctgtgttctccaaagctggcaggctgaagcagagcacttcaaaggactaataatgttccatggaacagacattggaaaaagacaatccgggacaccagccatggcaatatcccacatgctccctctcataaagtggggctgctcaggaaccagtgagaggctagcaccgcaggcaacggtgcaggtgaatggactgaacgatttcatccgttcttccaaggtggggctgctcaggaaccagagagaggctagcaccgcaggcaacggtgcaggtgaatggactgaacgatttcatccgttcttccaaggaaccagtgagaggctagcaccgcaggcaacggtgcaggtgaatggactgaacgatttcatccgttcttccaaggtggggctgctcaggaaccagagagaggctagcaccgcaggcaacggtgcaggtgaatggactgaacgatttcatccgttcttccaaggaaccagtgagaggctagcaccgcaggcaacggtgcaggtgaatggactgaacgatttcatccgttcttccaaggtggggctgctcaggaaccagagagaggctagcaccgcaggcaacagtgccagcaaatggactgaacgatttcatcggttctcagtcttcagaggccgtgacaccaagggcacaaaactggacagagagaatgagtttcatgaactgacagaactaggcttcagaagatgggtaataacaaactcctctgagctaaaggagcatgttctaacccaatgcaaggaagctaagaaccttgataaacacttacaggaactgctaactggaataaccagttcagagaagaacataaataacccgatggagctgaaaaacacagcacgagaacttcgtgaagcacacacaagtatcaatagccaaatcaatcaagtgttagaaaggatatcacagattgaagatcaacatattgaaataaggcatgacgacaagattagagaaaaaagaatgaaaaggaacgaacaaagcctccaagaaatatgggactatgtgaaaagaccaaacctacgatggactggtgtaccggaaagagatggggagaatggaaccaggttggaaaacacactttag

SEQ ID NO: 130906 - DNA, 897 bp, Homo sapiens
  misc_feature (1)...(897): n = a,t,c or g
gtcgacccgggaattccggaccggtacctgcaggcgtaccacgctttccctatagtgagtcgtattaagagcttggcgtaatcatggtcatagctgtttcctgtgtgaaattgttatccgctcacaattccacacaacatactgagccggaagcataaagtgtaaagcctggggtgcctaatgagtgagctaactcacattaattgcgttgcgctcactgcccgctttccagtcgggaaacctgtcgtgccagctgcattaatgaatcggccaacgcgcggggagaggcggtttgcgtattgggcgccagggtggttttttttttcaccaagtgagacgggcaacagctgtattgcccttcaccgcctggccctgagagagttgcagcaaagcggtccacgctggttttgccccaagcaggcgaaaatcctgtttgatgggtggttaaagcgcggggatataacatgagctggtcttcgggtatcgtcgtattcccacctacccggaggatatccggcaccaacgcgcagccccggactccgngtaatggcggcgcattgcggcccagcgccattctggatcgttgggcaaccagcaatcgccagtggggaacgatgccctcattcagcatttgcatgggttggttgaaaaccggacatggcactccagtcgccttccccgttcccgctatcggctgaatttgaattgccagtgagaaaattatgccaagccagccagacgcagacgcgcccgagacagaacttaatgggcccgctaacagcgccgatttgctgggtgacccaatgcgaccagatgctccacgcccagtcgcgtaccgtcttcatgggagaaaataatactgttggatgggtgtctggtcagagacatcaagaaata

SEQ ID NO: 130907 - DNA, 561 bp, Homo sapiens
atggggccccatccactacatgggtcccacagccatgaagccagctttgatgacaaaaggcaggaaaaacggcatgttttgcatctggtgtgcaatgtgaagagtccttcaaaaatgccagaaatcaacgccaagggcagagagcaaaaagaaagggcagcgctctcaagacttccttgctttgttttggttgacacatctgtcaacatcacccttagcaccgcctgccctggccaccacgtgatgaggctactggcttgtggcctgagagtccgctatcagcacatcatacctttggctaaaaatgtgctaaaaatgtgccagcccctccagtgtcaatcaaatggccatcagtcatttacacttgagtgtggagaagccgatgcagccattcttgaagcccgtggcctcaatgtgaccatcatgaaactggatccgtacatcaacgtcgatccaggtactatgagcccaatccaacacggggaagtgttcgttactgaagacggcgctgaaaccgacctggacctggggcactacgggtaccggcgtatcttatcctag

SEQ ID NO: 130908 - DNA, 642 bp, Homo sapiens
tcccataagatagtgcaatatgtaactccacctttctactacagcactaacggaacaatctgctactattaactcatcactttgtgttgataatacagtttctaattcctaggaaagaaacaaaatattacttggtaataacaccatacagtctctcaataaacgttttatccaacttcttttattactcccctgaaagtctgaatgatacaaattgttaccatcatgaagaggcagacacaccttggcgttgatttctggcaatttttgaaggactcttcaacattgcacaccagatgcaaaacatgccgtttttcctgctttggaagcaagtccctgagacattggtgatccaacaacagcttcccagaataaattaacctctggtcctctggaacgcggacgctcggggtagacgcggctcaggtgggccttgaggtggcccacactccagccgcggtcagccactcagctccaagttccggtggcgctggttggggctcttcaccaggagcgtgacgggctcgggttcggtctcggactccatggcggcggctggcggtgtcggggctccgctgcgctcctaggtgccaggcaggcggcgtctcagccgcccgcaatctctgcaacgaccgttcacgt

SEQ ID NO: 130909 - DNA, 551 bp, Homo sapiens
aagctgagactttccaaaatggaaagaggcttctggaccatcaagtttctatggacaagaagcagactaagaaagctactaaggcaaccccatcaataacttatacgacaaaagatgaagggccaccaagtgaccataaaggaaagattccagatatgcatccagagaaacttagtgaagatgaacttattgacataaaggaggaaggtggttgtgacaaaaaggatgtagatgtcccagaggaagagactccctttgaaaagctcactggtgagctgacagaagtaagcttcagaaggtcagtaataacaaactactctgagctaaaggaggatgctcgaacccatcgcaaggaagctaaaaaccttgaaaaaatattagacgaatggctaactagaataaacagtgtagagaagaccttaaatgacctgatggagctgaaaaccatggcacgagaactaggtgacgcatgcacaagcttcaatagccaattcaatcaagtggaagaaagggtatcagtgattgaagatcaaattaatgaaataaagtga

SEQ ID NO: 130910 - DNA, 465 bp, Homo sapiens
atgaaagtctctgaagaaagttatcatcttccaaggtcacaaattattccaatagtacccaacacattcttgaagataacagtttctgctgaccacggagtctgccatgaagaagatataaaacaacaacatactgtgttcattgtggatgttaaagccaacaagcaccagatcacacgggctgtgaagaagctctatgacattgatatgcccaaggtcaacaccctgattagggattgcagctccttgccagcaacagaacaaagctggacgaagattgacgagttgacagaagtaggcttcagaaggtcggtaataacaaacttctctgagctaaaggaggatgttcgaacccatcgcaaggaagctaaaaaccttgaaaaaagattagacaaatggctaactacaataaacagtgtagagaagatgttaaatgacctgatggagctgaaaaccatggcatga

SEQ ID NO: 130911 - DNA, 2811 bp, Homo sapiens
atggttatgttggaaggaactggggaagaagagtggggcgctgctgaaaatatacccaaaagtgtggagcgactttggaaccgggtaacaggcagaggttggaacagattggagggctcagaagaagacaggaaaatgtgggaaagattggaacttcctagagacttgttgaatggctttgaccaaaatgctgataacaatatggacaataaaattaaagtccaggctgaggtggcctcagctggagatgaggaacttgttgggaactggagcaaaggagaaaaacttcaagagtttgtggatcacaaagtgtggtggctgacacatgactggaaaaatgtaaaggagagaggttgtaatacttgctgtgatgaccgatggatggcagtgaagccagctgcacgtctatggaaagggaccatatttcctctaggctgctatagaaaccacagaagatatgcacatcctctgttggtgatacccaggcaaacaggatcaggagtggacctccagcaagccccaacagacctgcagctgagggacctgactgttagaaggaaaactaacaaacagaaaggaatagcaccaacatcaacaaaaaggacatccacaccaaaaccccatctgtcaccatcatcaaagacaaaggtagataaaaccacaaagatggggagaaaccagagcagaaaagctgaaaattctaaaaaccagagcaccccttctcctccaaaggatcgcatctcctcgccagcaaaggaacaaagaaggatggagaatgactttgacgagttcacagaagtaggcttcagaaagtcggaagctaaaaaccttgaaaaaagattagacaaatggctaactagaataaacagtgtagagaagaccttaaatgacctgatggagctgaaaaccatggcacgagaaatatgtgatgcatgcataagcttcagtagccgattcgatcaagtggaaataagggtatcagtgattgaagatccaattaatgaaataaaaaccaaagacaaaaaccacatgattatcttaatagatgcagaaaagacctttgacaaaattcaacagcccttcatgctaagaactctcaatgaactaggtattgatggaacgtatctcaatataataagaactatttatgacagacccgcagccaatatcatactgaatgtgcaaaaactggaagcattccctttgaaaacaggcacaagacaaggatgccctctcttaccactcctattcaacataatgttggaagtgctggccagggcaatcaggcaagagaaagaaatgaagggtattcaattaggaaaagaggaaattaaattttccctgtttgcagatgacatcattgtctatttagaaaaccccattttctcagccccaaatttccttaagctgataagcaacttaagcaaattctcaggatacaaaatcaatgtgcaaaaatcacaagcattcctatacatcataaacagacaaacagagagccaaatcatgagtgaactccgattcacaattgctaccaagagaataaaatacctaggaatccaccttacgagggatgtgaaggatctcttcaatgagaactacaaaccactgctcaatgaaataaaagaggacacaaacaaatggaagaacattccatgctcatggacaggaagtatcaatattgtgaaaacagccatactgcccaaagtaatttatagattcaatgccattcccatcaagctccaactgactttcttcacagaattggaaaaaactgctttgaagttcatgtggatacaaggctacagtaaccaaaacagcatggtactgactctgctggtgatacccaggaaaatgcggtctgcagtggaactccagcaaacttcaacagacctgcagctgagggacctgactgttagaaagaaaactaacaaacggaaagcaacagcatcaacttcacaaaaaggtcatctacaccaaaaccccatctgtaggtcaccaacatcaaagaccaaagaagtaggcttcagaaggtcggtaataacaaacttctctgagctaaaggaggatgttcgaacctatcacaaggaagctaaaaaccttgaaaacagattagatgaatggctaactagaataaacagtgtagagaagaccttaaatgacctgaaggagctgaaaaccatggcacgagatcttcatgatgcatgcacaagcttcaatagacgatttgatcaagtggaagaaagggtaacagtgactgaagatcaaattaatgaaataaatgatggagagaatggaaccaagttggaaaacactcctcaagatattatccaggagaacttccccaatctagcaaggcaggccaacattcaaattcaggaaatacagagaacactacaaagatactcctcgagaagagcaaccccaagacacataattatcagattcaccaaggttgaaatgaaggaaaaagtgttaaaggcagccagagagaaaggtcgagttacctacaaagggaagcccatcagactaacagcggatatctcggcagaaatcctacaagccagaagagagtgggggcccatattcaacattctcaaagaaaagaattttcaacccagaatttcatatccagccaaactaagcttcataagtgaaagagaaataaaatcctttacagacaagcaaatgctgagagattttgtcaccaccaggcctgccttacaagagctcctgaaggaagcactaaatatggaaaggaacaaccggtgccagcactgcaaaaacttgccaaattgtaaagaccattga

SEQ ID NO: 130912 - DNA, 591 bp, Homo sapiens
atgcgtcaggaaccgccccggaaatccaggctcgacccacgcgtccgcgccgaaagcgaagaaggaagctcctgcccctcctaaagctgaagccaaagcgaaggctttaaaggccaagaaggcagtgttgaaaggtgtccacagccacaaaaagaagaagatccgcacgtcacccaccttccggcggccgaagacactgcgactccggagacagcccaaatatcctcggaagagcgctcccaggagaaacaagcttgaccactatgctatcatcaagtttccgctgaccactgagtctgccatgaagaagatagaagacaacaacacacttgtgttcattgtggatgttaaagccaacaagcaccagattaaacaggctgtgaagaagctgtatgacattgatgtggccaaggtcaacaccctgattcggcctgatggagagaagaaggcatatgttcgactggctcctgattacgatgctttggatgttgccaacaaaattgggatcatctaaactgagtccagctgcctaattctgaatatatatatatatatatcttttcaccataaaaaaaaaaaaaaaaaaaaaaa

SEQ ID NO: 130913 - DNA, 396 bp, Homo sapiens
ttcgccctctgcagtcaagatgctgggcgcgttgagtactgggatttcaaatatgcgtgcattagagaatgattttttcaattctcccccaagaaaaactgttcagtttggtggaactgtgacagaagtcttgctgaagtacaaaacgggtgaaacaaatgactttgagttgttgaagaaccagctgttagatccagacataaagagattgccttggttgaatagaagtcaaacagtagtggaagagtatttggcttttcttggtaatcttgtatcagcacagactgttttcctcagaccgtgtctcagcatgattgcttcccattttgtgcctccccgagtgatcattaaggaaggcgatgtagatgtttcagattctgatgatgaagatgatac

SEQ ID NO: 130914 - DNA, 655 bp, Homo sapiens
ttttttaatactattaacattttataatttttactaattgattacaattttcttgagaattaaacattcaaaataaggaaaagtatactcatgatggtacatatcttgctattatttgcaaggctctgtgatatgtgtcaaaatttgcaggaagattatcatcttcatcatcagaatctgaaacatctacatcgccttccttaatgatcactcggggaggcacaaaatggggaagcaatcatgctgagacacggtctgaggaaaacagtctatgctgatacaagattaccaagaaaagccaaatactcttccactactgttttgacttctattcaaccaaggcaatctcaatataatactgataagttggctcaaagtcttttggtcaagtacatgacagaagaacggaattctagcagccagttgatgatctgggtcatcctttatgtctggatctaacagctggttcttcaacaactcaaagtcatttgtttcaccctttttgtacttcagcaagacttctgtcacagttccaccaaaccgaacagtttttcttgggggagaattgaaaaaatcattctctaatgcacgcatatttgaaatcccagtcctacgacgcgaacagcgtcttgactgcacaggacgaagcggccgc

SEQ ID NO: 130915 - DNA, 599 bp, Homo sapiens
atgtggggtgtttgcatcactgagtatcacacagccttttcactcatggttagagacggagcagaaaggtggacagacaccccagcacaaagccgagtgaagaactctgaggaaggatgcgtgcttgggaatgatgcctcgaccctggtgcctgaagccgtgcctgggacgcgaccactcctagcgatactcggtgatggtcgctcaataggagccattccgacacgcttgcgaaccaatcagcaagtcgtgggtcccccaaagtgccgttccatggcgcaggtgcatcctattatgccgactttagtgaagccagctgtgaggccgcgctggcaaatggcatacacagcccgagtgatcattaaggaaggcgatgtagatgtttcagattctgatgatgaagatgatagtaagtataaaaaggtttaaaccctgggcacggtggcttacacccataatcccagcattttgggaggccgagatgggaggatcacttgaggcccaggagtttgagaccagcctgggcaacatggtgagaccttgtctctgcaaaaaaacattttttttcaaatattttcttaaaaaaggcttaaagtaga

SEQ ID NO: 130916 - DNA, 447 bp, Homo sapiens; identical to SEQ ID NO: 115946
  misc_feature (1)...(447): n = a,t,c or g

SEQ ID NO: 130917 - DNA, 429 bp, Homo sapiens
ttttttttttttcaagatttctgattgtttattgaaatcatttaagaatagagcctggaaaactttcagtaatgttcctaggacatcttcatctgagataactttgtctttggattcctctggaacatatcggagggtccccaatccgaaacccaccatcccgacgtgcttttgagtggcgttctgcccgttcttaacgcgcgagctactgcacgctattctcacagccgggatgggcttctttaaccacgtgaagtacttgtatgaactatgaaaataaaccctggattggcttttctgaggaagttcaagcacctaattaacccctggtggagaaaaagccacgcactctcacgcggtaagggcagtctttttaaaaagtttccatttttgcccagatacaagctccccagtcagtgccgaacgcaa

SEQ ID NO: 130918 - DNA, 1076 bp, Homo sapiens; identical to SEQ ID NO: 115950
  misc_feature (1)...(1076): n = a,t,c or g

SEQ ID NO: 130919 - DNA, 2122 bp, Homo sapiens
aatggaataatgtaaggaccccacagcatgtggtatagaatgggcctttcataagtactgactacttgggtgggaagtgttgggagttagctaactagaactccctcaaacaattcttttctgaacttagtttccagccctccacacacatgagaataagcttatagttccttaaggccaggaacccagaagttatgcaggtaagtttggcttttatcagttgaagggtagtgaatagaaacttttcccattttcaggaccctccgatatgttccagaggaatccaaagacaaagttatctcagatgaagatgtcctaggaacattactgaaagttttccaggctctattcttaaatgatttcaataaacaatcagaaatcttgactatgcttccagaatctgttaaatcaaaatatcaagacctactggcagttggaacatcaaggggtggaactgcttgaaaacagacatcaacagcaaagtacctttaaaccagaagaaattctttacaagactttgggtttcagtgttgcccaagcaactagctcattgatttctgctggaaaaggtgtcttcgttactaaaggattggtaccaaaaggcgcagtcgtatctatgtatcctggtacagtatatcagaagtatgagccgatctttttccagtccattggaaatccgtttatttttagatgcctggatggggtactcattgatgggaatgacaaagggatatcaaaagttgtgtacagatcttgcaatgggagggatcgactcggccctttagaaatgagtgatagtacatggctaacgtcagaaattcataaccctctggctgtgggacagtatgtcaacaattgttccaatgacagagcagctaatgtctgttatcaggaatttgatgtgcctgcagttttccctatagaactgaagcagtatcttccaaacattgcctacagctatgacaaacaaagggcgaacgagcagcgccgagcccagtccccggatggggcgcctgagccaatcgcagccgccgccgccaccgccgcggccacaaaacctccttgcaagttcctttcacctggttcattcctccacgtttatcgggacttggcttggtgctccacctcacatttcccaaaaaagcctcctgatgcctccccgactcacagtggacgggggcctgcactgtctgtcatcagatgcagaaatggaggttcagaaagtcaaaatgggggtcacgtagcagaagaggaaattcaggcacgcaaagagacacaaaagatgcagacacagaggaaaagaccatgtgaagaggcagtaagagggcagctgcctgcaagccaaggagagaggcctcagaggaatccagccctgctgacaccttcatcttggacttctaccctccaaagctacacaacacaagaggagcgaccaaaaaggaaaagacaaaaggaacacacgaaaaaacgaagaccaccacccacgcacccaacaaccacaacacatgagaacacacaaggacaacagcaaccacaagacaaggaacaaaaaaaaacagaacacagaaacagagagaagagcaatgcgagacaggcgcgacaaacgagacacaacacaagtaacaaacgagacacgacaaaaaagagcatagaaagaacacaacagaacacacaccaaagcagagaaaacaaaacagcaacaaacacacaaaaaaaaaagaaaacaaaaagaggaaaaaaaaaagagggaacaagaaacgcggaaacaacgaagacgaaccaagcggacgcaggaagcgacgagcacgcagaacagaccacagagagaggacgcaacgaaagacgagagcaagagagggaggaccgatccacaaagagcgagagagcgcacaaagagccaaagggaaagcacgccaagaagaacaacacgaaggaccagacaaaggaaagcaaaccagagcaaatcagagacaacaagaagaaagaaagaagtgaaagcaggagccagaatagacacgacacaggcaccagagaacaagcgaagccaggaaaagaaaacaggaagaaagcaaagagaaaaacggacacgcgaagcaacacgagagacagagcgaacaactga

SEQ ID NO: 130920 - DNA, 1104 bp, Homo sapiens
atgcccatgcgtgtactctcagatgatcgggagtctcatgacacagcaacactcacataccatccatattccaaagacatcagcccatgggtggctggtggagagctcaatcccataaatgtagaaagagaagcgcaggaggatgagatctcagagaacttggtgaacattcagaaaatgcagaaaacgcaggtgaaatgccgcaaaatcctgaccaagatgaagcagcagggtcatgagacagccgcctgtccggagactgaagagataccgcagggagccagtggctgctggaaggatgacctccagaaggaactgagtgatatatggactcaccccaccacggcccccaaccttagctgtactgctgtctacaccctgagcagtgtggagtctcccagcgcccccagctccttgtcttcttgcaggtctgctgtgcacgtgctgcagaactccatagacagcctcactttgtgctcgggggcctgtcccaaggcctcgagcctaagagggcgacaccttcgcgcagttggagacgctcaagagcgagaacgagcagacgttggtgaggctgaagcaggagaagcaacaactgcagcgggacgtgaagacctcaagtactcgggggaggccacgctgccagcagaaactgcaagccgaggcgcaggagcgtctcaagaaggaggagcggcggcagcgaaggccaaggaccagctggagcgcgccttgcgggcgatgcaagtggccaaggacagcctggagcacctggccagcaagctgatccacatcactgtggaggacggccgcttcgcgggaaaggagctggatccccaggcagataactatgtgccaaacctgctgggcctcgtggaggaaaagctgctgaaactgcaggcgcagctccagggccacgacgtgcaggagatgctgtgccacatcgctaaccgcgaggtgccctgcagccatggggcagagctccagagatctaggaacgaagagagtgaggaggaggacaatcgaggtagtgacccgcgcatcactcaagatccgttcccagaaattaatcgaaagtcacaagaagcaccgtcgctctcggagtcctag

SEQ ID NO: 130921 - DNA, 1390 bp, Homo sapiens
atggaagttgcagccctggagcacctagaccaccggctgagggagaaggtgaagcagcagaacgccctgcggcaccaggtggtgttgcggcagaggcggctggaggagctccagctgcagcacagcctgcgccttctggagatggcggaggcgcaaaacagacacacggaggtggccaagaccatgcggaacctggagaaccgcctggagaaggcccagatgaaggcgcaggaggccgagcacattaccagcgtgtacctgcagctcaaggcctatctaatggacgagagcctcaacttggagaaccggctggactccatggaggctgaggtggtgaggaccaaacatgagctggaggcactgcacgtggtgaaccaagaggccctcaatgcccgggacattgccaagaaccagctgcagtacctagaggagaccttggttcgagagcgcaagaagcgggaacgctacataagtgagtgcaagaagcgcgccgaggagaagaaactggagaacgagcgcatggagcgcaagctgaccctggctctgacctcaacccacgagcagacccaccgcgagcacctgctgctacagtccgacgacaccatccaggacagcctgcatgccaaggaggaggagctgcggcagcgctggagcatgtaccagatggaggtgatctttggcaaggtcaaggacgccactggcactgacgagacgcactcgttggtgcggcggttcctggcccagggcgacaccttcgcgcagttggagacgctcaagagcgagaacgagcagacgttggtgaggctgaagcaggagaagcaacaactgcagcgggagctggaagacctcaagtactcgggggaggccacgctggtgagccagcagaaactgcaagccgaggcgcaggagcgtctcaagaaggaggagcggcggcacgccgaggccaaggaccagctggagcgcgccttgcgggcgatgcaagtggccaaggacagcctggaaaaaccaagccagcaagctgatccacatcactgtggaggacggccgcttcgcgggaaaggagctggatccccaggcagataactatgtgccaaacctgctgggcctcgtggaggaaaagctgctgaaactgcaggcgcagctccagggccacgacgtgcaggagatgctgtgccacatcgctaaccgcgagttcctcgccagcttagagggaaggctgcccgaatacaacacccgcatcgccctgccccttgccacttccaaggacaagttttttgacgaagagagtgaggaggaggacaacgaggtagtgacccgcgcatcactcaagatccgttcccagaaattaatcgaaagtcacaagaagcaccgtcgctctcggaggtcctag

SEQ ID NO: 130922 - DNA, 1351 bp, Homo sapiens
atgcgctgtccaccgctgaccctggctctgacctcaacccacgagcagacccaccgcgagcactgctgctacagtccgacgacaccatccaggacagcctgcatgccaaggagaggagctgcggcagcgctggagcatgtaccagatggaggtgatctttgcaaggtcaaggacgccactggcactgacgagacgcacgagtacacctatggggtcatctggggcactgaggcgcagcccctttccagatgtgggccttgtgagcggatggctccgaagacgggcggtatttcctgcggaatcgggcgagattcacgggcagaaattgatggcactttgattttggaaagaagctatgctcgcctctccagtgcccccgaggcgacaccttcgcgcagtggagacgctcaagagcgagaacgagcagacgttggtgaggctgaagcagagaagcaacaactgcagcgggagctggaagacctcaagtactcgggggagccacgctgccagcagaaactcaagccgaggcgcaggagcgtctcaagaaggaggagcggcggcacgccgggccaaggaccagctggagcgcgccttgcgggcgatgcaagtggccaagacagcctggagcacctggccagcaagctgatccacatcactgtggtgggggacaaacccagcccttattgctcggacgccctgctgcaagctcccacgcggacgcaaaacctaggcaactacaacaagacaacacagaccaagacacacaacacatatgaacaggacgccaaaagcgcaagacgaaaaaacacgaaaacaacacgaaaaaaccaccccgaacgacaacaaaaagaagaacgagaacaaaacaaaccacgacctacgaaccccacgagacacaaccaagaaaacaacacagccacaaagaacaacccacataccaagaaacacacaagagcaaaacaaaaacaccaaaacaagaacaactacaacaggaaattctcaggccagaggaacaaccagtgccaaaaccccgagcgccctcgaccggactgtcggattgctgtcgtggtgctgaagcctcacgccctggcgaccccgccccagtgtgtgctagtcccgcgccccgacgtaaacatgcaccggcgcccgcgcaccaaaggagctctaggagctggacggaggaggggagcccgtctcctggcccgaaagccagcccaagaagggggccaggtcgtgctgcctaaagcgaaggtggagctcagggataggggacctggatcccacatcgctccctgctatccccccaccccccttagacgaagagagtgaggaggaggacaacgaggagtga

SEQ ID NO: 130923 - DNA, 1779 bp, Homo sapiens
atgtctgccacaggggaccgacacccgacccaaggggaccaggaggccccggtaagccaggagggagcacaggccgaggcggccggagctggtaaccaggagggcggcgactccggccccgacagcagcgacatggtgcctgcggccgaggtggtcggagtcgcagggcccgtggaaggcctcggggaggaggagggtgagcaggcggcaggcctggccgcagtcccccagggcgggagcgccgaggaggactcagatatcgggcccgcgacggaggaagaggaggaggaggaagaggggaacgaggcggccaacttcgacttggcggtggccacccgtcggtacccggcggcgggcattggcttcgtgttcctgtacctggtccactcccttctccgccgcctctatcacaacgaccacatccagatagcgaaccgtcacctcagccgcctgatggtggggccccacgctgctgtgcccaacctctgggacaaccctcccctgctgctgctgtcccagaggctgggtgcaggggctgcagccccagaaggcgagggcctcggcctgatccaggaggctgcgtcggtccaggaggccgcgtcggtcccagagcctgcagtgccagctgacctggccgagatggccagggagcccgcggaggaggccgcagatgagaaacccccagaggaggccgcagaggagaagctcacagaggaggccacagaggaaccggccgcagaggaaccgacctcagaggaggccgtggcccccgagggtaagggggctagcggcagcagcggggaagcggggatccatgtgtccaagggctctgggcagggctgcggtgcgggcacagctggtgaagcgggtgaactagaaataatcagccgctttgggtgggagatttactggaaaaaagggaaatacagtgtccctgtggaaatgatcaagcagcagcaacaagtcactaaatctcagcccgaaaagtgggatgaagaggcccaagatgctgcaggcgaggaagagaaagaacaagaaaaagagaaggatgtggaaaacaaggtgttcaaacgcaaaacctcttcaatggcccttctccctcataccaaatatcaatgcgcacctgaaagccatcagcttgaagcatctagctcaggtgtgttggtactgagcctgtgtgagaaagatgatgccatgattatggaagaaatagggaaaatcttcaagaaaaaaatagaaatgagaaaaggtattgcttttcccaccagcatttcagtaaataactgtatatgtcacttctcccctttgaagagcaaccaggattatattctcaaggaaggtgacttggtaaaaattgaccttggggtccatgtggatggcttcatcgctaatgtagctcatacttttgtggttgatgtagctcaggggacccaagtaacagggaggaaagcagatgtcattaaggcaattcacctttgtgatgaagctgtcctacgcctggtcaaacctggaaaccagaacacacaagtgacagaagccctgaacaaagctgcccactcacttaactgcacgccaatagaaggtatgctgtcacatcagttgaagcagcatgtcatcgatggagaaaaaaccattatccagaatctcacagaccagaagaagaaggaccatgaaaaagcggaattggcggtacatgaagtatatgctgtggatgttctcgtcagctcaggagagggcaagagcaaggatgcaggacagagaaccactatttacaaatga

SEQ ID NO: 130924 - DNA, 397 bp, Homo sapiens
cggctggtggcgagcgcagagcagctgctgaaggagctgccctggcccccaacctttgagaaggacaagttcctcacccctgacttcacctccctggatgttctcaccttcgctggctccggcatccctgccggcatcaacatccccaactacgatgatctgaggcagacggaaggctttaagaacgtgtcgctggggaatgtgctggctgtggcctacgccacgcagcgggagaagcttacctttctggaggaggatgacaaggacctgtacatcctctggaaggggccctccttcgatgtgcaggtgggcctgcacgagctgctgggccatggcagtggcaagctcttcgtacaggacgaaaaaggagcattcaactttgaccaggaaatgtatt

SEQ ID NO: 130925 - DNA, 1977 bp, Homo sapiens
atgcctgaggtcgactctagaggatccctggtactatctagaagtcgtaatcattgtcatagctgtacatactgtgaaattgtcatagttataaatttgacagaagatacgagtcgcaggcttaaagtgtatagattgtggtcgcaaaggagtgagcagactaacgttaaaagccatgggatcagcgaccgcaatccagctgccacagcttgtgccatcgccctgcaggctcggactctcagagcgatcccctactccccccccgaggagtatctccttttgcctgcgtcgtcggcgtacgagctcgaattcgtaatcatggtcatagctgtttccttgagacgggtaacagctcattgtccttcaacgcctggccctgagagagttaaccaagcggtcaacgctggtttgcgcagccggcgcaaatcatgtttcatgctgggttccgacatcgcgacatgccttgtggatctaaaccatggctcggcggtcgcgtgcgagtgcgggcatgtgacactgtcccgagccatttttctattagctcacagagccggcaaatccgcaccagccgaaaccacgacccgactcccccaatatcagaccgctaacaatggccgcacagcagctcaggccaccaccagcatcggcgtccccgtgatcccacatgccgagacacgcatgccgcacgctgggcatcttcctctacgtccccactcaccgatcgccagtcatccgcgcccaccgcgcacgacgacacgctctacaatcgcgtcacgtcccacatcaccacctgtcaatccaaggcgcccaccacctctgcagcctgcacgttccaaactgcggacccatcatgcatcatcgcatgtctggtgcttaccaccttcacgccttgcggcccttcgttctcacagcgcgctccccccttccaatcatgtctccccggtcaccgctggctccttgagaccacccttcatcgcagccatctggccccgcgccctacggcccagtgctaagcttgcatgcctgcaggctcgactctcagaggatcccctactcccccccggcaggcagtatgctctctttgcctgcgtcgtcggcctgcgccttgctccaccctcgacccgcgccactatcaccaacgtcgacgcaacatcgcgggcgcaaccaccgtccgcgggatgggccatcccagcacgtcgcccacatccgttttatgcccatcacgtccgtcaacctcacatgcaccctccacgggacccgactcagcggtccgccgcagacagctgctgcaaggagctgccctggccccaagtctttgagaaggacaagttcctcacccccgacttcacctcccaggatgttcttgacttcgctggttctggcatccctgctggcatcaacatccccaactacgatgacctgaggtggatcatatacacgcagtatattgcgccgacgcgacatagcaccgagaactcgatccggccgtcatgtcgccgatggctgattaccggcacatatggctctcatacgcgtcatatcttcttgatatatagctattgcattccttcagcgagttttatgtatccactactccacgtagcatccgtcacagtctatgtcattagcttatacataccggttgatcgtgacgcacatcatgatctctcctatatgattatcgatgctatcacttgcatcgcaacatcgctaccactacctactcccacgcaccaccgacgagctcaactacctcagatctccgaccgatcctcatcactcgctcgatcacccaccccagatcccatcccagatcccgccgaactcctcgaattcaacaggcccctatcctcatcctccgacagtccccgctcgccgcagtcccagcgagcaaccaccgatcgtccctcccaaggctgccgccgttctcgccacacgcacgcattgcatcgacccccgcgacatcccgactcttaa

SEQ ID NO: 130926 - DNA, 336 bp, Homo sapiens
atggccactttgtgcagggactccatgagcaaggcctgtgtggctgagtggcatcgtccatcaagccatctcacccacctggttacagggagccccatccccttaaagaccctctggaagattgacgcaggctggtgtccagtgaagaaatgcgtgcgagcgggcttggaggagctcaccgctgctgtcatggttcgtttgctaaactgcatcgtcgctgtgtctcagaacatgggcatcggcaagaacggggacctgccctggccgccgctcaggaatgaatttaggtcttaccagaaatcatcaattgaggtacggagaaatggaactgagaag

SEQ ID NO: 130927 - DNA, 1043 bp, Homo sapiens
gggggcggggcggccacaatttcgcgccaaacttgaccgcgcgttctgctgtaacgagcgggctcggaggtcctcccgctgctgtcatggttggttcgctaaactgcatcgtcgctgtgtcccagaacatgggcatcggcaagaacggggacctgccctggccaccgctcaggaatgaattcagatatttccagagaatgaccacaacctcttcagtagaaggtaaacagaatctggtgattatggggtaagaagacctgggttctccattcctgaggaaggaatcgaccttttaaagggtaggaatttaatttagttctcagcagagaacttcaagggaaccttccacaaggagctcattttctttccagaagtctagatgatgccttaaaacttactgaacaaccagaattagcaaataaagtaggcatggtctggcatagttggtggtagttctattttataaggaatccatgaatcactcaagcagtcttaaactatttgtcacaaggatcatacaggactttgaaagtgacacgttttttccagaaattgatttggagaaatataaatttctgccagaatacccaggtgttttctttgatgtccaggaggagaaaggcattaagtacaaatttgaagtacatgagaagaatgattaatatgaaggtgttttctggtttaagttgttccccctccctctgaaaaaagtaggtatttttaaattagaaaaaaaatacttatgttgactttaaatctacggataattatttctaagcaatgtgttcttattccccagtaacctacactatatctgataccatttatgaaacattcttgctgtaactaagtgcctccccaagaccctgactgagtccccagcatgtgctacagtgagctgccattccacaaccttcacatgtggcactcttgccagtccttgacattttcgggcttttcaaatgtcggtagtgtttattaaagatgaagatgcacatacccttccactgagcagtttcactagtgggaaataccaaaaactt

SEQ ID NO: 130928 - DNA, 791 bp, Homo sapiens
atgaatgaagttctgatgcacactacaacagggatgagccttgaaaacatgctcagtaaatcagccagacgccaaagacaatatcgcgggatcctctgggcacctccgcacgctgtcgccagtggtatcaagatcctgtctcaaagaagaagaaaggagaaggagaaggaggatgaagagaaggcagaggagcaggaggaggaggagcaggagaaggaggatgaggagaaggcggagaagcaggagcaggaggaggaggatgaagaggaggaagaggagaaggaggatgaagaggagaagcagcttcatcctgatgtacttcttcatgcttctcttatccgggatcccgctcttatacatggaggtgatcatggggcagtggctgcatgtggacaacatccgggtctggaagcagctagtcccctggctgtgcagcatgagctatgctcacagtctgtgtgcgcctcggtgagcttgtacaacagcaccatcatctcctggaatttcttctactcctttgctcaccccctgccctgggaccactgcccactggtgaagaacatcagtgtcactgactgggcccaccagtacttcttgtaccacactaccctccatgcctcggaccacagtgaagaagcggctgaagccctcgtcccgaaccgcagcctgggttgtcttctcggtcgtgatcacagggatttggatttcaagccggaaatcagaagaggagcccacacgggaggagctagagtttgacaggatagtgtcattaatggggaagggcctgtcgg

SEQ ID NO: 130929 - DNA, 1833 bp, Homo sapiens
atggggaccatcatcaccttcacctcctacaaggccggaggtgacgattatgtcaaggtggctgccattgcagccctggtcaacctgataacctcaacgcggacaacatccctcgtctttctagtgcagggattctgggccaccaccaatggccacgcctgtgttgagaaattttctcaggatttaccgggcctgaaagaagagccacagagtcccttgaggaattatctgacagagaaagagtcttctaagaaattccagacccccaactccctgtcctggaggctcaagaccaaggagatccaggccaccaagacccaaaactacttcgttcaacctaaaaacactgagagcatcttgatccagattgccttctctgtcgggctgggcagcgtgtggcgttctccttacctgtgtcaccggaacggaggaggcagcttcatcctgatgtacttcttcatgcttctcttattcgggatcccgctcttatacatggaggtgatcatggggcagtggctgcatgtggacaacatccgggtctggaagcagcttgtcccctggctgtgcagcatgagctatgctcacagtctggtctctgcccaccgtgtccagccccaggtgtgcgcctcggtgagcttgtacaacagcaccatcatctcctggaatttcttctactcctttgctcaccccctgccctgggaccactgcccactggtgaagaacatcagtgtcactggtgaggagaggggccagcagggccaagggaggcagggacaccaaggggaggaagtgaacagaagtaggcaccgagcaagacgtgggcccaccagtacttcttgtaccacactaccctccatgcctcggaccacagtgaagaagcggctgaagccctcgtcccgaaccgcagcctgggttgtcttctcggtcgtgatcacagggatttggatttcaacgccggggtccgaggaagattctgtactctcctcagacaagctaagtcggccaggtctctctacagagaactgctgtcccattgacagcgtgaagaaatgcctcactatcaaccagatccccacatcgctgcaggcagacacctgttcaagtgattcctatgaagggactcaagatagacgccagtgtgccacaccattggtagtgtgcctactaaatagaaaaacacgtcctaaaactaacatgaaatctcaagggaccctgaacagccaaaataatcttgaaaaagaagaaaaacgctggtctcctcaggaagatgaaccctcccttgcagaagcgggagctgccccagagagtctgtgtgagatgaagacagaggcccagccttcgacatccttgctggcaaacacctcatggactggcacagtgatttctgacagtgtcccaggaagtcaaacgtgggaagacaagggttcattgacccggtctgcaacatcttggacctcagaggcccaagtttcagcagcccgggttgcagaggctcaggccaggaccagtcagcccaagcaaatttctgtattggaggcgttaactgcctcagccctgaaccagaaacccacgcatgagaaggtgcagatgacagagaagaaagagagtgaggtcctccttgcccgtccgttctggtccagcaaaactgagtatattctggctcaggtgggcttctctatgaagccatcttgtctctggcgctttgcctacctgtggcttaacagtggaggctgtaagtctggggaccaggaaacctgggtccacaaggggcaatcaggacagagtcctgtccaggctttaaccatgaatgtttctgagatatgtagagactaa

SEQ ID NO: 130930 - DNA, 1144 bp, Homo sapiens
aatcctttacctccacctccaaggtccccaagagccttatcacattacaggatctgctcaaagtccagaatctcattatctaaattgggtccaggtgtggaagaagtgccttagatataatttaaatgagaaacagatttggataaaaggtgatcagtgttttcttcagttggaagatgtgaaaagaaaccttttctctttcagccttgccttacacccagacaaaactctcgttgcaactggccaagtcgggaaggagccgtatatatgcatatgggattcctataatgtccagactgtgtctcttcttaaagatgtccatacacatggagttgcctgcctggcttttgactcagatggacagataagcagaaaagaagagaaagaatttgccttaaaaacctgtgccaaaggaagtaccgagggatattcaggcaaacagcaaatgatccctgatggaaggccagaaattcaggaaggaataaaggtgaacaaaactggagccaaatttagaaagtatgtgggccattctgcacatgtcacaaatgtccgctggtcccatgactttcagtgggtgttgagcacaggaggggctgatcactcagttttccagtggaggtttattccagaaggtgtcagcaacggcatgctggaaactgcaccccaagaacaatggttggcagctggcccactgatcaaggatggctctgcttgtgcccagtctcccaaccagaatgtggttcctacagaatggaaccagcctcaaaacctagcagagtttctggtagatttcaaaggactgggagaaaacagcctagacggcatatccttcaggccatccttaaatagtgttgtttgcagcaaaactttgccaacagttgagcaacagggaaatgagctggatattgtacttcctgtttatacctggatgccagctgctttatgtatctgtgaaatacaaaaatgtgcatctaagtcaactaatccaggattggactcttgtcttctcacggaggctcatgatgctggtgtgcatacgtttctgaatactaggcacagagtttggcatagggaagttgtggaatttggtgtctacctcaatgtagggacaaggagatcgaaggccttaagttctctgccatag

SEQ ID NO: 130931 - DNA, 438 bp, Homo sapiens
atggtggcagagggtggaagatgctgtgccttttcccctgatgggaaagccttagcggttggcttgaacgatgggagtttcctggtggtaaatgctgacactgttgaagacatggtctctttccatcacagaaaagaaatgatctctgatattaagttttcaaaagatacgggaaaataccttgccgtggcatcccatgataactttgtggatatttacaacgtacttacaagcaaaagggttggcatctgtaaaggtgcttctagttatattacacacattgactgggactctagagcatgctgcagcctcatgacaaacggtgcttctgattctggtgacattgacaatccttcaccagatgctaggacagaagaaaaacaaggggcaaggcaccagcctgagaaaagctgcttttctattgctgaagtgctttga

SEQ ID NO: 130932 - DNA, 966 bp, Homo sapiens
atgtttgctgaaagcaatggcaacaattcctgtcacctgtttcttgaacaagggaagtactttggcacagagcagggccctgccacgttttggacactgtgtggaaatgccctgactgcaaaaagagggatatttggcaaaacaggggatcttcagaccatcctttgccttgcatgtgccaaagaagacatcacctactctggtgctttaaatggtgacatctatgtctggaaagggctcaatttagtccgcaccattcaaggagcacatagtgtaagtattaccttgtggaaatctgtgggtgacctaccaaataaggctggaatctttagcatgtatgcttgtgaagaaggctttgccactggtgggcgagatgggtgtatacgactgtgggacactgatttcaaaccaataaccaaaattgatctcagggagacagaacaaggatacaaaggtgtggtactgatcacatcagccccacagccaactcccatctacagagttaggacagtcagcgacgccctccgttatacatcagtctcagattcccgccccatccttaccaagatcaaagcacatctggctggcctctctatccggagcgtgtgctggaaagcagaccgccttctagcagggacccaggacagtgagatatttgaagtgattgtgcgagagcgagacaagccgatgttgatcctacagggccactgcgagggtgagctctgggctctggccctgcaccccaagaagcctctggctgtgacaggcagcgatgaccgctctgtcaggctgtggagcctggctgatcatgccttgatcgcccgctgtaacatggaagaggcggttcgcagtgtagctttcagccccgacggatctcagctggccctgggcatgaaggacggctctttcattgttctccgagtcaggcacattgctgccccagcccccactggggatgttacatga

SEQ ID NO: 130933 - DNA, 1092 bp, Homo sapiens
ttttggacactgtgtggaaatgccctgactgcaaaaagagggatatttggcaaaacaggggatcttcagaccatcctttgccttgcatgtgccaaagaagacatcacctactctggtgctttaaatggtgacatctatgtctggaaagggctcaatttagtccgcaccattcaaggagcacatagtgtaagtattaccttgtggaaatctgtgggtgacctaccaaataaggctggaatctttagcatgtatgcttgtgaagaaggctttgccactggtgggcgagatgggtgtatacgactgtgggacactgatttcaaaccaataaccaaaattgatctcagggagacagaacaaggatacaaaggtgtggtactgatcacatcagccccacagccaactcccatctacagagttaggacagtcagcgacgccctccgttatacatcagtctcagattcccgccccatccttaccaagatcaaagcacatctggctggtgggggcttcacttctaaaagaggaacttttggaagcgttggaaaattggaaacaatgatgtgtgtttcttacggacgaatggaagatctagtgttctcaggagcagctactggagatatttttatttggaaagacattctactactgaagacagtgaaagctcatgatgggcctgtgtttgctatgtatgcactggataagggctttgtaacaggtggaaaggacggcatcgtggagctctgggatgatatgtttgaaagatgtttgaagacttatgccattaaaagatcagcattgtcgactagctcaaaaggcttgcttttggaagataacccttcaattcgtgccatcactttgggacatggacatatcctggtgggaacaaaaaatggagagattctggaaattgataagagtggcccaatgacactgcttgttcagccagccaagtgtgtttgtgataagatacagatacatggaattggtccagtgcttattaagcacctttcagtttttgatgttcattgttggcacatggacagaccaatttgtgaacagacgcagaacctgggctacaccgaggacgcttga

SEQ ID NO: 130934 - DNA, 1656 bp, Homo sapiens
atgggtgatttgctctctaccgccatctgctggctctctgtaccaagcataggcccaagctccacgtttctcatcacaagtggcacagggtatggtgtccaaatgtggacacctcatctgtgtggtgaaacgccttcagttcacagtgtcaaaagcctctctatccggagcgtgtgctggaaagcagaccgccttctagcagggacccaggacagtgagatatttgaagtgattgtgcgagagcgagacaagccgatgttgatcctacagggccactgcgagggtgagctctgggctctggccctgcaccccaagaagcctctggctgtgacaggcagcgatgaccgctctgtcagagatatgacagaagtagttcacatcaaagatcgaaaagaagtcattcatgaaatgaaattttctccagatggttcttaccttgcagtgggatccaatgatggcccagtagatgtctatgctgttgcccagaggtataagaaaattggagaatgcagcaagtcccttagtttcatcacgcatattgactggtccttggatagtaaatacttacaaactaatgacggtgcaggagaacgattgttctacagaatgccatctgggaagcctttaacaagtaaagaagaaattaaagggattccttgggcctcctggacatgcgtgaaaggccctgaagtgagtggaatttggcccaaatacactgaggttactgacatcaactcagtggatgcgaattacaacagctcagtgctggtgtctggagatgattttggactggttaaattgtttaaatttccttgtctcaagagaggagccaaatttagaaagtatgtgggccattctgcacatgtcacaaatgtccgctggtcccatgactttcagtgggtgttgagcacaggaggggctgatcactcagttttccagtggaggtttattccagaaggtgtcagcaacggcatgctggaaactgcaccccaagataatttaaatgagaaacagatttggataaaaggtgatcagtgttttcttcagttggaagatgtgaaaagaaaccttttctctttcagccttgccttacacccagacaaaactctcgttgcaactggccaagtcgggaaggagccgtatatatgcatatgggattcctataatgtccagactgtgtctcttcttaaagatgtccatacacatggagttgcctgcctggcttttgactcagatggacagaggcgagcagggacccaggacagtgagatatttgaagtgattgtgcgagagcgagacaagccgatgttgatcctacagggccactgcgagggtgagctctgggctctggccctgcaccccaagaagcctctggctgtgacaggcagcgatgaccgctctgtcaggctgtggagcctggctgatcatgccttgatcgcccgctgtaacatggaagaggcggttcgcagtgtagctttcagccccgacggatctcagctggccctgggcatgaaggacggctctttcattgttctccgagtcaggcacagtgttagctcctgtgtgtgtgaaatacagctggtcacctctccctgtggtgctgactctccactcacggaccgggcaccatctgagatgtttgacagaacattctga

SEQ ID NO: 130935 - DNA, 2271 bp, Homo sapiens
atgcaaaggaggaatggaacgggtgcaccaggtggaacatggagagcctctgagtctcccattggagtagggttttggacactgtgtggaaatgccctgactgcaaaaagagggatatttggcaaaacaggggatcttcagaccatcctttgccttgcatgtgccaaagaagacatcacctactctggtgctttaaatggtgacatctatgtctggaaagggctcaatttagtccgcaccattcaaggagcacatagtgtaagtattaccttgtggaaatctgtgggtgacctaccaaataaggctggaatctttagcatgtatgcttgtgaagaaggctttgccactggtgggcgagatgggtgtatacgactgtgggacactgatttcaaaccaataaccaaaattgatctcagggagacagaacaaggatacaaaggtgtggtactgatcacatcagccccacagccaactcccatctacagagttaggacagtcagcgacgccctccgttatacatcagtctcagattcccgccccatccttaccaagatcaaagcacatctggctggcctctctatccggagcgtgtgctggaaagcagaccgccttctagcagggacccaggacagtgagatatttgaagtgattgtgcgagagcgagacaagccgatgttgatcctacagggccactgcgagggtgagctctgggctctggccctgcaccccaagaagcctctggctgtgacaggcagcgatgaccgctctgtcagccttgccttacacccagacaaaactctcgttgcaactggccaagtcgggaaggagccgtatatatgcatatgggattcctataatgtccagactgtgtctcttcttaaagatgtccatacacatggagttgcctgcctggcttttgactcagatggacagcgtttagcctctgtggggttggatgccaaaaacacagtctgcatttgggactggaggaagggaaaacttctggcgtcagccaccggccattctgacaggggtcacaaaaatgatggcacagatggagatgaccatcctgtctaccttagcctattaaaggttttgataggatcaaataacttagcatatgcaaatagcccttataacctgagggggggctatatcaagggcagtgggggcttcacttctaaaagaggaacttttggaagcgttggaaaattggaaacaatgatgtgtgtttcttacggacgaatggaagatctagtgttctcaggagcagctactggagatatttttatttggaaagacattctactactgaagacagtgaaagctcatgatgggcctgtgtttgctatgtatgcactggataagggctttgtaacaggtggaaaggacggcatcgtggagctctgggatgatatgtttgaaagatgtttgaagacttatgccattaaaagatcagcattgtcgactagctcaaaaggcttgcttttggaagataacccttcaattcgtgccatcactttgggacatggacatatcctggtgggaacaaaaaatggagagattctggaaattgataagagtggcccaatgacactgcttgttcaggggcacatggaaggagaagtgtgggggttggcagctcaccctctcctgcccatctgtgcaacagtgagcgatgataaaacacttcgcatctgggaactatctgcccagcaccgtatgctggcagtacggaaactcaaaaaaggtggaagatgctgtgccttttcccctgatgggaaagccttagcggttggcttgaacgatgggagtttcctggtggtaaatgctgacactgttgaagacatggtctctttccatcacagaaaagaaatgatctctgatattaagttttcaaaagatacgggaaaataccttgccgtggcatcccatgataactttgtggatatttacaacgtacttacaagcaaaagggttggcatctgtaaaggtgcttctagttatattacacacattgactgggactctagagctccacctcttggagaaccgcccaaaaaggctcaagcaaatttcctcctccagcagagttctcttggctctagcctgcaggctaacatcacagttatagtgtttacccagagccatggagagaagaacaaaagggataccggtgtggctttgtttaagaatccactgactggaactagaagtggggacaaactgatcaacttcagggtttacattgctggtgaactccaacaatga

SEQ ID NO: 130936 - DNA, 618 bp, Homo sapiens
gaggaaggggctggccagaacggttccatagttggctcccagtttttcttggtgaggaagagttgatcagactaagaagtcatcttctctgattcagatatgatcactcacttccttagtcaacctgcttgttctcacctggaaccatttggttcttcccttgagtcagagatcgaggagcaaaagggaggaaactgctagagactgagatcaacgcatactctgacaacagcttatttggcaaggaagcctcctggactcagcaccgcagcccctttgctgaagcaacctgaacattgagagtgcttgtgttttctagctgcggttggatttctcacgatgtccagggttatctccatgtctgcccctttcttcctggggaagatcattgatgtcatctataccaaccccactgtggactacagcgacaacctgacccgcctctgcctagggctcagtgccgtgtttctgtgtggtgctgccgccaatgccattcgtgtctacctcatgcaaacttcaggtaacagtctctcctctcagggatgtgagtcatcctgaagaagatgtagagtcctgtgggtttgttcgggctcaaatctcatgtgctccaggattgaa

SEQ ID NO: 130937 - DNA, 633 bp, Homo sapiens
atgaggcaacgagccccgagagacacccttgcagataatcactcattctggagaaatgaaggtacaagaggccatgcaggcagaggcaatccccacgttccagcagcttctgcaacagcacttttggctctaggcacttacagaatgatgcgaaccgctcagcttgagctcgtctcacacgtgagaggcctggtgcaagccaagccctggcaggaagctgcggttggatttctcacgatgtccagtgttatctccatgtctgcccctttcttcctggggaagatcattgatgtcatctataccaaccccactgtggactacagcgacaacctgacccgcctctgcctaaggctcagtgccgtgtttctgtgtggtgctgccgccattgccattcgtgttacctcaggcaacttcagttacagctctctcttagggatgtgggcagaaacagcggattgcgattgcccgtgctctgctaaagtgacttttagtaaatttgcggagttggttgcacacaaagtccagtttcagaacatttctgtcaccctaaaaagatctcttgtgcccacttgcagtcagtcgttccttgtttccggccccaggatgccacgaatctactttctgtctgtctag

SEQ ID NO: 130938 - DNA, 860 bp, Homo sapiens
tgtgacacttcattggaattccaggaacagagcatcatctatttgccacacacctttgctagcaaagaggagcaccttgattgatagtctcacccaaactgactccaatgacagcactgcagctcttcacagaaaagtctgggagctgttatcagaagtaggaatggaggctggagttatgtgatacgatctatgtgaattttttaaatgcccattaaatatacaatcattactataaaaatactcatttgcacctaaaatcatctcacttaccagcactggaccctggggcttagaagactttcttttttggtagcatatattgtttaaaaatgacaggatcaatcagcaacactctccaacgcaggcaccagaaacttaactcttcagctctaactttgttttcaaccacttcattttctttcctaagaagaatggactttcagagagatgaaggtagcatagtgtggatatttgtcccttccaaatctcatgataggaggtgtttgggtcatgggggcggaaccttcatgaataacttggtgctgtccttgccacatgtcattaatcaaacagagcctctttcatattatttacttggctgttcctcaaatctcttcagacaaccaaaacaatctagaaagtacagtgtagcttttaagaacacagattttgatgtccaattagatcttggttcaacttccagttttaaacttcctagtggacttagcatgttaggggccagtcaaggggaggagaaggaggaagaggaggaggaggaggaagaggaggaggacaaagaggaggaggaggaggaggtgaaagaacattctaagagctccagagagaatggaatgtaa

SEQ ID NO: 130939 - DNA, 2280 bp, Homo sapiens
atggggctcccagcgctcgagttcagcgactgctgcctcgatagtccgcacttccgagagacgctcaagtcgcacgaagcagagctggacaagaccaacaaattcatcaaggagctcatcaaggacgggaagtcactcataagcgcgctcaagaatttgtcttcagcgaagcggaagtttgcagattccttaaatgaatttaaatttcagtgcataggagatgcagaaacagatgatgagatgtgtatagcaaggtctttgcaggagtttgccactgtcctcaggaatcttgaagatgaacggatacggatgattgagaatgccagcgaggtgctcatcactcccttggagaagtttcgaaaggaacagatcggggctgccaaggaagccaaaaagaagtatgacaaagagacagaaaagtattgtggcatcttagaaaaacacttgaatttgtcttccaaaaagaaagaatctcagcttcaggaggcagacagccaagtggacctggtccggcagcatttctatgaagtatccctggaatatgtcttcaaggtgcaggaagtccaagagagaaagatgtttgagtttgtggagcctctgctggccttcctgcaaggactcttcactttctatcaccatggttacgaactggccaaggatttcggggacttcaagacacagttaaccattagcatacagaacacaagaaatcgctttgaaggcactagatcagaagtggaatcactgatgaaaaagatgaaggagaatccccttgagcacaagaccatcagtccctacaccatggagggatacctctacgtgcaggagaaacgtcactttggaacttcttgggtgaagcactactgtacatatcaacgggattccaaacaaatcaccatggtaccatttgaccaaaagtcaggaggaaaagggggagaagatgaatcagttatcctcaaatcctgcacacggcggaaaacagactccattgagaagaggttttgctttgatgtggaagcagtagacaggccaggggttatcaccatgcaagctttgtcggaaggggaccggaggctctggatggaagccatggatggccgggaacctgtctacaactcgaacaaagacagccagagtgaagggactgcgcagttggacagcattggcttcagcataatcaggaaatgcatccatgctgtggaaaccagagggatcaacgagcaagggctgtatcgaattgtgggggtcaactccagagtgcagaagttgctgagtgtcctgatggaccccaagactgcttctgagacagaaacagatatctgtgctgaatgggagataaagaccatcactagtgctctgaagacctacctaagaatgcttccaggaccactcatgatgtaccagtttcaaagaagtttcatcaaagcagcaaaactggagaaccaggagtctcgggtctctgaaatccacagccttgttcatcggctcccagagaaaaatcggcagatgttacagctgctcatgaaccacttggcaaatgttgctaacaaccacaagcagaatttgatgacggtggcaaaccttggtgtggtgtttggacccactctgctgaggcctcaggaagaaacagtagcagccatcatggacatcaaatttcagaacattgtcattgagatcctaatagaaaaccacgaaaagatatttaacaccgtgcccgatatgcctctcaccaatgcccagctgcacctgtctcggaagaagagcagtgactccaagcccccgtcctgcagcgagaggcccctgacgctcttccacaccgttcagtcaacagagaaacaggaacaaaggaacagcatcatcaactccagtttggaatctgtctcatcaaatccaaacagcatccttaattccagcagcagcttacagcccaacatgaactccagtgacccagacctggctgtggtcaaacccacccggcccaactcactccccccgaatccaagcccaacttcacccctctcgccatcttggcccatgttctcggcaccatccagccctatgcccacctcatccacgtccagcgactcatcccccgtcagcacaccgttccggaaggcaaaagccttgtatgcctgcaaagctgaacatgactcagaactttcgttcacagcaggcacggtcttcgataatgttcacccatctcaggagcctggctggttggaggggactctgaacggaaagactggcctcatccctgaaaattacgtggagttcctctaa

SEQ ID NO: 130940 - DNA, 2447 bp, Homo sapiens
atggggctcccagcgctcgagttcagcgactgctgcctcgatagtccgcacttccgagagacgctcaagtcgcacgaagcagagctggacaagaccaacaaattcatcaaggagctcaatcacaggacgggaagtcactcataagcgcgctcaagaatttgtcttcagcgaagcggaagtttgcagattccttaaatgaatttaaatttcagtgcataggagatgcagaaacagatgatgagatgtgtatagcaaggtctttgcaggagtttgccactgtcctcaggaatcttgaagatgaacggatacggatgattgagaatgccagcgaggtgctcatcactcccttggagaagtttcgaaaggaacagatcggggctgccaaggaagccaaaaagaaatatgacaaagagacagaaaagtattgtggcatcttagaaaaacacttgaatttgtcttccaaaaagaaagaatctcagcttcaggaggcagacagccaagtggacctggtccggcagcatttctatgaagtatccctggaatatgtcttcaaggtgcaggaagtccaagagagaaagatgtttgagtttgtggagcctctgctggccttcctgcaaggactcttcactttctatcaccatggttacgaactggccaaggatttcggggacttcaagacacagttaaccattagcatacagaacacaagaaatcgctttgaaggcactagatcagaagtggaatcactgatgaaaaagatgaaggagaatccccttgagcacaagaccatcagtccctacaccatggagggatacctctacgtgcaggagaaacgtcactttggaacttcttgggtgaagcactactgtacatatcaacgggattccaaacaaatcaccatggtaccatttgaccaaaagtcaggaggaaaagggggagaagatgaatcagttatcctcaaatcctgcacacggcggaaaacagactccattgagaagaggttttgctttgatgtggaagcagtagacaggccaggggttatcaccatgcaagctttgtcggaagaggaccggaggctctggatggaagccatggatggccgggaacctgtctacaactcgaacaaagacagccagagtgaagggactgcgcagttggacagcattggcttcagcataatcaggaaatgcatccatgctgtggaaaccagagggatcaacgagcaagggctgtatcgaattgtgggggtcaactccagagtgcagaagttgctgagtgtcctgatggaccccaagactgcttctgagacagaaacagatatctgtgctgaatgggagataaagaccatcactagtgctctgaagacctacctaagaatgcttccaggaccactcatgatgtaccagtttcaaagaagtttcatcaaagcagcaaaactggagaaccaggagtctcgggtctctgaaatccacagccttgttcatcggctcccagagaaaaatcggcagatgttacagctgctcatgaaccacttggcaaatgttgctaacaaccacaagcagaatttgatgacggtggcaaaccttggtgtggtgtttggacccactctgctgaggcctcaggaagaaacagtagcagccatcatggacatcaaatttcagaacattgtcattgagatcctaatagaaaaccacgaaaagatatttaacaccgtgcccgatatgcctctcaccaatgcccagctgcacctgtctcggaagaagagcagtgactccaagcccccgtcctgcagcgagaggcccctgacgctcttccacaccgttcagtcaacagagaaacaggaacaaaggaacagcatcatcaactccagtttggaatctgtctcatcaaatccaaacagcatccttaattccagcagcagcttacagcccaacatgaactccagtgacccagacctggctgtggtcaaacccacccggcccaactcactccccccgaatccaagcccaacttcacccctctcgccatcttggcccatgttctcggcgccatccagccctatgcccacctcatccacgtccagcgactcatcccccgtcaggtctgttgcagggtttgtttggttttctgttgctgccgttgttctctcattggctcggtcctctcttcatgcagtgttcagcctcctcgtcaactttgttccctgccatccaaacctgcacttgctttttgacaggccagaagaagcggtacatgaagactccagcacaccgttccggaaggcaaaagccttgtatgcctgcaaagctgaacatgactcagaactttcgttcacagcaggcacggtcttcgataatgttcacccatctcaggagcctggctggttggaggggactctgaacggaaagactggcctcatccctgagaattacgtggagttcctctaa

SEQ ID NO: 130941 - DNA, 1608 bp, Homo sapiens
tcaaccctgagatcttccctgatgttcactccaccagcaatgttgcacttccccacctccggtgtccagatgggccaaacctccaaatgccatctcatccatggagtcccccaggcccacgccagtccacctgcagcactgcccaccacccatacaaccaggtgctgcttctctcccttgagcctcttcgtggcactctatttgtgcacctgggccacaccaaaagacattccccaactgctgacaagccaagagctgagcttggggaggaagtagaggaggtctctgtggggactcagagcttagtcttctgtcccacagactacatacccgataactccacactcctctcttttcaagaacaatttcaagaaacatgcccttcagaacacaaaaaaattcttgaaatgttggtggaggatctgcagcagttggctgagctatgcgtctgccactgccttcagatagggagagagctccgtatctggttctcctgtgctgtggagagggaggtccccaccatcctgtttccttaaaaagaggctgaggtgggttactgtttatcaccacgtgtgttgcttcactcttcaccatcacctgccttggttctgtgttcttcaccagattgagaatgccagcgaggtgctcatcactcccttggagaagtttcgaaaggaacagatcggggctgccaaggtgagaattttgcaagctttggtctggattttagggtgagaggtctgaaaaccgcactgccaagggcagctgccaggaggatcagggagtggctggtcatcacaacggggcctttgtgaggcttctgcacaggggcacccattgaaccaggcagggcctgttagcttatgaccagcaggtgacctgatttccttgtccctggcacagagcacaccctgccacagtgcaagcctgagaagcagtgaggccccatgaagctgaaggacaggccgatcccccgatagacgattaggtaagactgctggtatggagtcagtattgggcttcaagccaatgaggaaagaggtgtggcctttgccagatggcggggggatgctggggccccagttccttcccagctgtggctcgctggcaatgctgaggagcctggggtcagcaggcagctggattggagagagctctccacgtaagccagctccgggctcctgtcctgtttctgtgtctgccttggggcaatcttcaatttcctgagcccttgctttccatttcctgagatgcctggacttcactctcgcattgcttctgttatcctccagcctctgtgccccatggccagtgacttgcccgcctgctccagcccgaatccgagccacgcatggcgagtcgctggtcctgggggccgaagagcctcgatgtgccaagcatgaaaaacctgggactagggctgcagttcaccaccgcctgccctgcacctcccactggccaaacagcgatcttccaagatagggtcctcagatcagcaccctcatacatcctccttggcccgaaaggcctctccaccctgaccaacacaaccaaccgactgccacctggccctccaggaactctttcaaggtgtggcttcacgcacat

SEQ ID NO: 130942 - DNA, 319 bp, Homo sapiens; identical to SEQ ID NO: 14502

SEQ ID NO: 130943 - DNA, 591 bp, Homo sapiens
atgacgtttaggtgcagacagctggccctgggtggccctgtgctgatcaccggcctcggcccctcaaacagtgggaaatggaagaatggcttggaaatgggtcctgtcgactgtgtgtcatctgagcacattctcccaggggcccaagaagggccatcgtgtctccagaaccagaactggaagccaaggaccagcaggcagcattaccgcatccacatggggcttttgctggacacaaaaggttctccccgaagaatgatgctcacccaggccagcgcacacagcacagtgacccgtgcacaggatgcactgagcacacacggcactgggtgtccaagcctactcacaccaatcatggaaggagcctttgtcactgccagaagatatagagccttggtgttaagggaaaacctgaggggagatgattggattatggggacgggttctcctcatgctgttcttgtgataccccaagcaggagcactaccgaacaaatctgataccttgatttttctgtcctcaagacactggttcttcaaggtcctaggggataaagtagcaggatctgaaggccccaagtataatgagtga

SEQ ID NO: 130944 - DNA, 306 bp, Homo sapiens; identical to SEQ ID NO: 117180

SEQ ID NO: 130945 - DNA, 756 bp, Homo sapiens; identical to SEQ ID NO: 117156

SEQ ID NO: 130946 - DNA, 576 bp, Homo sapiens; identical to SEQ ID NO: 115923

SEQ ID NO: 130947 - DNA, 435 bp, Homo sapiens
atgacctcaggtcctcagactgaccagcccaagaaacatctcaccaatttcaaatctgagacaaaagagacacattttatccgtggacccaaaactccggcgccagtcacggactgggaaggcagccttcccttggtgtttaatcattggagggacgcctctctgattatacacccacgtttcaagggtgtcagaccacgcagggacgcctgccttggtccttcacccttagcggcaagtcccgcttttctggggaaggggcaagagcttgctacaagtgccagaaatctgaccaccaaggcaaggaacgcctgcagcccaggattcctcttaagccgtatcccatctgtgcgggaccccactggaaatcggactgttcaactcacctggcagccactcccagagcccctggaactctggcccaaggctctctga

SEQ ID NO: 130948 - DNA, 996 bp, Homo sapiens
atgggtactcccttttcttgccacaactggtatcgcactgggtcatgcacatcccaagtccactggctccaagatcagtgcagcatgagtgtttgtccaaaaactccagttattgtggcctatcactcaaatttgttctggaccagtgggcaccttaatcagctggtgggaaacactgagttccagtgcaaagacccacactcacttcactctcccttcctgagcatactgattctctttccatgctgctctgcctcgggttggtggaggggtggtgtagaaaatagaacaggcggttttgttgtcgtcaccaaaagttgtggttttcaagaacactatggggctccacgaccccattttggggccatgtggaaaccaagctccacaaacagaggaggaaaaagcagaagaaggggcgagcaccacactggcatggctgagaaggagagaaaagaaggagcatctgaacaaggagtttggctggggacagaaatagagaagattggctgttggatgaccgtacttcagcctgtttggtggtctcttcacatggacgcgcatgaaatttggtgccgtgacttggatcaggggacctcccttgggagatcagtcccctcctcctgctctttgctccatgagaaagatccacctatgacctcaggtcctcagactgaccagcccaagaaacatctcaccaatttcaaatctgagataaaggagacatgttttatccgtggacccaaaactctggcgccagtcatggactgggaaggcagcctttccttggtgtttaatcattgcaaggacgcctttctgattattcatccacgtttcaaaggtgagactcagcaaattgccagcagtggtgaatatgtggtgaaaccccttctgcttgagaaaagcagagagaaaagtagaggagactttgtcttgcaccttagataccagcatgagtacagggcggtagagcaccaagtgggctcctggggtcaatga

SEQ ID NO: 130949 - DNA, 632 bp, Homo sapiens
ctagaatgcacacccttcattggttttctctgttgtccaaaggacctagcataggagctcttatctgagcacctgatgagaagacgacactcagaaatctcggtatcatgctcaccttcactgtcagggtcatcaaagttgacacagagggaaagattaaaatatcttccaggaaagcgggaaaggggttggggcgtggaaatgaggggttggggcacagagataagaggttgggccacagagagaggtcggggcatggaaataagggattggggcacagagatacgaggttggggtacttgcccctcccccagaaaagcgggacttgccgctaagggtgaaggaccaaggcaggcgtccctgcctggtctgacacctctgaaacgtgggtgaataaaaatcagagaggtgtccctgcaatgattaaacaccaagggaaggctgccttcccagtccgtgaccggcgccggagttttgggtccacggataaaagatgtcccctttgtcttcggaagaccagtggcaccagggggttgttgctgcaccgccagctgtgtgtctccctctcttatcattacaatcaagtgctttgagtcatctttcacattaatggagctcccaggaggattcat

SEQ ID NO: 130950 - DNA, 1944 bp, Homo sapiens
ttaagtcactggctttgtcactggggtgctcccagatgtaagtatctggggttcgtgtggctgctcagacttggagggaagatgactgtaactctgacagccattgtcagtgggtccagctgagtcccggactttcttctcactggccgcagtcaatgtgtcttgggccatgtcctcaagaagtacttgttttccttgataaggtatcagggcagaacgggaatctgaagacctgagctttggctccagttctgctaagacccgttttgttacaatgacaatccactcagctactctaagctttggtgtctgaaaagccaggatgatggagaagacattctctaagtttccttccagttctaaaattctctttctcctttcaatcttggcgccacacttcaatctctcccttctcttaatttcaattcctttcattttctggtagagacaaaggagacatgttttatccgtggacccaaaactccggtgccggtcacggactgggaaggcagccttcccttggtgtttaatcactgcagggacacctctgtgattattcacccacgtttcaaaggtgtcagaccacgcagggacgcctgccttggtccttcacccttagcggcaagtcctgcttttctggggaaggggcaagccgagctaggtcccaattcttcctcagcctctgctcctccaccctataatctttttatcgcctcccctcctcacacctggtccggcttacagtttcgttcggtgactagccctcccccacctgcccagcaatttactcttaaaaaggtggctggagccaaaggcatagtcaagcggctgaagactgacactgcccgatcgccttggaagacccctagaccatcacggacgccgagcttcagaaaagcagaacggactaaaggtcttttaaaaatacacctcaccaagctcagccaccaacttaaaaaggactggacaatacttttaccactttcccttctcagaattcaggcctgtcctcggaatgctacaagactggctactggccaattgggatatccttttatcagtcaaagctatgtcctggtcaatggatttcaaactgttgaggatctatgtgaagctgcagaccttcgagtgagtgttgcagaccttcgagtgagtgttacagctcttaaggtggcgcgtctggagttgttcgttcctcccggtgggctcgtggtctcgctggcttcagcagtgaagctgcagaccttcgcggtgttacagctcataaaagcaaaaagatgggactggggcaccttggagcagggggcggcgctcatcggggaggctcgggacgcacaggagcccacggagggggtgggaggctcaggcatggcgggctgcaggtccagagacctgccccgcgggaaggcagctaaggcccggcgagaaatcgagcgcagcgccgggctgacgatcaagaaggaaagatgcatacgaaatggatacagcaaagaaaaaatgaaactcatagttgtttctcatggcctccatgtaaatgacttgcagcataaactgacgcttttcaccaaggaaacatacacatacctagccagggattcagagaagcagaagcaggggtatctagcaggacttgaaggagcccatgccaacagggtgaaccagcagatcagtgacaacttagccatagtctttggacaaaagattcaaggccatctctccactactggacagctgcttatggcaggtcaagaaggaaagctgggccagcttcttttcctgggaatttcgggttggacaattcaactgaatgatgtttattgtctacagacacaatcaacaattgtccacataagatcagaagcagggaattccaatccacgagaatggctgccgcttttacaaggaatcagcagtaaagatgaaacacagccctttatgccttag

SEQ ID NO: 130951 - DNA, 795 bp, Homo sapiens
taaaacggccccacccttatctccctttgctgactctcttttcggactcagcccacctgcacccaggtgaaataaacaaccatgttgctcacacaaggcctgtttggtggtctcttcacacggacgtgcatgaaatttggtgccgtgactcggatcaggggacctcccctgggagatcaatcccccgtcctcctgctctttactccatgagaaagacccacctacgacctcaggtcctcagaccaaccagcccaagaaacatctcaccaatttcaaatccggtaagcggcctctttttactctcttctccaacctccctcactatcactcaacctctttctcctttcaatcttggcaccacacttcaatctctcccttctcttaatttcaattcctttcattttctggtagagacaaaggagacacgttttatccgtggatccaaaactccggcgccggtcacagactagggaaggcagccttcccttggtgtttaatcattgcagggacgcctctctgattatacacccacgtttcaagggtgtcagaccacgcagggatgcctgccttggtccttcaccctttgcagcaagtcccgcttttctggggaaggggaaacacgctttaaaaggattaaagcctgttatcactcgcctgctacagcatggccttttaaagcctataaactctccttacaattcccccattttacctgtcgtaaaaccagacaagccttacaagttagttcagaatctgcgccttatcaaccaaattgttttgcctatccaccccgtg

SEQ ID NO: 130952 - DNA, 399 bp, Homo sapiens
atgctgtttagttcaactgaatgtatccaatgtggattgcgggcctgctggattgcagtaagtactagggaagcctcgggagttactgggtcaatgctaaccctagaatctgaggccattctggttgcagtgggagaggccctggttcctggaagacaggaccagcccaatggtaatagaggaccacatagaatgtcagtgccccagttggtgcagtccagggacaagattagaaccaagcccctccaggtcacttgtgagaagtttgtgcatcaggagatgtccgtgggtcttcatttctccatctatatagatgtagatgtcgatatagatatagatacagatacagatacggatacagatacagatacagatatagatatagatatagatggatag

SEQ ID NO: 130953 - DNA, 434 bp, Homo sapiens; identical to SEQ ID NO: 120500

SEQ ID NO: 130954 - DNA, 472 bp, Homo sapiens
ctgactcccacctccacacccccatgtacttcttcttctccaacctgtccttgcctgacgactgtttcacttccaccacggtccccaaagatgattgtggacatccagtctcgcagcagagtcatctcctatgcgggctgcctgactcagatgtctctttttgccatttttggaggcatggaagaaagacatgctcctgagtgtgatggccctatgaccggtttgtagccatctgtcaccctctatgtcattcagccatcacgaacccgtgtttctgtggctttctagttttgttgtcttttttttttctcagtcttttagactcccagctgcacaacttgattgccttacaagtgacctgcttcaaggatgtggaaattcctaatttcttctgtgacccttctcaactctcccatcttgcatgttgtggcaccttcaccaataacataatcatgtatttccctgcaaaaaa

SEQ ID NO: 130955 - DNA, 1222 bp, Homo sapiens
agaattttaggtctgatcgtgctgtattttgtctagttgcctaattttgcaggtgaattcacagaggcccaaaacaggagtttagacagtaacagcacctggctgaatgtagaaacatcttcaaatatggtgcccagcagcgagcactagcctatgactcaggagagtgagaactgaatcacagagttgcccagaatcctaggtataataagtgctgagcagcttcagatgctgcaaatccattaggactactggatctcttcctaaatgttcattttaatatctcctccaccataaaacaagtaccttggtgtaaggtgagattatggagggatattccaacaagaaattggataatatgtctttggatgatgctgtttgccaaggcactgcgggcaggaaaggcaaacgaagaatgaggtacgcaggcaactggagggtgaacaagatgaagaggagctttattgagtgttacaacagcttagaggagacccacaggaggacggcggacctgctctccgtggtcatggcccagcagaggggaagcgcagctcagtgtccaagttacacagactcgcagaatctcacaggtgtcttagaatttctcttcctgggactctcagaggatccagaactgcagcccgtcctcgttgggctgttcctgtccatgtacctgatcacggtgctggggaacctgctcatcatcctggccgtcagctgtgactcccacctccacacccccatgtacttcttcctctccaacttgtccttggctgacatcggactcacctctgccaccatccctaagatgattgttgatatgcaatctcacagcagaatcatctcctatgagggctgcctgatgcagatgtctttatctattttgaagggtgcggtcacctcagtgatgtacactgtggtcatccctatgctgaaccccttcatctacagcctgagaaacagggacattaaaatctccaagatgattgtggacatccagtctcacagcagagtcatctcctatgcgggctgcctgactcaggtatctctttttgccgtttttggatgcatggaagacatgcttctgagtgtgatggcttatgaccgaaaaggtgcagtggcctcagtgatgtacacggtggttactcccatgctgaaccccttcatctacagcctaacagggaaattaaaagtgccctgcggcagctgcactgcagaatag

SEQ ID NO: 130956 - DNA, 588 bp, Homo sapiens
atggcggccctgctggcgtcctgctcctccgtcatacccagtgtggagatgcgaactcttgtgcgtggagagacaaacacaggcacatttaaggttgacaacagccagaggcggtcaatagcacgatggctgtttgcctttgacagaggaggagcactgaggcacaggaagagtgacagcccgtgcttcaaagagcatgaatatacggagtttgggaaatggatggatggctgggagaccaggaggaaaaggattccaggtcacgactggtgtgtcctcaggctggggatccaaggagtcatccggggcttcgacgtggacgtttcttacttcacgggagattacgctcctcgagtgtccattcaagcagcaaacttggaagaagcaccccagaccctgcaggatccccgaggccagcagcacctccaggactggtggacctggggcagccagggaggctttgtgggcagtggatgccgccgtgcaggatgggagaagcaggcaggccccatgggcagcatgggaattgccccaagacaggttgctgatgaagaaggccgccagtgtgatggatttttctggggctga

SEQ ID NO: 130957 - DNA, 1069 bp, Homo sapiens
gcggccgccgccgccgcccgccgccgccgcagctcccgacgccgccgcccccgccgggtgcctaagcaggcccggcgcggccccaggacttgggaccctggaggactgacgctgctggcctgggcgtccccttccgctgagccatggcgactcccgacgtgagtgtgcacatggaggaggtggtggttgtgacaactccggacactgcagtggacggcagtggtgtggagggggtgaagaccgtgttggtgacgaccaacttggcccctcacgggggcgacctgacggaagataacatggagacagaaaatgcagcggcagcagctgccgcggccttcacagcctcctcccagctcaaggaagccgtgttagtgaagatggctgaagagggggagaacctggaagctgagattgtgtaccccatcacctgtggagacagcagagccaacctcatctggaggaagtttgtgtgtcccggcatcaatgtgaaatgtgttcaggtttcaagtaatttccacagaaccctggacacacaagaagtagtgctcctggagcagaagccacagaagccacaggctgcacagaagccacaggccccacagaagccacaagctgcacagaagccacaggccccacagaagccacaggcagcacagaagccacaggccccacagaagccacaggcagcacagaagccacaggccccacggaagccacaggccccacggaagccacaggcagcacggaagccacaggccccacggaaaagcacaggccccacagacaccacaggcagcacagataccacaggccccacagggaccacaggccccacagaacccacaggctgcagagtcggccctgcagcagcctcggctgttggggttttaaggcttagcagataaaatcgttatatttaataatttattttaagaaataaaagaggccgggtgccatggcttaacacctgcaatcctgacactttgggaggccgaggcaggaggattgcttgagcccaggagttcaagagcagcctgggtaacatactgagaccccagtttcttcttaa

SEQ ID NO: 130958 - DNA, 426 bp, Homo sapiens
  misc_feature (1)...(426): n = a,t,c or g
aaaaatggaccaatcagttcatatcaggtgttagtgcttcccctggccctccaaagcacattttcttgtgattctgaaggcgcttcctccttctttagcaacgcctctgatgctgatggatacgtggctgcagaactactggccaaagatgttccagatgatgccatggagatacctataggagacaggctgtactatggggaatattataatgcacccttgaaaagagggagtgattactgcattatattacgaatcacaagtgaatggaataaggtgagaagacactcctgtgcagtttgggctcaggtgaaagattcgtcactcatgctgctgcagatggcgggtgttggactgggttccctggctgttgtgatcattctcacattcctctcttctcancggngtgatggcagatggacactg

SEQ ID NO: 130959 - DNA, 759 bp, Homo sapiens
atgaaggcctcacgggatgattccaccggcacacagtctgtcaaacatgcctggaagcagggagactcttggcggagactcttggcagagactgcgatggagaagaaaatggcagtgcaaggtgcaggctggggctccaggatatccataaaaggacaacggttggaccctatggaatcagttcgtgaggagacagtcaacttgaccacagacagcaggaccccagaagtgtgcctagccctgtacccaggcaccaactacaccgtgaacatctccacagcacctcccaggcgctcgatgccagccgtcatcggtttccagacagctgaaatagactgtggtacccctcctgaggttccagatggctatatcataggaaattatacgtctagtctgggcagccaggttcgttatgcttgcagagaaggattcttcagtgttccagaagatacagtttcaagctgcacaggcctgggcacatgggagtccccaaaattacattgccaagattcgtcactcatgctgctgcagatggcgggtgttggactgggttccctggctgttgtgatcattctcacattcctctccttctcagcggtgtggtatgtgagggtgtcatttttgagaaatgactggaatggaggggaggatgggtcagagtcacgaagaacagctggggatgaggggagtcaaagggagtgtgggtggaggttgtccttggctcagcagagcacactcagcggtgaaaggcatgactaa

SEQ ID NO: 130960 - DNA, 383 bp, Homo sapiens
cacaggctctccgttatgtctatgctggctgaacgtcggcggaagcagaagtgggctgtggatcctcagaacactgcctggagtaatgacgattccaagtttggccagcggatgctagagaagatggggtggtctaaaggaaagggtttaggggctcaggagcaaggagccacagatcatattaaagttcaagtgaaaaataaccacctgggactcggagctaccatcaataatgaagacaactggattgcccatcaggatgattttaaccagcttctggccgaactgaacacttgccatgggcaggaaaccacagattcctcggacaagaaggaaaagaaatcttttagccttgaggaaaagtccaaaatcttcaaaaaccg

SEQ ID NO: 130961 - DNA, 753 bp, Homo sapiens
atggaagctgtaatgctgctgctactactgctgatggtgatgaggatgctggtgtccacaggtcggcggaagcagaagtgggctgtggatcctcagaacactgcctggagtaatgacgattccaagtttggccagcggatgctagagaagatggggtggtctaaaggaaagcagccccttgtgaaggagcagccggcaccggccggatgtcagagcggctcctccctagtgaccactgcctatcccgtgactcagcatagtccgcgcaggcaccaaagccagaacattctcgacatgacaaaactacagagagagaggacagatgaatggtttcgaggggacaaggatgaagggtttcgggaaggacaactggaagggcaaaaggagcaggaacacaccattgaggaagacatccgaagtggtaacgcttttgacggaagggaaaatgtgagccagaaatttctgtatgttatagaagttcaaagaagacaaactctagccaagagcagtgtgaagaaaagaagacgctatattaatcacagtccagggatgccttctggcttcctggcagcaattccggcctgagattccttctctgtgcatacttcctgtcaacattgtgtgatgtcaagctgtggccatcacaaaagtactgtgaacacctgtaaatcccaactatcaaaaatcacacccaggaatccaaattagcattattatgtcaaaagaaaaacctgatttcttcactgtcaaaaa

SEQ ID NO: 130962 - DNA, 615 bp, Homo sapiens; identical to SEQ ID NO: 118681

SEQ ID NO: 130963 - DNA, 415 bp, Homo sapiens; identical to SEQ ID NO: 127214

SEQ ID NO: 130964 - DNA, 642 bp, Homo sapiens
gagagttggtgtcgctccacatcctcatcagcatttggtgttgtcagtgttctggatttcggccattttaataggtatgtgagcaaaaaacctgaacaggcacttccaaagcagaatatgttaatggccaatgagcacatgagcatatgttttgacagcaataaaaagtttactgatttctttattttaaccagtggtgaccagacaaaagacctcaacggtctctggtaacatgtgcattggggaaaggaaaatgatcagacattttgggggctactggacattggctctgagctgatgttgattccaggggacccaaatcgtcattgtggtcctccagttaaagtaggggcatacggaggccaggtaattaatggagttttagctcagatccgacttacagtgggtccctggactcatcttatggtcatttccccagtgccagaatgcataattggcatagacacacttagcagctggcagaaccctcacattggctccatgactggtagggtgaggacaccagacttgagccagtttatagactcagaaccctttgaatggagtggcagtcgggtcttcttgaggaaggacctggtacgcaatggattgaatgatgtccaggcacactggtgagggtgg

SEQ ID NO: 130965 - DNA, 1680 bp, Homo sapiens; identical to SEQ ID NO: 121654

SEQ ID NO: 130966 - DNA, 498 bp, Homo sapiens
  misc_feature (1)...(498): n = a,t,c or g
cgcgggtccnncaactggancctgggacctgctnnnnnnnnnnnnnnnnnnnnnnnnnnnnnnnnnnnnnnnnnnnnnnnnnnnnnnnnnnnnnnnnnnnnnnnnnnnnnnnnnnnnnnnnnnnnnnnnnnnnnnnnnnnnnnnnnnnnnnnnnnnnnnnnnnnnnnnnnnnnnnnnnnnnnnnnnnnnnnnnnnnnnnnnnnnnnnnnnnnnnnnnnnnnnnnnnnnnnnnnnnnnnnnnnnnnnnnnnnnnnnnnnnnnnnnnnnnnnnngaaaaatttattnnnnnnnnnnnnnnnnnnnnnnnnnnnnnnnntgcttttttaactcctcaagctgcaacattaaatgcagagtccctacttagtgggcccaagtcaataaattcagcctgatcnnnnnnnnnnnnnnnnnnnnnnnnnnnnnnnatacctcagaaaaagaatgaggaagtaaaagttaaagaagggcaaaaatgagatcaatagacagcccagt

SEQ ID NO: 130967 - DNA, 811 bp, Homo sapiens
gggacccaaaacatcactgtggtcctccagttaatgtaggggcttatggagttcaggtaattaatggatttttagctcaggtccaacttacagtgggtccagtgggttcccagaccgattctgtggtagtttccccagtgccagaatgcataattgtcatagacatacttagcagctggcagaacccccacattgactccctgactggtagcatgagggctattatggtgggaaaggccaaatggaagccattagagctgtctctacctagaaaaatagtaaatcaaaaacaatatcgcatccctggagggattgtggagattagtgccaccgtcaagagcttgaaagatgcaggggcggtgattcccaccacattcccattcaactctctcatttggtctgtgcagaagacagatagattttggaaaatgacagtgggttattgtaagcttaaccaagtggttactccaattgcaactgctataccagatgtcatttcattgcttgagcaaattagcacatctcctgatacctgggcaatatttttcctcactggaataaacactgattctggatgtgggtttgcctatcctgcacgcaatgcttctgccaagactaccatccatggactcatggaatgccttatccaacatcatggtattccatacagcattgcctctgaccaaggcactcactttatggctaaagcagtgtggcagtgggctcatgctcatggaattcactggtcttaccatattgcccatcatcctgaagcagctggattaatagaacagtggaatggccttttgaa

SEQ ID NO: 130968 - DNA, 1128 bp, Homo sapiens
atggaatttataactagacaaaagtcccggcaggcacctagaggtgaggttgagagtctgacccataaggaggtgcactacactcgaaaagaactgtttgagttttctaatttatataaacaggaatctggagaacagacatgggaacggatattaagggtgtggtataatggtggaagaaacgtagagttggatcaggctgaattaattgatttgggcccactaagaagggactctgcatttagtgttacagcttggggagttaaaaaaggttctgatagtttatttgcttggttagctgaaatatggattaaaagatggcccatcgagaccctccggccttttaccagggttactgtgcattgggaaaagagatatgatcaaacatttcagggtctactggactctggctctgagctgatgctgattccaggggacccaaaacatcattgtggtcctccagttaaagtaggagcttatggaggtcaggtaattaatggagttttagctcaggtccaacttacagtgggtccccagacttatcctgtggtcattttcccagtgccagaatgcataattggcagagacatatttagcaactggcagaaccaccacattggccctctgactggtagggggtatatcaactttgtggctttgtgttataatcttattaggagagaccttgatcgctttttgcttctgcaagatatcacactggtcgattacattgatgacattatgctgattaggtccagtgagcaagaagtagcaaacacactggacttcttgggccattgctgggggaatcaatttcatcgtgccttgagagatgggagtggcctaaaggttcatcctaagtgtggcatacattccactgttgctattgtagggcaccaaccagccccaccagagagctcagctattgtgtttaaaagtttcttggctgccctgcttcctcttggagagcaaccagtgttaatgacagcagcaccagtggagcagaaagcagtacctcaaggacaggcaatggcagcaggattggccctggtccagctgctgaggatgcagactgacctaacatccgagaacagtggaacatccctgaggatgccctggaggaactaa

SEQ ID NO: 130969 - DNA, 1194 bp, Homo sapiens
atggcatcaacgaacactggaagtcggactgtgctctgcaaaactcatcatcccacttcatcacctctaactgaagaatgctggggcccggaatccactgtccccactgtccccactgccatcaccaccacggaacccaaggtaacgctgtcagtcactagacatggaatgcaacaatatggaaatctgagtgatgccaaaccaagctactgtcagctggtgagtgaaagaagcgtaaaggattcattccacattcatgctcagatgacagagaatgaagaatatagcagtagtggtggagatggaggcagtgaagaggacttttctacaaacaccaaagctgtgaacagaaagactatctggatctttagagataaagatgttcctttcctccacatacagggaggacagttttctaatgaggttcttatgatctgcttcagggaagatgggtggcagaagctcaagtgtcccaggtcgacttcagactgctgtgctggcagcaagaatttcaagccagtggatcttagcttgctgggctccatgggagtgggatccgctgagctagaccactggggtccttggcttcagccccctttccagggtagcgaatggttctgtattgctggcattccagatgcagaaaaggccttggataaaattcaacactccttcatgctaaaaactctcaataaactaggtattgatggaatgtatctcaaaataataagagctatttatgatgaaaccaaagccaatatcatactgaatgggcaaaagctaaaagcattccctttgaaaactggcacaagacaaggatgccctctctcaccactcctattcaacagattattggaagttctggccagagcaatcaggcaagagaaagaaagaaagggtattcacatgggaagagaggaagtcaaattgtctctgtttgcagatgacatgattgtgtatttagaaaaccccattgtctcagcccaaattctccttaagctgataagcaacttcagcaacgtctcaggatacaaaatcaatgtgcaaaaatcacaaacattcctatataccactcatagacaaacagagagccaaatcgtgaatgaacttccactcacaattgctacaaagaaaataaaatacctaggaatacaatttacaagggatgtgaaggacctcttgaaggagaactaa

SEQ ID NO: 130970 - DNA, 485 bp, Homo sapiens
  misc_feature (1)...(485): n = a,t,c or g
tgggannnagacacactaggccgtcgcangtgacacccgtccggaannncnnnnnttctatttcgtccaggggatggacgagtactcaggctttcctcgaatctctgcttgagtggggcagcctcggggcctccggacgctggagaagctcacagcatctgtggccgggggtgcaactaacttttttggtgacattgaaagagatttaggtccaagagatacgagcaggggaattaggggtgggaatttgggggacagaggctgttcttcagcggaaatggcctatgcctcctggcagaggtggtccccagtggaatgggcccggtggatgtggacagcggtgaccagcagtggggactccagtctgctggtgcttcagggagactctggaaaaaggagttccgattctgaagaggcatttgagaccccggagtcaacgacccctgtcaaagctccgccagctccacccccaccaccccccgaag

SEQ ID NO: 130971 - DNA, 360 bp, Homo sapiens
atggcctatgcctcctggcagaggtggtccccagtggaatgggcccggtggatgtggacagcggtgaccagcagtggggactccagtctgctggtgcttcagggagactctggaaaaaggcaagttatctctgtgtatcttgtcagtgttgctcatgatggtgcagtgctgggggcctggagttccgattctgaagaggcatttgagaccccggagtcaacgacccctgtcaaagctccgccagctccacccccaccaccccccgaagtcatcccagaacccgaggtcagcacacagccacccccggaagaaccagccttcccgtgtgatgagaagtctgcagggccaaaccccttctag

SEQ ID NO: 130972 - DNA, 474 bp, Homo sapiens
tgcgtttgtaaaaggaaaataaattaacaacaagtgtttgtttttcaagcatgagagagggcccacacctggctcaggaatgcagcctcggcctctggctcctgaggcccctgcaacagttgttagaggcccgcttccggtctcatgctgcccctgagcgtctagggatgacaaaagctaagccctttgatattaatgagtgtttgagttccgattctgaagaggcatttgagaccccggagtcaacgacccctgtcaaagctccgccagctccacccccaccaccccccgaagtcatcccagaacccgaaggtcagcacacagccacccccggaagaaccaggacatggtccacaggcactgattgtggcagtgcacctgggggcccgagccattgagacaagggctccagattcacaggccaccagatcagggccccagtgtcctcaacaatcagtaggccttgtaagatag

SEQ ID NO: 130973 - DNA, 633 bp, Homo sapiens
  misc_feature (1)...(633): n = a,t,c or g
gcggccgctgggctcaggctgtccgctctgggctctgcggcctcggccccgctgcactccacctccgccccctcggactccctcccctctgcttctactcctcctgctccagtgcggatcgtttcgcaactgcttgccactcgtcccgtgcctggctgtttttccatttcccggccccctcttcttgagtactttaccccctgcatttggggacagggactggaaaaggggcgggtggagcgtccagtggagaagaaggaagcgaggcccgcaggaggaggaggatcggcggactgtggggaggagaccccacgccaccctttctggtaactcccctcccgccccgcccctgcgcacactccctcgcgggcgagctactttcggaccaggaaagtaagagcggccctgngtgacagcgccgcggggccagtcccgggggttagccggcgtctgctcgcttctggtccgtcgcgctcncagccagggcacagcccnggaccgagatggcttcgaccacaacctgcaccagtttcacgacgagtatcagcttttcgaggagctttgaaaaggggcattctcagtgaatgggacacngtgactcctgaagcccaagacctcatncataaaatgctt

SEQ ID NO: 130974 - DNA, 777 bp, Homo sapiens
atgaagtggttgctctcccttgctcggcccaccgggtgtcgtggcccgggaaccggcctggagaagtccctgctgcccggcgcccaaaacaggggcgtgggcttccgcgacccagggcggctgccccgggccatcctcgagttgccctgcatcttcccgctcagtcagccccagattgaggcagccttctctactggtgtgctcgtgtgtgcaaccaaaggagggagtgcgagagatccacgaagggacaggcttggagtcgctagagggagccagggcacagcccggaccgaggatggcttcgaccacaacctgcaccaggttcacggacgagtatcagcttttcgaggagcttggaaagaactgagtactgccaacaactatgccagcttggaagcagatccttcctcagtcaagatttcagatgagaccccagccgtggctgacaccttgattgcagcctgtagcattgataataaacttgcctatgaaataaatattatttacgttggtggaaatgttcttccaactgagcttggcattgttggtgcagtttggctttgtattactggcaacttgaagcaagaggaccagtgtattttcaacacgtcagtcacggatgtgttcttaaaacaagcagagcatatcaccctctcctcagaactctacagtgaattcccatctagctcagaggaagggccaaagcctttaataatggcatactccaaggctctgtataacccctcatactcacacccccgatactcacacctctga

SEQ ID NO: 130975 - DNA, 2005 bp, Homo sapiens
tgcggccgctgggctcaggctgtccgctctgggctctgcggcctcggccccgctgcactccacctccgccccctcggactccctcccctctgcttctactcctcctgctccagtgcggatcgtttcgcaactgcttgccactcgtcccgtgcctggctgtttttccatttcccggccccctcttcttgagtactttaccccctgcatttggggacagggactggaaaaggggcgggtggagcgtccagtggagaagaaggaagcgaggcccgcaggaggaggaggatcggcggactgtgggggaggagaccccacgccaccctttctggtcatctcccctcccgccccgcccctgcgcacactccctcgcgggcgagctactttcggaccaggaaagtaagagcggccctgggtgacagcgccgcggggccagtcccggggttagccgcgcgtctgctcgcttctggtccgtcgcgctcccagccagggcacagccccggacccgagatggcttctaccacaacctgcaccaggttcacggacgagtatcagcttttcgaggagccttggaaggggggcattctcagtggtgagaagatgtatgaaaattcctactggacaaggatatgctgccaaaattatcaacaccaaaaagctttctgctagggatcatcagaaactagaaagagaagctagaatctgccgtcttttgaagcaccctaatattgtgcgacttcatgatagcatatcagaagagggctttcactacttggtgtttgatttagttactggaggtgaactgtttgaagacatagtggcaagagaatactacagtgaagctgatgccagtcattgtatacagcagattctagaaagtgttaatcattgtcacctaaatggcatagttcacagggacctgaagcctgagaatttgcttttagctagcaaatccaagggagcagctgtgaaattggcagactttggcttagccatagaagttcaaggggaccagcaggcgtggtttggttttgctggcacacctggatatctttctccagaagttttacgtaaagatccttatggaaagccagtggatatgtgggcatgtggtgtcattctctatattctacttgtggggtatccacccttctgggatgaagaccaacacagactctatcagcagatcaaggctggagcttatgattttccatcaccagaatgggacacggtgactcctgaagccaaagacctcatcaataaaatgcttactatcaaccctgccaaacgcatcacagcctcagaggcactgaagcacccatggatctgtcaacgttctactgttgcttccatgatgcacagacaggagactgtagactgcttgaagaaatttaatgctagaagaaaactaaagggtgccatcttgacaactatgctggctacaaggaatttctcagcagccaagagtttgttgaagaaaccagatggagtaaaggagtcaactgagagttcaaatacaacaattgaggatgaagatgtgaaagcacgaaagcaagagattatcaaagtcactgaacaactgatcgaagctatcaacaatggggactttgaagcctacacaaaaatctgtgacccaggccttactgcttttgaacctgaagctttgggtaatttagtggaagggatggattttcaccgattctactttgaaaatgctttgtccaaaagcaataaaccaatccacactattattctaaaccctcatgtacatctggtaggggatgatgccgcctgcatagcatatattaggctcacacagtacatggatggcagtggaatgccaaagacaatgcagtcagaagagactcgtgtgtggcaccgccgggatggaaagtggcagaatgttcattttcatcgctcggggtcaccaacagtacccatcaagccaccctgtattccaaatgggaaagaaaacttctcaggaggcacctctttgtggcaaaacatc

SEQ ID NO: 130976 - DNA, 291 bp, Homo sapiens
atggggactgcagctgcggcagcggcggcggcggcggcggcggcggccggggagggggcgcgtagcccgagccccgccgccgtgtcgctcggcctgggcgtggccgtcgtgtcgagcctggtgaacgggtccacgttcgtgctacagaagaagggcatcgtgcgtgccaagcggcgaggggcctcgctggtgcaaaaggaagacccgggcgggctctcagggctgtgcgttcctggggtgctcttacggagcccgctgcgccttagacctgcaccaaatgaatacaagtga

SEQ ID NO: 130977 - DNA, 458 bp, Homo sapiens
tttcgtggagccgggaggctggggaaagccagcccctccgttcccactctccgggctcgctgcgagccacagtgtctcagccaggggcagggccggggaactcctgcgaaaaaccacgggccggaggagcagcagccgcgcgggcccaggtgctgtaaactgcaaaccataatcctgtcttaatactgcaaacaaatcatagtggaactaaggggaacttaatttactgtttccaggttaactaaggtctcagctgtaaaccaaaagtgagaggagacattaagattttcattcttaccgggttgtcttcttcctgaagagcaatggagccgcttttacttggaagaggagctaatcgatatctaatgttcctcctgttaaaattctccaaagcaattgagataccatcttcagttcaacaggttccaacattcttaaaacagtcaaaagtccagttg

SEQ ID NO: 130978 - DNA, 578 bp, Homo sapiens
atggtatttcaattgcttttgagaattttaacaggaggaacattagatatacgattagtcctcttccaagtaaaagcggctccattgctcttcaggaagaagacaacccgattttcgtggactaaggatggcaaccctttttatttcactgaccatcggataattccatcgaacaattcaggaacattcaggatcccaaacgaggggcacatatctcactttcaagggaaataccgctgctttgcttcaaataaactgggaatcgctatgtcagaagaaatagaatttatagttccaaaggtcttagttccagagggaggaacgctgccaccagaagagacaataacgattccattaaactggaagttaagattgccacctggacactttggactcctcttacttttaagtcaacaggctaagaagggagttacagtgttggctggggtgattgacccggactatcacaatgaaatcagtctactactccacaatggagaatccaagttcttcagttttggactggctctccttgctcctcagcctgcagatggcctattgcgggaccttgtgatcag

SEQ ID NO: 130979 - DNA, 1068 bp, Homo sapiens
ttagcatttaaatgtgtgaatcctgccctgtgagtactgtgtagatctaggcttaaacgtgtgaatcctgccctgtaagtactgtgtagatctaggcttaaacgtgtgaatcctgccctgtgagtactgtgtagatctaggcttaaacgtgtgaatcctgccctgtgagtactgtgtagatctgggcttaaacgtgtgaatcctgccctgtgagtactgtgtagatctgggcttaaacgtgtgaatcctgccctgtgagtactgtgtagatctaggcttaaacgtgtgaatcctgccctgtgagtactgtgtagatctaggcttaaacgtgtgaatcctgccctgtgagtactgtgtagatctaggcttaaacgtgtgaatcctgccctgtgagtactgtgtagatctaggcttaaacgtgtgaatcctgccctgtgagtactgtgtagatctaggcttaaacgtgtgaatcctgccctgtgagtactgtgtagatctaggcttaaacgtgtgaatcctgccctgtgagtactgtgtagatctgggcttaaatatactcaagctgcttacagtcacaagtatgaatgtcatagcttcatggagcaggagggagcacattaccaccacagtgtctgtcaaaagagatgctcccagaagccagaggccctcttctggaggtgctagtcctctgtttcccaccttggagtatgacggcagaggcatctcttgttttctcactactgtcaaagatagtataccgaaagaaatcatgtttgaaacagtcgggttgtcttcttcctgaagagcaatggagccgcttttacttggaagaggactaatcgtatatctaatgttcctcctgttaaaattctcaaaagcaattgaaataccatcttcaggtaaagttaaaacattcagtgcaattttactgtccatggattccccgttccaggctggcggcattttcggaaccccccccgggctgggatctagaatcctctccccctccccgatggtttcactcggttcatgttgcacacacaggtcgccaatctgcttttctcccat

SEQ ID NO: 130980 - DNA, 663 bp, Homo sapiens
atgtcttccaagatacaatactttcgctttagatacatattggaggcacaaggatcacacgatgcccaaaaggctcacccaccggaccagagacagcccacacgaataccagagcgagaaataacacagacacatacaccccgaacagacgccgcacgcatcacatgcagtccaaacaaacagaaggcaagcaatagacagcgaaacgagcaccaacaacacaaggggtacgagaacgacggaatcattatttctatctttaatagaaaagtttgtgtggatgcccttgggcggtcgatgggactgggcaccgtggagcaggggcagggggtggtgcccgtcggggaggctctggctgcacgggagcccactggtgttgagggagctcaggcatgggctgccgttccccctcccggcaacggggggctggcggagctgtgccacgggggcccccggggccggcggggccggcagagcagcagtgccagggtcatcaggatgatgcggacgcagtgtctgctggggctgcgcacgttcgtggccttcgccgccaagctctggagcttctccgcccttttgcggtggcagatctgcatggtaattcagcaccaaactgttcgatatgatatcatccccttatcttcttgtcctggaatcagctag

SEQ ID NO: 130981 - DNA, 405 bp, Homo sapiens
gacctcctcagaaaataataatggaccaaagagatgaattcattcaacagaaagtctttatctcttgcaaggttcagtagtggcagatcatgactacattggattgcctgaaattccgattggagcatatcaagcaaatattctggtggaagatgcaactattggtatagtcgataatgaattactgacatcaagcaaggatcgtgaactattagaatatagaaatacgaaaatctctccattgatagacgatcatagttctcttgaaaagcagactttcagtctgttggactcttcaaaccaggttcttgaatacttaagttagtaaataccaaaatttatttaaattgtttgtttagaatataaattcttaatgatatcttattcattaaaaacgttgtatag

SEQ ID NO: 130982 - DNA, 573 bp, Homo sapiens
ttatcgactataccaatagttgcatcttccaccagaatatttgcttgaatgctccaatcggaatttcaggcaatccaatgtagtcatgatctgccacactgaaccttgcaagagataaagactttcttcattcagactctccacatatgtggtaatgtcagaggatccagccggatcccatgcctgccaagggcaagccaggcacagagcagcaagggggcatgagtgagcgagtatggggtccggccactgcgcactgccaggtatgtggctgtagcagggcaggtagctctcagtgctggcacaggtactggctccctgcaaggctgcagctgcaccaggcataccacaaatggcttccactgtggcactggggaacgcagtggggcccagaagctggtccacggaactggcactctgggcctcaggcttcatgccatcccagcctgaaggtggagcttcaccagggacctgcccctttctgcccagaagccgtctgcctccctccgccatcaacctgctgttcacccaaactgtttgtgccggagcacctgcaggcttgtgccaagccat

SEQ ID NO: 130983 - DNA, 1383 bp, Homo sapiens
ctagatccagagactcagatgaaacaaacaggatttggcttccctctcagtttggcttgcttctatatagggtttaccttcattcagactctccacatatgtggtaatgtcagaggatccagcccggatcccatgcctgccaagggcaagccaggcacagagcagcaaggggtgcatgagtgagcgagtatggggtccggccactgcgcactgccaggtatgctggctgtagcagggcaggtagctctcagtgctggcacaggtactggctccctgcaaggctgcagctgcaccaggcataccacaaatggcttccactgtgggcactggggaacgcagtggggcccagaagtttccatcccagacatggtcacctctgtggaaaatcaccaggttattcttagggtctagagccaccccagaaacctggcctggtaacaagtatactccaggccaatccagtgcctcttccatgtggaaattctcagtcaaggtgaacttccacacggtgttggtatgagcatctccaatgtacacagtcccatcttcagatgcaacaatatcatgaggcatatcaaagtgcttgcgcactggcttgaagatgtctataatttccccattggaaaagttcatcacaaatccttgtacaggttcttggtccccaaaatgaggcttcccattcactgcaaagagcaagcctgcaacagcaaatccagttaacctttctggtatatatgaaattgcaaatacatttcttccaaatgatgaatgcttaatctctctcacaaattctttggtgtcagttttaaaacactggatccgaccattttcccggtctgccacacataattggcccaaaagaggcacaagagccaagctgtgaggaacagtgaactggcctggcagaggactgctccctgaagacttgtgtgatgaactttccacttggtgaaactgcacaatcctgctgttgcagtaaccatctgatacataaatggctccagtgcctggatccacagccacatcagtgggttgacagaagtgattctggtcactgcctggttgcatgctccttcccaggattaatacagggccttctttattgtttggatccagtttgaacacctgatggagagccacgtctgtgacccaataattcccatctttatctatactcaagccatgtggcaagtaaaaccttattcccttcaggtttccgtaccagcaagctatggatgcctcatctttgtctttaattgtgttgtggcctctgtgatattgattgcgtttcatgttacttgctaatgtggaaagccagataatacagcatgtggagataatctccaaaaaagtaacggatatgcgtgcatggcagctgtccat

SEQ ID NO: 130984 - DNA, 1678 bp, Homo sapiens
atggtccgtagtggaaaaaatggtgaccttcatcttaaacagattgcatattacaaacgaactggtgaatatcattcaactacactgccaagtgagagaagtggcataagaagagcagcaaaaaaatttgtcttcaaagaaaaaaagctgttttatgttggaaaagacagaaaacaaaatcgtttggtaattgtttcagaagaggaaaaaaagaaagtcttaagagaatgccatgaaaatgacagtggagctcatcatggtatatccaggaccctcactctggtagaatccaattattattggacatctgtgaccaatgatgtcaaacagtgggtatatgcttgtcagcattgccaagtggcaaaaaatacagttattgtagcaccgaaacagcaccttctcaaggtggaaaatccatggagtttagttactgttgatctgatggggccttttcatacaagcaacagaagtcatgtatatgctataatcatgacagatttgttcaccaaatggattgtgattttgcctctatgtgatgtttcagcatcagaagtttctaaagctattatcaatatatttttcttatatggacctcctcagaaaataataatggaccaaagagatgaattcattcaacagatcaatattgaactgtacagattgtttggcataaagcaaattgtaatttctcacacctctggaactgttaacccaatggaaagtacacctaacacaatcaaagcatttctctccaaacactgtgctgaccacccaaacaattgggatgatcacctatcagctgtttcatttgccttcaatgtaactcacttggaacctactaaaaatacaccatattttcaaatgtttagtcgaaatccttatatgcctgagacttcagatagtcttcatgaagtggatggtgataatacaagtatgtttgccaaaattctagatgcaattaaagaagctgataaaataatggagaataagacaacttcactgggccagatggagaacaacaatttggatgaactaaataaaagcaagatcattgttaaaaagaaacccaaacaattaaatccatttcatttaaaagtgggtcatgaagttttaagacaaaggaaaaattggtggaaggatggtcgttttcagtctgaatgggttggtccttgtgtcatagactatattacagaaagtggatgtgctgcccctgagagacaacactggggttagactgaaaagccctatccaaaatgcccccccccttaagccccctacataagagaatcccagtgaacaagaaagtcctttatccccttgccaaggttccagtagtggccagatccatgacctacattggattgccctgaaattcccgattggagcatatcaagcaaatattctggtggaagatgcaactattggtatagtcgataaagaatttactgacatcaagccaaggatcgtgaactattagaatatagaaatacgaaaatctctccattgatagacgatcatagttctcttgaaaaggcagactttcagtctgttggactcttcaaaccaggttcttgaatacttaagttagtaaataccaaaatttatttaaattgtttgtttagaataccaattcttaatgatatcttattcattaaaaaccgttgtatagaaaaaaaaa

SEQ ID NO: 130985 - DNA, 1128 bp, Homo sapiens
atggaagacatgccttttgccttccgccatgattgtgaggcctccccagccacgtggaactccagcgcccgccaacggtttcaaccggccgcggggagcacgtggactcgccgccgccagcccagcgccgcagctacctgcctctcaggcttcgcggtgcagaattcgcttctgaaccacccagcgcgcctgcgccgcggccacgccccccccagtggaagtgacgccaacggaagcaggaaggcggttccggcaagccaagggggcgttgtcgtgatgattccgcggccagcatcgctgcgagtggccttgaaggcagctgctgcagccagggagtggaggaagctgaagaaggctacagccggaagcgggagtgaggagcctgacaactcaagaggtggcacagggggagagaactgggacacaaaagagtctgagaagcagggaacactttggatacctcccgcctttggctgtcgacctgagtatgacaatggattggaggagattgtctttggctttgaaccctggataattgtggtcaacctggccatgcctttttctattttctatcgaatgcacgcagctgcctccctctttgagcctcagaaggtccaggcgagaagctggcttctggctgcatctgccccagtgtcctctgaggcattcggatggggcgatgactataaaaaccacgtgaaatgcataagtgaagatcagaagtatggtggcaaaggctatgaaggtaaaacccacaaaggcgacatcaaacagcaggcgtggattcagaaaattagtgaattaataaagagacccaatgtcagccccaaagtgagagaacttttagagcaaattagtgcttttgacaacgttcccaggaaaaaggcaaaatttcagaattggatgaagaacagtttaaaagttcataatgaatccattctggaccaggtgtggaatatcttttctgaagcttccaacagcgtgaatgatgaaaggactgtgatgcacgcacagcacgggatactcctcaccaataagatgaatattggtcagttcagcaacctgggtgaatctccagagaaaaacgctgagcgaagagtcagtctcaaaaggttacatactgtatga

SEQ ID NO: 130986 - DNA, 930 bp, Homo sapiens
atgaggattgaaaaactacctattgagtactctgcttattacttgtggaacaaaatggccgcatctgtttccaccagtcaccagcaaggggaggatcgtataaggacacccttcagtgtcagtgtgcttcactatgctcaaaatcaccggatttggaggtggatgtggagggacttgggcgacggggtggtgaagtcaggctgtgcccccagcggcgccacgaggccaaaaaccggcgctcagcctcatcccggtggctgcagagtgccaagcgccaggtcctgcgctccgggcgcgggtcagaagcagctggcaagggcagcgcagcctgtgggcccttgggcgctggccggccgcagctccgggaagccacgtcagcccacggggtctgcagctgcagccgccaccagcacatggagcaggggtccccgaggattgggaatccccgaccaggcctgcgcctccagccgcgcggaccccggggccagcctggccgcggcaagtcaggcagtctgcggcaggagcgccgggcatgggcttcggccgggggtgcaggaggcgcgcaccctccggccggatggcggcgcactcagggctcaggaggccatcccacgggagccccgccagcccccgccggagcccgagctgcagtgccgcctgcaagtggtgcgctggctgcagctgtggcaaccccagatcccgtcctcccgcctcgcacccatcagcgcggaccccgggggcgacgcagtggcgatgtcgggctctgggtcgcccctcacccctggcctgcctttccagctcctgtccctggagagtagcctggccttggaacacactgtcccggagcgcggctgtcgggatgatggagagaaagatgcttttaggactttcaaaagatacactgtcaccttcgtcagagcatctttatga

SEQ ID NO: 130987 - DNA, 4989 bp, Homo sapiens
atgaagccttatggtagacacggtaaagttgaaattgcaagttgtggttgctgtgcttctcacgatggtgaagaagattactacaagtggcgtacagaccatcgtagacgctttctcagaagagataagaagagagctagacaggaatctcaaaagaacattgcagaattagttcaaacggatagagcagcaacctacgaagttgtttatatcgagaagcgtactggagatgaatgtcgtgtacgtgcgtcaatgattgacggaaaagaatggtacgccattgtacgtgaatctgataagaagattatgaagcagtctaatcttcctaaagtacagcttgcagagttcatcgcggaacttgaaagcaaagaattgttcgtggtaacatctgacacatgcgttatctgtaaaggtcttttaggaagtttgaaagaccttggattgagtgacttcacagaagttcgaccaatcagttcgaaagcagacaaagacttctgccgagaaaacggattatggcttgcagatattgtttactatgacgcaaataagcttacaattgaagatgtaaaagctggcgttgaacttggagtagataagtttgacaaacctttacggttcggtgacatagtgatgtacacagaggattgtaaagggcgaagtgatatcaagtttggtcgtgttactggtaagaagcgtggtaactttgttatttcacgaatggaagacaacctgcacgaagaccttgaaaaactgtttgatgaaactaaacgttggtggtactgcaacgcaatgtcaaaagcttcactgactaaggactctaaaataatgattaagaccattcgcaaatctgacggtacaatcgtgccattcgaaccagaacgtttaaacaaatgggcttcatgggctgacaaacgaggaatcatttggtcagaagtaactatggaagccatgaagcgtgtttatgaaggttgctctaccaaagagatgcaccaagctatgattgacgtttgtattgataagcagactcaagagtactctgatatggctggtcgattactccttggtatcatctacaaagaagcctttggtggtttcacaaaagttcctcaactgttcaacttcgttatgaagatggagcaaatgggtttgtgggagcacatggattacaccgaacaagaaattgactatttacaaggtcacattgttcactcaaaagatatctcttacggttatgcagtactgaaacagttccgtgacaaatatggcatccgagatatcaagtcaggtcgtctgtttgaatccccacaatttatgtttatgggtatggctatgaaagcctttgagagacaacctaagcaccgtagactggaagatgttatcaagctgtacacttacctgtctgacctgaagattaacgctcctacgccttatctgaatggtttacgtgctactaagtcaggttatgcgtcatgctgcttaatcaaggctaatgacactgctgagtctcttggcattgctactaaggtagcttatgatatgaccaccaagcaagctggtattggtatgcttatggagacccgtacaattggtgatggtattcgtcaaaacaccattgaacacatgggtaagcttccttactacaagcttgtacgtgctgctgtagaggccaataagcagaagagtcgtggtggttcagctaacaacttcttcactgcattagacccacagattgaggatttgctacgcttgaagcaccctacaacggttcctgcaaagcgtattaatgaaatggattactcatttggtgcaaatgattacttctggcaatgtgtacagtacgatacagattggttgctattctcttacaaagatgcaccaagactgtatgacatgttctacacagcaagtgctgatgaatttgctatggcagtaggtcacgcagttcatacaggtgttaaacataaacgtgtaaaggctcgtgaagttgccaagttgtttattcagcaacgttatgctacaggacgtgtgtatccgttctttacgaacaatgcgaacacacacacaccgtttaaagaagctttgaaaatgtctaacttgtgcatggaaattatactgccagttcacgggtttgaagatgaacgtgacctttacagttacacagcacctaaagaagatggtgaagttgctctttgcttcttggctagtctggtagcagggagaatcacagaatatgaatacgctgacgttgcttattatgctcttgcaatggttgactccgttattgaccttatggactatccgtatccgtcaatgcgtaaccacgttcagaaacgtcgttctgttgggattggccttacgaatgtggctcactaccttgcgaagaactacgtgaactattcttcaagagcaggtaaaacgaagctacatgaacttgcagagatgcactcttactatctgcatgaggcttcactaagacttgcaaaagagcgtggtgtacctgaatatatgaagttcaccaagtatcctgaagaaaatgctagactcaagtcagtcagagaatcagcttggcttcaggaaagagctaactcatctctacgtcagatgattggtggttttgtttcagcttatgcagccttagaattggctcagaagacaattgatgcaggtgttaaaagacagtctgcacagttagcctcaacagctatcttcggagcagatacacagcaagctagaatgttcgctgcatcgttcgctcatcagattggtcagagttacacaagcactatgaaacagtattcaaactttgctgctggtgctcaacctgcacttggttttgaagggactcaagagttctacaagaatgctgctatgttctcccgtatcaggggtgctagtgatgaagacttgaaaggtatcatggttgctttccaacagatggcatctaaaggtaagattcaggctgaagaacttcgtggtcagttaggtgaccgtttagcaggtgctgtacagctattcgctgatgctattggcaagacaccacaagaacttgataaacttatgaaagatggtaagcttcttgctaatgaagttctaccaaaagtctctgagagaatggctgaactcgtagaagcagcaggtggtatgaatgccgtatctaagcagacagctacctcaatgggtcaagcgaagtctatgtgggataacatgttagttgcattgtttaacaactctagcgacggtatttcacagctttcacaatccattgcaatgtttttacaaggttctatgggtactgctgaagcacttggtacagttattggttatctgttaaaaggtgctggtaacttacttgacttcgtgacagatatcatgtacagaacatcttcactgtattactctgcaatggcatggtacaaggatttagacgcaagtcaacagaaacttatcaaggattctgctgaactagtttcaacctttgctatgattggtgttgcaattgccgctatcacgaaggttgcaaaaatctttggcggtactgtagcatttgtcaagagtatctttgaagaaggtatctttgcaaaaatcatgcagaagtttggtttaggtggtgcagcagccgcatctgaagcagcaggtgttgcaggagtatcagcaacaagaatggctcttggtacagttggttcatcattaatgctatctggctctacagacagaaagaataatggtagattcagtgaagttgaccttccaaaaccttttgaagatgccgtagcaagcattaccaacccgaaacgtccaatgttctttgaccagaatggacagctacagtttgcacaatattctgtagatgctcaaggcaatcgcagctttgttgataatggaatgtccaattgggatattatcatgaacaacttgtcagagtctttaaataactttgcaacgaagttcaaccaaaccccaatgatgatgacaccttctggtttccctatgcagactagacagaccctgaatgtttcattcaatcttgatgagaatatggagtatgattcacctatgatggtgacgactcaagcaatgcaatctggacagactgtaactgataacgttcaacgtgctccaaagactattactatctctggtgttgttgtagtgggctacgaaggtagcctattacgtacacgtcaaggtcaacttgtagaaaactttatcgacactgtagaaacttggcgagaccagaaacagattatttcggttatctgtaaagacggtattaagattgacgatagcattatcaccaacttcaaagcttctaaagagcatactattgcaaatggtcttcgtattcagatgactttccaaggtgtggagtttaaagctgtagttggacagacagacgtttcagcagcaactggtaaaacagctaccacaaatgacggtggagcaacttcaaagaagaatacaggtaataccacaacctctttaggtaacggtaaattaaactgtcaacttctttatgacctgcaatcaaatggtgtaagagaactttcaagtgatgaatatcgtgctcttgctgcttgtggtcgttctgcaaataccagcaaaggccagacaacatttagtgatgaagctgaaagaactgctggtcaggctcttaataggggtgctggtacagatacggaatggtcaactcagacagttactttagaaggtactgtgtttgttattgagttgaaatacaaagaaaggcttgacagatggttcttgacgctaactgatgttgatggtaatgtattattatctgaaaagaaatgccttgccgaccaatctattacaggccgctacgtaattccttccttagctggtgaaatcttcgttgaaaaaatcttcggaactgacttacaaccatcaagaaataactttggaagggataaggcatttgaacttaactattacacttctgaagatatgcgtttgatggagaacttataa

SEQ ID NO: 130988 - DNA, 4404 bp, Homo sapiens
atgtgtagaaatttcctgaagcctccccagaagctgatgctgggtctgtgcttcctgtacagcctgcagaacccatctgtttccaccagtcaccagcaagcggaggatcgtataaggacacccttcagtgtcagtgtgcttcattatgcttttggatgtgttagtaaaaattctccggatttggagggattggtgtcaatcaaagacaaatcacaacaagtgattgtccagggtgtccatgagctctatgatctggaggagactccagtgagctggaaggatgacactgagagaacaaatcgattggtcctccttggacacgccctccgatctcatcgccactgcaaccgcattcgacctcgaatggcggggtccccagctgtaccggagggctaccacgttctggtggtgaatggatgtacatcatccgtggtgctgactgttaatgttcctaaagcctctcaagttgctttggcagacaagaaagctcgtatcctgaaagacgttaccttctcaggtatcttagcgggtgctatcttggatgttgacttgaaagacgttgtatgtagctggaatggtattgccatcgaaggctttgctccagactcattcttacgtctacagagaacttctccacttgttacaccagttgttggtgcaggtggtcaggtagctctgacaagaaacgcagacaagacaggtactattgagattgagctaatgcagacttcactctctaaccagatgctttctgcgattcaagctaaacaagatgacatggaacttgaagaagatatctcttctaacttcgtaatctacgacccatctggttctgttctggcaactggtattaacgcatggttgcaggaacttccacagattgaacttggtcgtgaccagaactctaaaacttggatttttggttgtgcaagagatggtattaaaatgtcgatgaaactcggtaaagttgttgtaccgacaattgctcagatgttttcaagtttatctgggaaagagcagaaagaaggcgaagaaagtgtaacagcagtacctttcaaagaattagttgaagcttgctttgaccgtattgatgaactcgatattgactcaatggctgctttgttattccaaggtgcaactgtagatgacttccctctaaacttttttcgaagcaagcattttcaaaagcctaacttctcagtaagcatgagtagtgctatgcagaccccattgactgatggggctgtagcagcaacttatgaagaagcagatgagatgaaatttgtgcttgctatttacggtatggaagggtgtaaagaaacactcgaccaactcttctcaatgactttctctgatttattatctctgcgacagtatttagaaatccagaggtcatacaaagaagaaattgcttataacgaacttagaaaggcagttgatagctttattgtggagttgggtttcagtgaaaaggttgttaaaggtttgcagagagttgaaaagatggctatgcagtctgctcaacgaattgaacgtaatattaacaaagcctttgacgtgaaacccaataagtcttcacaggaagcattaaacagaattgtaaaaaacgctcagactgcttcgggcagaatcaataaagcactcaacaactcccttaaccttgattcacaaggtgttaaatctcttaaaagactggagacgcaaggtagaaaaactgccaaggaaattaacaaggctttaagagacgctatgaaagttgatggaaaagtcactgttcgtggtggtagaaaaggtggtactggtttccctcctactggtggaagtggcaacccaagacctccaagacctgatattgctcagagacagatggaaagaatgtttaacaacaacttctattctggtctgacacgtcgccttgaaactattggtgggcaaggtaaccaaatggcagcttccttcagaggaaacttgcaaggtctttataacaaatataagggaactggtaaagtcggtgaatatgagatggaagtcaaaaagctcattgacgttaccaagcgttgggttattgcagaaaatgctagactcaagtcagtcagagaatcagcttggcttcaggaaagagctaactcatctctacgtcagatgattggtggttttgtttcagcttatgcagccttagaattggctcagaagacaattgatgcaggtgttaaaagacagtctgcacagttagcctcaacagctatcttcggagcagatacacagcaagctagaatgttcgctgcatcgttcgctcatcagattggtcagagttacacaagcactatgaaacagtattcaaactttgctgctggtgctcaacctgcacttggttttgaagggactcaagagttctacaagaatgctgctatgttctcccgtatcaggggtgctagtgatgaagacttgaaaggtatcatggttgctttccaacagatggcatctaaaggtaagattcaggctgaagaacttcgtggtcagttaggtgaccgtttagcaggtgctgtacagctattcgctgatgctattggcaagacaccacaagaacttgataaacttatgaaagatggtaagcttcttgctaatgaagttctaccaaaagtctctgagagaatggctgaactcgtagaagcagcaggtggtatgaatgccgtatctaagcagacagctacctcaatgggtcaagcgaagtctatgtgggataacatgttagttgcattgtttaacaactctagcgacggtatttcacagctttcacaatccattgcaatgtttttacaaggttctatgggtactgctgaagcacttggtacagttattggttatctgttaaaaggtgctggtaacttacttgacttcgtgacagatatcatgtacagaacatcttcactgtattactctgcaatggcatggtacaaggatttagacgcaagtcaacagaaacttatcaaggattctgctgaactagtttcaacctttgctatgattggtgttgcaattgccgctatcacgaaggttgcaaaaatctttggcggtactgtagcatttgtcaagagtatctttgaagaaggtatctttgcaaaaatcatgcagaagtttggtttaggtggtgcagcagccgcatctgaagcagcaggtgttgcaggagtatcagcaacaagaatggctcttggtacagttggttcatcattaatgctatctggctctacagacagaaagaataatggtagattcagtgaagttgaccttccaaaaccttttgaagatgccgtagcaagcattaccaacccgaaacgtccaatgttctttgaccagaatggacagctacagtttgcacaatattctgtagatgctcaaggcaatcgcagctttgttgataatggaatgtccaattgggatattatcatgaacaacttgtcagagtctttaaataactttgcaacgaagttcaaccaaaccccaatgatgatgacaccttctggtttccctatgcagactagacagaccctgaatgtttcattcaatcttgatgagaatatggagtatgattcacctatgatggtgacgactcaagcaatgcaatctggacagactgtaactgataacgttcaacgtgctccaaagactattactatctctggtgttgttgtagtgggctacgaaggtagcctattacgtacacgtcaaggtcaacttgtagaaaactttatcgacactgtagaaacttggcgagaccagaaacagattatttcggttatctgtaaagacggtattaagattgacgatagcattatcaccaacttcaaagcttctaaagagcatactattgcaaatggtcttcgtattcagatgactttccaaggtgtggagtttaaagctgtagttggacagacagacgtttcagcagcaactggtaaaacagctaccacaaatgacggtggagcaacttcaaagaagaatacaggtaataccacaacctctttaggtaacggtaaattaaactgtcaacttctttatgacctgcaatcaaatggtgtaagagaactttcaagtgatgaatatcgtgctcttgctgcttgtggtcgttctgcaaataccagcaaaggccagacaacatttagtgatgaagctgaaagaactgctggtcaggctcttaataggggtgctggtacagatacggaatggtcaactcagacagttactttagaaggtactgtgtttgttattgagttgaaatacaaagaaaggcttgacagatggttcttgacgctaactgatgttgatggttggaaactcagtttctccaactgttgttccacaggttcagctggtgaaaaccctccctttgattctcctttgaagtag

SEQ ID NO: 130989 - DNA, 721 bp, Homo sapiens
tgctgtaaaacaaataccattttaaagtatattggaattcggtaactaaagtaataaataaatgcttgaaatatacccagtagaaaacttaatttttattaacccaatccttttggataaggaaatgcctctagtgttatgtacaaacttgatctgtcttggaaacgtgtatgtccactgcttttcctgtttcctgtcacagtagctttaaaacagctgtgttaaggatatccttatcctaaatttctgcccaaggaggaccaatcgatttgttctctcagtgtcatccttccagctcgactggagtctcctccagatcatagaggctcatgggacacccctggacaatcacttgttgtgatttgtctttgattgacaacaatcccttcaggccttatggacctccatggcagtgattgtcccttgtttctcacatttcttttcccacaggaaggattctggaataaacatattaagggtggatcttcctttgcatttccgggggacgggcaaatgtgattggtaacaatactctgatcaaggtgaggttgtggttcctgggcacatgctgaagtttttttctggcaaacttaatccagagagactatcaaaggcatgaaagatctaatacattagagagatcaactcttgatctttgtgtttctaagatttgtcctagtccatttatggatctaattgtcgctctaaatttctttacaac

SEQ ID NO: 130990 - DNA, 520 bp, Homo sapiens
atgaggatgattacaggcactttgtcaacctggatcatgcccacagccttctgagggactatcagcagagagaaggcattgccatggatcagttgctttcccaaagagattttcgggaaggcgcctacagtggctcagcgcgcagggagcccgcacgggaactgtcccggccagaccgcccagggcagtgtggcctcaacaccactgagcacccgctggggccgctaaccccagcaccttcccatagcctgcggagttccagcccctgccccaccaggatgacaaagaaaagaaagaacaacaatcatgccaaaaagggccgcggccacatgcagcctatttgctgcatgaactgtgcccgatgcatgcccaagtacaaagccgttaagaaactcgtcactggggccagccttcctaatgatggtgatgaaaaatatgagaagaccataattaaaagtggagatcagacgttttacaaattcatgaagcgaattgctgcttgtcaggagcagattttgag

SEQ ID NO: 130991 - DNA, 2401 bp, Homo sapiens
tgccgccttccggctccagtccccgggctcggcctcggcgaggtgtaattcgcagcgcgggccggccccggaggctctcggcgagcgcggcgcggtaacaagtgggcgaggatgccgtacgagatcaagaaggtgttcgccagcctcccgcaggtggagaggggcgtctccaagatcatcggcggcgaccctaagggcaacaattttctgtacaccaatggaaagtgcgtcatcctaaggaacatcgacaacccagcccttgctgacatctacacagagcacgcccatcaggtggtggtggccaagtatgcgcccagcggattctacattgcctccggagatgtgtctgggaagctgaggatctgggataccacgcagaaggagcacctgttgaagtatgagtaccagcctttcgctgggaagatcaaagacattgcttggactgaagacagtaagaggatcgccgtggtcggggaaggaagggagaagtttggagcagtcttcctctgggatagtggctcttctgtgggcgagattacaggacacaacaaagtcatcaacagcgtggacatcaagcagagccggccataccggctggccacgggaagcgatgataactgcgcggcattctttgagggacccccattcaagttcaagttcacaattggcgaccacagccgctttgtcaactgtgtgcgattctctcctgatgggaacagatttgccacagccagtgctgacggccagatatacatctatgacgggaagactggggagaaggtgtgcgcgctgggcggaagcaaggcccacgacggtgggatttacgcaattagttggagtcccgacagcacccatttgctttctgcttctggggacaaaacttccaagatttgggacgtcagcgtgaactccgtggtcagcacatttcccatgggctccacggttctggaccagcagctgggctgcctatggcagaaggaccacctgctcagtgtctccctgtccgggtacatcaactatctggacagaaacaaccccagcaagcccctgcacgtcatcaagggtcacagtaaatcgatccagtgtctgacggtgcataaaaacggcggcaagtcctacatttactctgggagccacgacggacacattaattactgggattcagagacgggggagaacgactccttcgctgggaaaggccacacgaaccaggtgtccaggatgaccgtggatgagtcggggcagctcatcagctgcagcatggacgacaccgtgcggtacaccagcctcatgctgcgggactacagcggacaaggagttgtgaaactggacgttcagccaaagtgcgtagccgtcggccccgggggatacgccgtggtcgtgtgcattggacagattgtcctgctgaaggatcagaggaagtgcttcagcatcgacaaccccggctacgagcccgaagttgtggcagtgcaccccggcggggacacggtggcaattgggggtgtggacggcaacgtccgcctgtattccatcctgggcaccacgctgaaggatgagggcaagctcctagaggccaagggccccgtgaccgacgtggcctactcccacgacggcgccttcctcgcggtgtgcgacgccagcaaggtggtcacagtgttcagcgttgctgacggctactcggagaacaatgttttttatggacaccatgaaaaataaagcgagcacctaaacaatgtgtggagcataactaaaacccacagcccaaccaaaccttgagaatgcgaaacattccagaggcagtagcctccaaagcacacagagcccctggccccgccgcggctctcactatctgtcaggggaggttgtacaggtgaatgagccggggggctcatgttcctgcctgcagaacatttctgtactagtgagaagagggaatatgcattgcagttcagcaaagccggaattctgtgttgaacagatgtctgtctccctagtgtgtgactcacaccttgtggctgccttcagagcgccacctccagatcagatggggacacacaacccctggatatgtttcattgtcagattttgtgcttgattttaagaatggaattgtgggtatctttcctttttttttaatgtatcttaactgttgcctgtcagtgtttacaaactagtgcgttgacggcaccgtgtccaagtttttagaacccttgttagccagaccgaggtgtcctggtcaccgtttcaccatcatgctttgatgttcccctgtctttccctcttctgctctcaagagcaaaggttaatttaaggacaaagatgaagtcactgtaaactaatctgtcattgtttttaccttccttttctttttcagtgcagaaattaaaagtaagtataaagc

SEQ ID NO: 130992 - DNA, 1002 bp, Homo sapiens
atggacgccatatgggggggatgggaggggcgcttcagtacagggtggtcgcataacacgcagcggggacaaaacggcggcggccgaaaccgagttgatacagatcagggattgagagcagggaccctggtggctcgacacttgttgcaaggggcccaccccaaccaattgggaaaacagaaccgccagcactcacagatccaggtgattatgaggaagtacataggatatgacttagaaccacacctctaccccctggtgcccgtcatcaacagttgtcgatattggcgcgttgatacaaccggccatacggccagtggaccgcaaccatcagagcaactcccaacaaccacatcgtctgcctacattaatgagataacaatcaggtggtctgtgcatggggcccccggggtccctcagtacggccagcagcgcaactggtgtttgctggatggaaggagacccacaactctttcgggccccctgtttaaaagcacaaaggctactttacccctgggactgaagcccagggacagccttattgtcctgctgaaggatcagaggaagtgcttcagcatcgacaaccccggctacgagcccgaagttgtggcagtgcaccccggcggggacacggtggcaattgggggtgtgagacgattgaggatagtccgtgcccgggacggctgtctacgtaataatttgagggttgcgttgccccgattgttagaaggaaccgttgaggagagcgccccggtggggccgctcgagggggcgtcaccctttgtgggtggagatcgcttggagtgtgttggaaatcattcggtatcgaacgcatgtgggtgtttgattgcgtgcgaacgcactgaccgtgcctcgttgatcggccttaagcggctccgcttggttcgttacgggaccgcccattcccccgatgtcgtcgctgtcgctacaccgttcgcttccgacgcaatgcgaaatagtctgaatcgggatgcactctga

SEQ ID NO: 130993 - DNA, 3047 bp, Homo sapiens
ggcacgagcgcaaccacagcgcgcagggcaggcgcgagctggcctctgagccccggcctcggaccgcccactccactcccggcacgcccggtgccgccttccggctccagtccccgggctcggcctcggcgaggtgtaattcgcagcgcgggccggccccggaggctctcggcgagcgcggcgcggtaacaagtgggcgaggatgccgtacgagatcaagaaggtgttcgccagcctcccgcaggtggagaggggcgtctccaagatcatcggcggcgaccctaagggcaacaattttctgtacaccaatggaaagtgcgtcatcctaaggaacatcgacaacccagcccttgctgacatctacacagagcacgcccatcaggtggtggtggccaagtatgcgcccagcggattctacattgcctccggagatgtgtctgggaagctgaggatctgggataccacgcagaaggagcacctgttgaagtatgagtaccagcctttcgctgggaagatcaaagacattgcttggactgaagacagtaagaggatcgccgtggtcggggaaggaagggagaagtttggagcagtcttcctctgggatagtggctcttctgtgggcgagattacaggacacaacaaagtcatcaacagcgtggacatcaagcagagccggccataccggctggccacgggaagcgatgataactgcgcggcattctttgagggacccccattcaagttcaagttcacaattggcgaccacagccgctttgtcaactgtgtgcgattctctcctgatgggaacagatttgccacagccagtgctgacggccagatatacatctatgacgggaagactggggagaaggtgtgcgcgctgggcggaagcaaggcccacgacggtgggatttacgcaattagttggagtcccgacagcacccatttgctttctgcttctggggacaaaacttccaagatttgggacgtcagcgtgaactccgtggtcagcacatttcccatgggctccacggttctggaccagcagctgggctgcctatggcagaaggaccacctgctcagtgtctccctgtccgggtacatcaactatctggacagaaacaaccccagcaagcccctgcacgtcatcaagggtcacagtaaatcgatccagtgtctgacggtgcataaaaacggcggcaagtcctacatttactctgggagccacgacggacacattaattactgggattcagagacgggggagaacgactccttcgctgggaaaggccacacgaaccaggtgtccaggatgaccgtggatgagtcggggcagctcatcagctgcagcatggacgacaccgtgcggtacaccagcctcatgctgcgggactacagcggacaaggagttgtgaaacctggaccgttcagccaaagtgccgtagccgtcggccccgggggatacgccgtggtcgtgtgcattggacagattgtcctgctgaaggatcagaggaagtgcttcagcatccgacaaccccggctacgagcccgaagttgtggcagtgcaccccggcggggtacacggtggcaattgggggtgtggacggcaacgtcgccctgtattccatcctgggcaccacgctggaaggatgagggcaagctcctagaggccaagggccccgtgaccgacgtggcctactcccacggacggcgccttcctcgcggtgtgcgacgccagcaaggtggtcacagtgttcagcgttgctgacggctactcggagaacaatgttttttatggacaccatgcaaaaatcgtctgcctggcctggtccccagacaatgaacactttgcctccggtggcatggacatgatggtgtatgtttggaccctgagtgacccggaaaccagagtcaagatccaagatgcacaccggctgcaccatgtcagcagcctggcctggctggacgagcacacgctggtcacgacctcccatgatgcctctgtcaaggagtggacaatcacctactgaggagccccacccccgcctctggatggaccgaatcagggactagagtttaactgcagcggaacatgtcatttctctatttctgtgacgcgcccccatgcccccaccccaccacaagaggcaggagggcccagtcatgaccctcgtctctgcagggtgtctgtacacgttcttctgaaagctttagacagtaacagtttgcacatgaaaaataaagcgagcacctaaacaatgtgtggagcataactaaaacccacagcccaaccaaaccttgagaatgcgaaacattccagaggcagtagcctccaaagcacacagagcccctggccccgccgcggctctcactatctgtcaggggaggttgtacaggtgaatgagccggggggctcatgttcctgcctgcagaacatttctgtactagtgagaagagggaatatgcattgcagttcagcaaagccggaattctgtgttgaacagatgtctgtctccctagtgtgtgactcacaccttgtggctgccttcagagcgccacctccagatcagatggggacacacaacccctggatatgtttcattgtcagattttgtgcttgattttaagaatggaattgtgggtatctttcctttttttttaatgtatcttaactgttgcctgtcagtgtttacaaactagtgcgttgacggcaccgtgtccaagtttttagaacccttgttagccagaccgaggtgtcctggtcaccgtttcaccatcatgctttgatgttcccctgtctttccctcttctgctctcaagagcaaaggttaatttaaggacaaagatgaagtcactgtaaactaatctgtcattgtttttaccttccttttctttttcagtgcagaaattaaaagtaagtataaagcaccgtgattgggagtgtttttgcgtgtgtcggaatcactggtaaatgttggctgagaacaatccctccccttgcacttgtgaaaacactttgagcgctttaagagattagcctgagaaat

SEQ ID NO: 130994 - DNA, 449 bp, Homo sapiens
  misc_feature (1)...(449): n = a,t,c or g
cagcataacgcctnngtttgtgaacgtnccagacctggagcagccaccgccgcaatcatggtgtcagtaattttcactgtggatacctcccatgaggacatgattcacgacgcccagatggactactatggcacccgcctggcaacctgctcatcagacaggtccgtcaaaatctttgatgtgcgcaatggagggcagatccttatcgccgacctcaggggtcatgagggtcctgtgtggcaagtggcctgggctcaccccatgtacggcaacatcctggcatcgtgctcctatgaccggaaagtcattatctggagagaggatggtcgtgtgttcatttggacctgtgatgatgcctcaagcaatacgtggtcccctaaattgttgcacaagttcaacgatgtggtgtggcatgtgagctggtccatcacagccaacattcttgctgg

SEQ ID NO: 130995 - DNA, 317 bp, Homo sapiens
cacaagttcaacgatgtggtgtggcatgtgagctggtccatcacagccaactaaccaaacaactgggaagagcccccaactccaacaggattattttcccaggaggagttacagatgcagccacagattgatcatctgccttaacgtgatcggagatgctgtgtaatctactgtccagctgaaagcactcatgttacgaggaagaaactacaagtgatgttcaaatctattttgggtcatttttatgtacctttgggttcaggcattatttggggggttttgtttccaaaggaactaaataaagtcatattgcttat

SEQ ID NO: 130996 - DNA, 560 bp, Homo sapiens
ggcatgcccaccagcactatcgccagctgctcccaggatggtcgtgtgttcatttggacctgtgatgatgcctcaagcaatacgtggtcccctaaattgttgcacaagttcaacgatgtggtgtggcatgtgagctggtccatcacagccaacatcctggctgtctctggtggagacaataaggtgacagagggccagcagaacgagcagtgacaagacaggtggggcctggctccccacccgccagctccaggactgccccttcctgggccaactaaccagacaactgggaagagcccccaactccaacaggattattttcccaggaggagttacagatgcagccacagattgatcatctgccttaacgtgatcggaaatgctttgtaatctactgtccagctgaaagcactcatgttacgaggaagaaactacaagtgatgttcaaatctattttgggtcatttttatgtacctttgggttcaggcattatttggggggttttgtttccaaaggaactaaataaagtcatattgcttataaaaaaaaaaaaaaaaaaa

SEQ ID NO: 130997 - DNA, 438 bp, Homo sapiens
gccggctgcaggaattcggcacgagatggcacccgcctggcaacctgctcatcagacaggtccgtcaaaatctttgatgtgcgcaatggagggcagatccttatcgccgacctcaggggtcatgagggtcctgtgtggcaagtggcctgggctcaccccatgtacggcaacatcctggcatcgtgctcctatgaccggaaagtcattatctggagagaggaaaacggcacctgggagaagagccacgagcatgcgggacacgactcctcagtgaactcggtgtgctgggctccccacccgccagctccaggactgccccttcctgggccaactaaccagacaactgggaagagcccccaactccaacaggattattttcccaggaggagttacagatgcagccacagattgatcatctgccttaacgtgatcggagat

SEQ ID NO: 130998 - DNA, 1304 bp, Homo sapiens
atgaaactcatggaaacacttaaccagtgcataaacgctggtcatgaaatgacgaaggctatcgccattgcacagtttaatgatgacagcccggaagcgaggaaaataacccggcgctggagaataggtgaagcagcggatttagttggggtttcttctcaggctatcagagatgccgagaaagcagggcgactaccgcacccggatatggaaattcgaggacgggttgagcaacgtgttggttatacaattgaacaaattaatcatatgcgtgatgtgtttggtacgcgattgcgacgtgctgaagacgtatttccaccggtgatcggggttgctgcccataaaggtggcgtttacaaaacctcagtttctgttcatcttgctcaggatctggctctgaaggggctacgtgttttgctcgtggaaggtaacgacccccagggaacagcctcaatgtatcacggatgggtaccagatcttcatattcatgcagaagacactctcctgcctttctatcttggggaaaaggacgatgtcacttatgcaataaagcccacttgctggccggggcttgacattattccttcctgtctggctctgcaccgtattgaaactgagttaatgggcaaatttgatgaaggtaaactgcccaccgatccacacctgatgctccgactggccattgaaactgttgctcatgactatgatgtcatagttattgacagcgcgcctaacctgggtatcggcacgattaatgtcgtatgtgctgctgatgtgctgattgttcccacgcctgctgagttgtttgactacacctccgcactgcagtttttcgatatgcttcgtgatctgctcaagaacgttgatcttaaagggttcgagcctgatattggctgcaatgccgtcagctgggcccctgctgttgtacctgtaagcctcatagaccacccatcggggcagaaacccaattacatcaagaggtttgcatcaggtggctgtgacaacctcatcaagctgtggaaggaaggaggaaggacggccagtggaagggaggagcagaagctagaggcgcacagtgactgggtttcgagatgtgggcctgggccccctccatcggcctgcccaccagcaccatcgccagctgctccagtgctcacaggccaccattccaagatgactgggaatcctgccaaaaccaatgctgaccccagcagcccaggcttcacgggactcactgggatccctgctgagacatggaatgccttctgtctgtcaccagtccccttgtccttccccactaaggg

SEQ ID NO: 130999 - DNA, 957 bp, Homo sapiens
cgtatatttgtaccatgacgaccgcccgaattcccggtcgacgatttcgtgccgccgggagctgccacgtccgagacctgttcagctaccgccgcaatcatggtgagtgttggtactgaggaggcctagcagggtgaaggccacggtcgcggccttcacgggttcctcggccgtcctgagtcccaaatcccaagctggagccgttcagctcccctccaccgcttaaagatttggggggctctggccccgtccttgcggaccattccgaggggagtccagaggtgaggccgaggaacctccctgactttgcggggcgcgccgctcctgcgtctcctgccagtctcccttccttcttttcgggcaacaattgaaaacaaaacgaggaacagcagaggagctactgtataccgagccctcagcattgttcgtaatctccgcctgctaacagccttgtgaagaaggtgctattcttctcaacactttacagatgaggacacttgaggttcggagacgtggagcctcttgcacagctgcttaagtggtagtagagccgagatttgaacccttctaaccattcctttctggcgcctactgcagctcccagcagagatgattgaactgttgctcggggtagggcccccaggtgtcagtaattaacactgtggatacctcccatgaggacatgattcacgacgcccagatggactactatggcacccgcctggcaacctgctcatcagacaggtccgtcaaaatctttgatgtgcgcaatggagggcagatccttatcgccgacctcagggggtaagtgctggcgagcccagggaagggctccaggaatggtgtgggttctcaggccctgcttcaagcgtgggagcaaagcatgggagcccagattcagagcaaccccaaagcacatttagcggagaggacgctgggatcccagccagcctggct

SEQ ID NO: 131000 - DNA, 2199 bp, Homo sapiens
  misc_feature (1)...(2199): n = a,t,c or g
cgtcccatggtgaaggttggtactgaggaggcctagcagggtgaaggccacggtcgcggccttcacgggttcctcggccgtcctgagtcccaaatcccaagctggagccgttcagctcccctccaccgcttagagatttggggggctctggccccgtcccttgcggaccattccgaggggagtccagaggtgtcagtaattaacactgtggatacctcccatgagtacatgatttattgacgcccagatggactactatgggcacccgcctgggcaacctgcttcatcagacaggtccgtcaaaatcttttgatgtgcgcaatgggagggcagatccttattcgccgaccttcaggggtcatggaggggtcctgtgtggcaagttggctgggggttcaccccattgttacgggcaacatcctgggcattcgttgcttccttattgaccggaaagttcatttattcttgggagagagggaaaacgggcaccctggggagaagagccacgagcaatgcggggacacgactcctcaagttgaacttcgggtgttgctgggccccccatggacttacggtcctgnattcctgggcctgttgggtagtctcggatngggggccatcttccctggctggactttacaccgggggaaggccaatgggaagtaaagaagatcaacaacgctcacaccattggctgcaatgccgtcaacttgggcccctgcttgttgtacctggaagcctcatagacgaccccatcggggtcagaaacccaattacatcaagaggtttgcatcaggtggctgtggacaacctcattcaagctgtggaaggaggaggaggacggccagtggaaggaggagcagaagctagaagcgccacagtgactgggtttcgagatgtggcctgggccccctccatcgggcctgcccaccagcaccatcgcccagctgctcccaggatgggtcgtgtgtcaatttggacctgtgatgatgcctcaagcaatacgtggtccccttaaattgttgcacaagttcaacgatgtggtgtggcatgtgagcttggtccatcacagccaacatcctggctgttctctggtggagacaataaagatacccctgtggaaggagtcaagttgatgggccaagtgggttgtgccatccagtgatgtcaaacaaaggggcccagggctcccgtatcagccatccagtgaccaggaaggcccagcaagaaacgagcaagtgaacaaagaccagggtggggccctggctcccccacccgcccagctcccaggacctgccccttccccgggcccaacttaaccagacaacttgggaagagccccccaactcccaacagggattattttccccaggagggagttacagatgcagcccacagattgatccatctgcccttaactgtgatctgagatgctttgtaatctactgtccgagctggaaacagctcatgttacgaggaagaaactacaagtgatgttcaaatctattttgggtcatttttttataagcaatatgactttatttagttcctttggaaacaaaaccccccaaataatgcctgaacccaaaggtacataaaaatgacccaaaatagatttgaacatcacttgtagtttcttcctcgtaacatgagtgctttcagctggacagtagattacaaagcatctccgatcacgttaaggcagatgatcaatctgtgggctgcatctgtaactcctccttattgtctccaccagagacagccagggatgttggctgtgatggaccccagttcaacatgcccaacaccacatcgttgaacttgtgcaaacaatttagggggaccacggtaattgcttgagggcatcatcacagggtccaaatggaacacacgaccatcctgggagcagctggcgaattgtggcttggtggccagggccgattgaagggggcccaggccacatctcgaacccagtccactgtgcggcttcttagcttctgctccttctttcactgggccgtccttctccttcttcacagctgattgaagggtttggcacagccacctgatgcaaacctcttgatgtattttggggttctgccccgatgggtggtctatgaggcttccaggtacaacagcaggggcccagctgacggcattgcagccaatggtgtgagcgttgttgatcttctttacttc

SEQ ID NO: 131001 - DNA, 1713 bp, Homo sapiens
atgagtggagaatttattgaccatagtcacatcgctagaattatatatccaggaatatttggtacagatgctggcagctgtattgaccagagaggcataacagggaagctgcagcagcccccagaagataggagattgggagaaggaaaactaacaaacacaaaggacatccacaccaaaaccccatctgtacgtcaccatcatcaaagaccaaaggtagataaaaccacaaagatagggaaaaaacagagcagaaaaactggaaactctaaaaatcagagtgcccctcctcctccaaaggaatgcagctcctcaccagcaatggaacaaagctggacagagaatgactttgacgagttgagagaagaaggcttcagacgatcaaactactccgagctaaaggaggaatttcgaacccatggcaaagaagttaaaaaccttgaaaaaagattagacgaatggctaactagaataaccaatgcagagaagtccttaaaggacctgatggagctgaaaaccaaggcacgaggactacaaagggtatcagtgatggaagacgaaatgaatgaaatgaagcaagaagagaagtttagagaaaaaagaataaaaagaaacaaacaaagcctccaagaaatatgggactatgtgaaaagaccaaatctacgtctgattggtgtacctgaaagtgatggagagaatggaaccaagttggaaaacacgctgcaggatattatccaggagagcttccccaatctagcaagacaggccaacattcaaattcaggaaatacagagaatgccacaaagagactccttgagaagagcaactccaagacacataattgtcagattcaccaaagttgaaatgaaggaaaaaatgttaagggcagccagagagaaagcaccacattgcacttattccaaaattgaccacttagttggaagtaaagctctcctcagcaaatgtaaaagaacagaaattataacaaactgtgtttcagaccacagtgcaatcaaactagaactcaggattaagaaactcactcaaaaccgctcaactacatggaaactgaacaacctgctccagaatgactactgggtacataacgaaatgaaggcagaaataaagatgttctttgaaaccaacgagaacaaagacacaacataccagaatctctgggacacattcaaagcagtgtgtagagggaaatttatagcactaaatgcccacaagagaaagcaggaaagacctaaaattgacaccctaacatcacaactaaaagaactagagaagcaagagcaaacacatttaaaagctagcagaaggcaagaaataactaagatcagagcagaactgaaggaaatagagacacaaaaaacccttcaaaaattcgatgaatccaggagctggttttttgaaaagatcaacaaaattgatagaccgttagcaagactaattaagaagaaaagagagaagaatcaaatagatgcaataaaaaatgataaaggggatatcaccactgatcccacagaaatacaaactaccatcagagaatactataaacacctctacgcaaataaactagaaaatctagaagaaatggataagttcctcgacacatacaccctcccaagactaaaccaggaagaagttgaatctctgaatagaccaataacaggatctgaattgaggcaacaattaatagcttactaa

SEQ ID NO: 131002 - DNA, 396 bp, Homo sapiens
atggctgggtactcctctgagacaaaacttccagaggaacatttgctgttcaccaatatccactgttctgcagcctttgctgctgatacccaggcaaacaggtttggagtggacctccagcaaactccaacagacctgcagctgagggtcctgactgttagaaggaaaactaacaaacaggacatccacaccaaaaccctatcagtacatcaccatcatcaaagaccaaaggtagataaaaccacaaagatggggaaaaaacagagcagaaaaactggaaactctaaaaatcagagcgcctctgctcctccaaaggaacgcagctccgcatcagcaatggaacaaagctggacggaaaatgactttgacgagttgacagaagaaggcttcagatga

SEQ ID NO: 131003 - DNA, 2634 bp, Homo sapiens
atggcattcagggatgtggctgtggatttcacccaggatgagtggaggctgctgagccctgctcaaaggactctgtacagagaggtgatgctggagaactacagcaacctggtctcactgggaatttcattttctaaaccagaactcatcacccagctggagcaagggaaagagacctggagagaggaaaaaaaatgttcaccggcaacctgtccagcagatccagagccagagctctacctcgatcctttctgccctccgggtttctccagtcagaaattccccatgcagcatgtgctgtgtaatcatcccccctggatcttcacatgcttgtgtgcagaaggtaacatccagcctggggatccgggcccaggggaccaggagaagcagcaacaagcctctgaggggagaccctggagtgatcaagcagaaggtcctgagggagaaggtgccatgcctttgtttggaagaaccaagaaaaggactctgggagcgttctccaggccaccccagaggcagccagtcagctctcggaacggcctcagaggggtggagttagaagccagcccagctcagtcagggaaccctgaggaaacagacaaattgttgaagaggatagaagtcttaggatttggaacagtcaactgtggagagtgtggactgagcttcagcaagatgacaaacctgctcagtcaccagcggatacactcaggggagaagccctacgtgtgtggggtatgtgagaagggcttcagcctaaagaagagcctcgccagacaccagaaggcacactcgggggagaagccaattgtgtgcagggagtgtggacgaggctttaaccggaagtcaacgctaatcatacacgaacggacacactccggtgagaaaccttacatgtgcagtgagtgtgggcgaggcttcagccagaagtcaaacctcatcatacaccagaggacacactcaggggaaaagccttacgtgtgccgggaatgtggcaaaggcttcagccagaagtcagctgtcgtgagacaccagaggacacacttggaggagaagaccatcgtgtgcagtgactgtggcctgggcttcagcgacaggtcaaacctcatctcccaccagaggacgcactctggggagaagccctacgcctgcaaggagtgtgggcgatgcttcaggcagaggaccacccttgtcaaccaccagaggacacactcaaaggagaagccctatgtgtgcggggtgtgtgggcacagcttcagccagaattcaaccctcatctctcacaggcggacacacactggggagaagccgtatgtttgtggggtgtgtgggcgaggctttagtctcaagtcacacctcaacagacaccagaacatacactcaggagagaagcccattgtgtgcaaggactgtggccggggcttcagccagcaatccaacctcatcagacaccagaggacgcactcaggcgagaagcccatggtgtgtggggagtgcgggcgaggcttcagccagaagtcaaaccttgttgcacaccagaggacgcactcaggggagaggccgtatgtgtgccgagagtgcgggcgaggctttagccaccaggccggtctcatcaggcacaagcggaagcactcgagggagaagccctacatgtgcaggcagtgtggactgggctttggcaataagtcagctctaattacacacaagcgggctcactcggaagagaagccttgcttttttagtccctggtccttccatcgggggccctctcaccaatacattgtccccagcactccagtcccacggcctggtcttgcagctgtgaccaagcagagccttggatctcagttacacccatatcagaccaccaagaaaatagataatctccaaccacccccagctataccacctcatcagcacctccataactacagtcaggcactgcataatgttcgtctgcgacggactgcatatacagtgtgtctggttttgctcaaaataagtgtccttcaagggaggcagggtgagaaacctactaagctgcaagcacaggccatttctcatggaaaaggaggaataacttggactgcagacatcatggagaatcactctcaggggcagtacggtgctactaagaatataagacttcataactggctaaaaatgagttttcctaacaacgtgggaccttacccctctaggaatgggccatcccaatcacaaaacttccagaggaacaatcaggcagcagcatttgcagttcaccaagatccgctgttctacagccaccgctgttccacagccaccgctgctgatatccaggcaaacagggtctggagtggacctctagcaaactccaacagacctgcagctgagggtccttcctgtctgttagaaggaaaactaacaaacagaaaggacatccacaccaaaaacccttctgtacgtcaccatcatcaaagaccaaaagtagataaagccacaaagatgggggaaaaacagagcagaaaaactggaaactctaaaaagcagagcacctctcctcctccaaaggaacgcagctcctcaccagcaatggaacaaagctggacagagaatgactttgacgagctgagagaagaaggcttcagatga

SEQ ID NO: 131004 - DNA, 1158 bp, Homo sapiens
atgagcaaaggccaggaggctctaaacggaggggccaccgatcttggcgtagggatcgccttcgaccatgtgtcatggaggatccaaagaacagctgcttcatctaacagtgatgaaggtccaaggacagtgtgggggctccatgaagccatgggggcccgggctgcttcctgctcttccgccgtctttggttatctcacagctcaagatgaagatggcagatccccctgcagcctcacgctcatgtctggagccctccgagttgctgagttgagtaggaaacctgctgccatccctgtgctgggggatttgcacagtaagaaggaagccaattgcaatggagtagtctccgagcagcaggaaggcttgaaactcctctcttattctggcacatcctctgccgcatccctgaaacttggccatcggcactggagtgccagcaaggacacctccctctccctcagcctctcgcccatgccctccctgaatggcctcactcgctgcatgtggcagcagaagagatatacgtatggggagacgtgtccgcttggtgaacgagtgcgcataggtgggggaatgtgtgtattacgattggcacagatcactatgcatcatccgtgcggagacgaagcggtcactggaccaacagggctgtccgacgatcggatcatagacatgcatcgagtcccgtccgtggagtcagtctgtggcgtgcggtctagaaatggggccacgacgagttgtaaaggcacgtgcggacaggaagaaaggaatagcagcaacatcaaccaaaaggatatccacaccaaaaacccatctgtacgtcaccatcatcaaagaccaaaggtagataaaaccacaaagatggggaaaaaacagagcagaaaaaccagaaactctaaaaatcagagcgcctctcctcctccaaaggaacgcagctcctcactagcaactgaacaaagctggatggagaatgactttgacgagttgaaagaagaaggcttcagaagatcaagctactccgagctaaaggaggaagttcaaaccaatggcaaagaagttaaaaactttgaaaaaaaattagacgaatgggtaactagaataacaaatgcagagaagtccttaaaggacctgatggagctgaaaaccacagcatga

SEQ ID NO: 131005 - DNA, 1188 bp, Homo sapiens
atgacgggctcatcattcagcctcgctcatctgctcatcatttcaggactgctctgttactcggcaggctgcttggacccacaaggggatgttccagacaaagcagatgggggaggtaaaagaggtgaggcaagactgggtcagccgtcatggagagatgggcgtgaagacgccaaagaggatggaatggatcagatgcacagaaagaagcataaaaggggagatgggggacaggggatcgaggaagcccttcccagcctggatcagaagaagcgtggtggccacaaagcatgctgcctgctgacgcctcctccaccaccactgttcccaccaccattcttcagaggtggccgaagtccgcttctctccccagacatgaagaatctcatgctggaactggagacctcgcagtccccgtgcatgcaaggctcgctaggctcccctgggcctcccggcccccaggtattgctaccaagcagcccacccctccccaccaaagctaaaggggaaacagtcaaaatgctgcagaaaggatttctagacaaacaagagtaccctccagagaccccaccccacagagtcctggcccctctggcctgcctccaagagggtgctccatcgcctctgctgctgatacccaggcaaacagggtctggaatggacctccggcaaactccaacagacctgcagcagagggtcctgactgttagaaggaaaagaaacagaaaggacatccacaccaaaaccccatctgtacatcaccatcatcaaagaccaaaggtagataaaaccacaaagatggggaaaaaacagagcagaaaaactgaaaattctaaaaatcagagcgcctctcctcctccaaaggaacgcagctcctcaccagcaatggaacaaagctggacggagaatgactttgatgagttgagagaagaaggcttcagacaatcaaactactctgagctaaaggaggaagttcgaacccatggcaaagaagttaaaaaccttgaaaaaagattagacgaatggctaactagaataaccagcgtagagaagcccttaaatgacctgatggagctgaaaaccatggcacaagaactacgtgacaaatgcacaagcctcagtagccgattcaatcaactggaagaaagggtatcagtgatggaagatcaaatgaatgaaatgaaatga

SEQ ID NO: 131006 - DNA, 945 bp, Homo sapiens
atgtccgaaagcctcaaaaccagggaagctgacagtgcagccttaagtctgcagccgaaggcccaagggccccagggaagatgctggcacaagtttcagagccagcgtctgaagatcctggagtctgatgtccaagggcaggaagagtggaaagaagcaaacatcctgcacgtgaagaagaaagagccagaagactcagcatgcaaatttatctcatcttctcctgctttctttgttccagctgcattggtagccaattggatgatgcccacccacattgagggaaaggagggagagaagaagggagagagaaaggtaggaaggagggaagaagagaacaaagaaaaaagaagggaagcagaaagggagaaagaaagaaagggagagagtgagggaggagggaaggaaggaaaggaaagacagcaggaaggaatgaaaggaagaaagaaggatgggagagggagggagggaggggacctgggatggaggaagaaagacttgcagctgagggtcctggctgttagaaggaaaactaacaaacagaaaggacatccacaccaaaaacccatctgtatgtcaccatcatcaaagaccaaaggtagatacaaccacaaaatgggaaaaagacagagcagaaaaactggaaactctaaaaatcagagtgcctctcctcctccaaaggaatgcagctcctcaccagcaatggaacaaagctggatggagaatgactttgatgagttcagagaagaaggcttcagacgatcaaactactctgagctacaggaggaaattcgaaccaacggcaaagaagttaaaagctttgaaaaaaaattagacgaatggataactagaataaccaatgcagagaagtccttaaaggacctgatggagctgaaaaccaaggctcgagagctacatgatgaatgcacaagcctcagtagctga

SEQ ID NO: 131007 - DNA, 618 bp, Homo sapiens
atgagtaaactcccattcacaattgcttcaaagagaataaaatacctaggaatccaacttacaagggatgtgaaggacctcttcaaggacctcttcaaggagaactacaaacaactgctcaacgaaataaaagaggccacaaacaaatggaagaacattccattctcatggataggaagaatcaatatcgtgaaaatggccatactgcccaagccaccgctgctgatacccaggcaaacagagtctggagtgtacctccagcaaactccaacagacctgcaactgagggtcctgttagaaggaaaactaacaaacagaaaggacatgcacaccaaaaacccatctgtacgtcaccatcaccaaagaccaaaggtagataaaaccacaaagatggggaaaaaacagagcagaaaaactggaaactctaaaaatcagagtgcttctcctcctccaaaggaatgcagctcctcaccagcaatggaacaaagttggatggaaaatgactttgacaagttgagagaagacggcttcagaagatcaaactactccgagctaaagaaggaagttcgaaccaatggcaaagaagttaaaaaccttgaaaaaaaattagacgaatag

SEQ ID NO: 131008 - DNA, 4609 bp, Homo sapiens
  misc_feature (1)...(4609): n = a,t,c or g
cagcagaaaactctgcagacctaaatgtccctgtctgacagcttggaagacagtagtggttctcccagcacacagctggagatctgagaatggacagactgcctcctcaagtggtccctgacccccaagtagccctaactgggaggcacccccccagtaggggtggactgacaccctcacatggccgggtacacctctgagacaaaacttccagaggaaccatcaggcagcagcatttgctgttcatcaatgttcaccagtatctgctgttccttgagcctccgctgctgataccccaggccaaacagggtctggagtggacctccagcaaactccaacagacctgcagctgagggtcctgtcgtgttagaaggaaaactaacaaacagaaaagaatagcatcaacattaaaaaaaaggacatccacaccaaaaccccatctgtaggtcaccagcatcaaagaccaaaggtagataaaaccacaaagatggggaaaaaaacagagcagaaaaactggaaactctaaaaatcagagcgcctctcctcctccaaaggaacgcagctcctcaccagcaatggaacaaagctggacggagaatgactttgacgagttgagagaagacagcttcagaagattggtaataacaaactactccgagctaaaggaggaagttcgaaccaatggcaaagaagttaaaaaccttgaaaaaaaattagacgaatggctaactagaataaccaatgcagagaagtccttaaaggacctgatggagctgaaaaccatggcacaagaactacctgaccaatgcacaagcctcagtagccgatgcgatcaactggaagaaagggtatcagtgatggaagacgaaatgaatgaaatgaagtgtgaagagaagtttagagaaaaaagaataaaaagaaatgaacaaagcctccaagaaatatggcactatgtgaagagaccaaatctacgtctgattggtgtacctgaaagtgacggggagaatggaaccaagttggaaaacactctgcaggatattatccaggagaacttccccaatctagcaaggcaggccaacattcaaattcaggaaatacagagaatgccacaaagatactcctcaagaagagcaactccaagacacataattgtcagattcaccaaagttgaaatgaaggaaaaaatgttaagggtagccagagagaaaggtcaggttacccacaaagggaagcccatccagactaacagctgatctcttggcagaaactctacaagccagaagagagtggggggccaatattcaacattcttaaagaaaagaattttcaacccagaatttcatatccagccaaactaagcttcatagacagatcaacgagacagaaagttaacaaggatacccaggaattgaactcagctctgcaccaagcggacctaatagacatctacagaactctccaccccaaatcaacagaatatacattcttttcagcaccacaccacacctattccaaaattgaccacatagttggaagtaaagcactcctcagcaaatgtaaaagaacagaaattataacaaactgtctctcagaccacagcgcaatcaaactagaactcaggattaagaaactcactcgaaaccactcaactacatggaaactgaacaacctgcttctgaatgactactgggtacataatgaaatgaaggcagaaataaagatgttctttgaaaccaacgagaacaaagacaaaacataccagaatctctgggacacattcaaaacagtgtgtagagggaaatttatagcactaaatgcccacaagagaaagcaggaaagatctaaaattgacaccctaacatcacaattaaaaggacttgagaagcaagagcaaacacattcaaaagctagcagaaggcaagaaataactaagatcagagcagaactgaaggagagggtcgggcgctggagaataggtgaagcagcggatttagttggggtttcttctcaggctatcagagatgccgagaaagcagggcgactaccgcacccggatatggaaattcgaggacgggttgagcaacgtgttggttatacaattgaacaaattaatcatatgcgtgatgtgtttggtacgcgattgcgacgtgctgaagacgtatttccaccggtgatcggggttgctgcccataaaggtggcgtttacaaaacctcagtttctgttcatcttgctcaggatctggctctgaaggggctacgtgttttgctcgtggaaggtaacgacccccagggaacagcctcaatgtatcacggatgggtaccagatcttcatattcatgcagaagacactctcctgcctttctatcttggggaaaaggacgatgtcacttatgcaataaagcccacttgctggccggggcttgacattattccttcctgtctggctctgcaccgtattgaaactgagttaatgggcaaatttgatgaaggtaaactgcccaccgatccacacctgatgctccgactggccattgaaactgttgctcatgactatgatgtcatagttattgacagcgcgcctaacctgggtatcggcacgattaatgtcgtatgtgctgctgatgtgctgattgttcccacgcctgctgagttgaatgactacacctccgcgagggaggnggaaaactctgactcaacacagcagtcacctgaaaatatttcccaaactcttcctcaaagggagctgctaccatattcagagtacctgaacacagtcgcgtacattatggagcctcaccaaatgcctcttggactaaattactcagggaaggaggaggaagagaatgagtggaagctgactttctcaagggattttgccgatttcggaaccaccatcaaacaggattttcgcctgctggggcaaaccagcgtggaccgcttgctgcaactctctcagggccaggcggtgaagggcaatcagctgttgcccgtctcactggtgaaaagaaaaaccaccctggcgcccaatacgcaaaccgcctctccccgcgcgttggccgattcattaatgcagctggcacgacaggtttcccgactggaaagcgggcactcgagacagcattcagcacgaagtggtttactaaaagccaatgtgctagaaaacttcagacagggacgttactcacacttttatggtggtataggatgtggaagtccaaatcatcccctggctggctctgtgtggataggggattctgggtacaagggtggcagaatgctgctgaacatttcaggaggagcgactcaagccttcgcgaaagaaaataaccaaaaagcatacaaagaaacgtacggcgtctctcatattacacgccatgatatgctgcagatccctaaacagcagcaaaacgaaaaataccaagtgcctcaattcgatcaatcaacgattaaaaatattgagtctgcaaaaggacttgatgtgtgggacagctggccgctgcaaaacgctgacggaacagtagctgaatacaacggctatcacgttgtgtttgctcttgcgggaagcccgaaagacgctgatgacacatcaatctacatgttttatcaaaaggtcggcgacaactcaatcgacagctggaaaaacgcgggccgtgtctttaaagacagcgataagttcgacgccaacgatccgatcctgaaagatcagacgcaagaatggtccggttctgcaacctttacatctgacggaaaaatccgtttattctacactgactattccggtaaacattacggcaaacaaagcctgacaacagcgcaggtaaatgtgtcaaaatctgatgacacactcaaaatcaacggagtggaagatcacaaaacgatttttgacggagacggaaaaacatatcagaacgttcagcagtttatcgatgaaggcaattatacatccggcgacaaccatacgctgagagaccctcactacgttgaagacgagggatcctntagaggattttgccgatttcggaaccaccatcaaacaggattttcgcctgctggggcaaaccagcgtggaccgcttgctgcaactctctcagggccaggcggtgaagggcaatcagctgttgcccgtctcactggtgaaaagaaaaaccaccctggcgcccaatacgcaaaccgcctctccccgcgcgttggccgattcattaatgcagctggcacgacaggtttcccgactggaaagcgggcagtgagcgcaacgcaattaatctctgaatcatttctcctggaaaacccagatgacctggctgacagcttcgtgtttctactgaaacctggtattccaacagacctgcagctgagggtcctgtctgttagaaggaaaactaacaaacagaaaggacatccacaccaaaaacccatctgtacatcaccatcatcaagaccaaaagtagataaaaccacaaagatggggaaaaaacagaacagaaaaactggaaactctaaaatgcagagcgcctctcctcctccaaaggaacgcagttcctcaccagcaacggaacaaagctggatggagaatgactttgacgagctgagagaagaaggcttcagatga

SEQ ID NO: 131009 - DNA, 678 bp, Homo sapiens; identical to SEQ ID NO: 125688

SEQ ID NO: 131010 - DNA, 1035 bp, Homo sapiens; identical to SEQ ID NO: 123566

SEQ ID NO: 131011 - DNA, 1057 bp, Homo sapiens
ggcacgaggcaaaacaccaaatggcggatgacgccggtggcagcggggggggcccgaaggccctggtgggccctgggatgggaaaaccccgttgctttccggcgaggttttcggcattgtcatccgggggccggggtcccggcccggtggacggggccggggccgagagccgcggagctcgcgggagcaaaggccgaggataaggattgggatgccggtcaccaagttggggccgctttggtcaaggaccattaaagatcaaagttcccctggaaggagatctatctcttctccctgccccattaaaggaatcagaggatcattgattttctttctggggggcctcctctcaaaggatgaaggttttgaatgattatgcccagtgcaagagcaagacccgtgcccggccagccgcacccaggcttcaaggccatttgttgctatcgggggactacaaatggcccacgtcggtctgggttgttaagtgctcccaaggaaggtggccaccggccatcccgtgggggcaatcatcctggccaagctctcccatcgttcccgtgcgcagaagggtatttggggaacaaagtattggcaaagccccaacactgtccctttgcaaggtgaacagggcgctgcggctctgtgctggtacgcctcatccctgcacccaaggggcctgggcatggtctccgcacctgtggcttaaaaagctgctcatgatggctggtatcgatgactgctacaccctcagcccgggggctgcactgccacccttgggcaaatttggccaagggccaccctttgattgccatttttaagaacctacaagctaccttgaccccccgacctctggaaaggaagattgtatttaccaagtttccctatcaaggagttcacttgaccacctcgtcaaagacccacacccagagtcttccgtgcagcaggactcagagctccagcttgtggctacaacatagggtttttatacaagaaaaataaagtgaattaagcgtgtaaaaaaaaaaacacagggcggccgctctagagtatccctcaa

SEQ ID NO: 131012 - DNA, 324 bp, Homo sapiens
ctgcgcaagcatcgtcagcgccgcttcggaactggcgttgggatgttccaaacgcattagtgcgccaagagccgcgccgcgatccagcgccggggcatcaattgcctgactgcgtcgctccagtaaggcgctcgccgacgaagcctcgtccgggcctcctgggagcggggtgtcaggtaccgtggcgcctcctcgcgttggtcttgctggttctcggcccccaaagcggagcgacggagacacagctgtggaagcatctggatccgctgcccaggtccccgagcttcccggaacccgaggccgcaggacactgaaggctgccat

SEQ ID NO: 131013 - DNA, 4128 bp, Homo sapiens
taaagggaccgacagcccgccccgggaggaaggggcgccaggcccgaaagccgcctccccctcccagacccgagagctcgtgcggggcaaagtgaaccgagccgctgggcgtgcaaggggaagcccaagcccgttctcccggccaaagtgaactttaatcggggtggttggatgcggagacggggcggcaggacctgctagaagtggccgaagatgaatccccagcaacaacgcatggccgctatagggaccgacaaggagctgagcgacctactggacttcagtgcgatgttttccccacctgttaatagtgggaaaactagaccaactacactgggaagcagtcaattcagtggatcaggtattgatgaaagagggaggtacaacatcttggggaacaagtggtcaaccaagtcctttcctatgattcatctagaggttttacagacagccctcattacagtgatcacttgaatgacagtcgattaggagcccatgaaggcttgtccccaacacctttcatgaactcaaatctgatgggaaaaacatcagagagaggctcattttccctgtacagcagagatactggattaccaggctgtcaatctagtctcctgagacaagatctggggcttgggagcccagcacagctatcttcttcaggaaaacctgggacagcatactattcattctctgctacaagttccaggaggagaccactccatgactctgcagcgcttgatcccttgcaagcaaaaaaagtcagaaaggtgcctcctggtttgccttcttctgtatatgcaccatccccaaattcagatgatttcaaccgtgaatctcctagttatccatctcctaagccaccaaccagtatgttcgctagcactttctttatgcaagatgggacccacaattcttctgacctttggagttcatcaaatgggatgagccagcctggttttggtggaattctggggacctccacttcccacatgtctcaatccagtagttatggcaaccttcattcacatgaccgcttgagttatcctccacactcagtttcaccaacagacataaacacgagtcttccaccaatgtccagctttcatcgcggcagtaccagcagttcaccttacgttgctgcctcacacactcctcccatcaatggatcagacagcattctaggaaccagagggaatgctgctggaagctcacagacaggtgatgcacttggaaaggctttggcatctatttattctcctgaccataccagcagtagttttccgtcaaatccatcaacaccagttggatcaccttcacctctcacaggtaccagtcagtggccaagacctggagggcaagcaccttcatccccaagctatgaaaactcactccactccctgcagtctcgaatggaggatcgtttagacagactggatgatgcaatccatgtgctgcggaaccatgctgtgggaccttccaccagtttgcctgctggtcacagtgatatacatagtttattgggaccatcccataatgcaccaattggaagcctcaattcaaactatggaggatcaagccttgttgcaagcagtcgatcagcttcaatggttggaactcatcgggaagactctgtcagtctcaatggcaatcattcagtcctgtctagtacagtcactacttcaagcacagacctgaaccataaaacacaagaaaattatagaggtggcttgcaaagtcagtctggaactgttgttacaacagaaatcaagactgaaaacaaagaaaaggatgaaaaccttcatgaacctccttcatcagatgacatgaagtcagatgatgaatcctcccaaaaagatatcaaggtttcatctagaggcagaacaagcagtactaatgaagatgaggatttgaaccctgaacagaagatagaaagggagaaggagaggcggatggctaacaatgccagagaacgcttacgcgtgcgggatattaatgaagcattcaaagagcttggccgaatgtgtcagcttcacttgaagagtgaaaaaccccaaacaaaactccttattcttcatcaagccgtggcagtcatccttagtctagaacagcaagtcagagagaggaaccttaaccccaaagcagcctgccttaagagaagggaagaagaaaaagtttctgccgtatcggcagagccgccaaccacactgccaggaacccatcctgggcttagtgaaactaccaaccctatgggtcatatgtaaacatcagccagttccagagttatcagtaggctagatagaaggtgacctctcctcataaggacttggacaactcagattatctgaagacacaaacctgacaggagggagaagaaaaaacaaaacacttgaaccaagaaactcaaatgtaatcctacgatcaaagcaactggtcaacacttccatcagaagtgaagataggaagctcatcagatagaacatcagcccatgagatgtttgcaacaaaccttttgttgcaagcagtgtgtcgcttctgcacaatcagagactgtctcgatctctccactcaccgtggaagttgccttgtgcctaaactgaattgacaaatgcattgtaactacaaattttatttattgttatgaaactgtaaggtctacatataaagggaaaaagttaatgtggaaagctgatctacactcagctgatgccagcatacattaaagcggttcacgtgcagagaacaaagcagtgacaaccattggcccttagcattcccggcatacctattagtgtcttaaaaaggaagggaaaagtcttttgttgccctctcctatcctcttgccatatgaatagcgttttccatgaaataggaaaatattacttggtatagcatttctcttgctctcattttttgatttatttttattttctctttgtgggtgttatatttgatctctaaatctgaacagtttatggtcacagtccagcctcctccgtgcagccctgtgtgctttgcacatttaccttacagtggtaagcagagaccatctgtgaccatagcctagctagcattttaaacggggaaattttgttctctaggttttcccccaaataaacattgctttatttctaataataaccaagacttttcaagcttctagatctcataggaaagcttgtaatagcaaaattgtaaattacaagggaagaatctactttttagaaatcgctttgttttccaagcagtaagtactacatacagtacttgtaaagtgttagctgtaagtaagcacaaaatacatttaaaatacaaagacgattttttcaggctgtgattatggtgaacataacaaaacccagtagtcaccgaggcaggtagtgtgataaatgaacacaccactctgaggctaattacctaatggaatacaagagcaatggtcacccgtatttccttatcctagcctttatttctctgtcatttggatggctggtcaatggggaagaattgagtgggtgatttaatcaactgcaaaccatctgcccctgtcccaaaatgatgagccagattagcattaaaccagtacttgtcagtccatcttaatactgttcattaaggcactctctgtctctaatccttaggagttgttttaaaagacataatcactttgaacttccatgaaacctgcctgccaccacaacaaccctgggagagaaaaacatgctaaaggaggtatcttggcttaataattccttatagccaatatcaacagtggcaatcagcacacagaggaaaggacccaaatcactatgtagcttaaagatttctgttaatttgaaagaacaaaaacaagacagaacttctggtactctaatcaggatgattcctaacaagtcagtcatttgtgaacttagtggactttttggttactttaatttgcatatattctccagttacatcggactctatctgtggccttgttcttcatttcagtgttaatcagctaaacagaagttgttgcttatgatgtgtgagtgaacatatgccactgcctggcccttttttcttcagagcttgttgtctttttcgctatattagactttgcagtatgcccagaagctttccttc

SEQ ID NO: 131014 - DNA, 1380 bp, Homo sapiens
atgtctgctctcaccacctccattaaacatttaactggaggttgtaagcaagaaaaagaaattaaaggcatccagatggaaaagaaagaagtagaactgtcattatttgaagacgacatgaccatctatgtaggaaatcctaaagaatctacaaaacagccaatgggactcccacattgccgagccagtggagaagccccaggctccatgtggtggctgctgacagctccagtttacataatccttactgttagcaatctcagtggaagagtgcatgcttccttcccacaggtgccagcaatagtcttcttacatttcactggctctgattgggatatgtggctagaggaatccagtagctcaggtctgattcatgtcattaatgtttttgaaaatgaagttcactccacccaaaagacattgactgaagtaacagaagaggaaaatcaggggatggttaccagaagaagggtgaatgttaccttgcgttccagggatgaagcccacttgattacagtggataagctttttgatgtgctgctggattcggtttgccagtattttattatggatttttgcatcgatgttcataggaagaatcaatatcatgaaaatggccacactgcccaagaattggaaaaaaccactttaaagttcatatggaaccgaaaaagagcccgcatagctgagacaatcctaagtcaaaagaacaaagctggaggcatcacgcttcctgacttcaaactatactacaaggctacagtaaccaaaacagcatgggacatggatgaagctggaatccatcattctcagcaaactatcacaaggacaaaaaaacaaacaccacatgttctcactcatagatgggaattgaacaatgagaacacttggacacaggaagccctcctggacgggagcctctgggcccagcttagggtggcgtccagcgtgacctactcgggaatggcagccttcagtgtcctgcggcctcgggttccgggaagctcggggacctgggcagcggatccagatgcttccacagctgtgtctccgtcgctccgcttcgggggccgagaaccagcaagaccaacgcgaggaggcgccacggtacctgacaccccgctcccaggaggcccggacgaggcttcgtcggcgagcggtcggggcctgcttctcgaggacctgctagaagtggccgaagatgaatccccagcaacaacgcatggccgctatagggaccgacaaggagctgagcgacctactggacttcagtgcgtactcctcaccattttcctctccagtatcagatgtagtttatggtacctgaaagatgtcagcgacaagaaaagtagtccagagctagaatttcgagccttctga

SEQ ID NO: 131015 - DNA, 554 bp, Homo sapiens
tttttttttttttgttttcttgatgtcttctttattttaacccggctagacttgtatttggaagatggctacccaccatccaggggacccgtttttttgaggacatgcagaaagaatgggttacctctgaagcgctctcagaaaatgaaagaaaaacttttcccaacaaagaccaggaaattgctcctctcattggcccaaatatgttacgctcattgccagccaataactgtggcagggaatgggattctgctgatttaggttggaattatgctacgttgcttagattgggaccacatgcccctgtaagtaggcagagcagggatgtgactcagaactgggcttgtttaccaagataaggaagagtggatactggggagtctaggccaccataagtttcaggtacagccaatgcaaagccttggaaatccacctgacagctccggttgtaccgtccgccctccgtatctggggtttccaaattccgggattcaatcaactctctttccatcccagtccggaatccaaaggctccttcttgccatgttgtcctc

SEQ ID NO: 131016 - DNA, 915 bp, Homo sapiens
atgagtataagagaaaaacggaacacctttcaggttaaagccaagccattatcagagctcctccaggatgtgattcaaagaaatagaggtggactcaatctccaggggacaagtactcccatattgcttccctttcaccctctcccaattcagccaatgggactcccacattgccgagccagtggagaagccccaggtatagaatccagacttgtatttggaagatggctacccaccatccaggggacccgtttttttgaggacatgcagaaagaatgggttacctctgaagcgctctcagaaaatgaaagaaaaacttttcccaacaaagaccaggaaattgctcctctcattggcccaaatatgttacgctcattgccagccaataactgtggcagggaatgggattctgctgatttaggttggaattatgctacgttgcttagattgggaccacatgcccctcttagggtggcgtccagcgtgacctactcgggaatggcagccttcagtgtcctgcggcctcgggttccgggaagctcggggacctgggcagcggatccagatgcttccacagctgtgtctccgtcgctccgcttcgggggccgagaaccagcaagaccaacgcgaggaggcgccacggtacctgccaccccgctcccaggaggcccggacgaggcttcgtcggcgagcggtcggggcctgcttctcgaggacctgctagaagtggccgaagatgaatccccagcaacaacgcatggccgctatagggaccgacaaggagctgagcgacctactggacttcagtgcgtactcctcaccattttcctctccagtatcagatgtagtttatggtacctgaaagatgtcagcgacaagaaaagtagtccagagctagaatttcgagccttctga

SEQ ID NO: 131017 - DNA, 1788 bp, Homo sapiens
atggccccaccagacgagtggatggggcaccttctgcaacaggcccagggccaagcagaggagcctcttcttgtggccaccagcaacaccaccacaagggagtttctctcaggccaccaccggtgttctcttaaggcccaaggactctccagtcagcttgtggtgaatgctgccaggcttgggactcaccctttagggcagtgggctcccctctggcccaaggcaggtccagaaatgctgaccaagggcctaggcctgcactcagggaccccaggggcctgcttcattccctactccactgcagctgagctggtacctgagctcccacagctgagaatttgcttggttacacctgaagccagcacatctcagagcccaaggcccatggcctatcacctgggtatggctgctgggtatttagggcccaagggctctttaatcagcagaaatgtctgttatgagctagagcctcatgactgcctggtgccctatcctactgtggctgagctggtatccaagatgtgcgtagattcttcaaaccaggcggccactgtcaagagatgggagacgggtggcattggcacttcaagactgtctttcctaccccccttcagtgcctctttcagtgatatgaagttaaaaccagctgcgccctgtgacatccctgattccgtgacgcgccggcctagcccttgcgggaccctatggccagagggtgcccggcgcgcgatgctttgcacagtttctggcgtcctgattccaatggtcaccaagctctgcacacttggccccagccgcagacttcggaaacttttggaagccgaatttctaagggaaggtcaaggaccgctacaaatcctctatgtcaatgggaagcactgggtccgcacctggcccctccccaagctcctcctggctgggtctatccagcatccagagagagatggtccccaaggcctggaggcgctttcccaacagcccaccactcctgagcatcaccgggccagacttttccgaggctcacctggcctacatgaagtggtggctttggaaggcccggcaccccaggcccgcccgcagcctggtggtcgagcttgtaacatcaacatcaacaaaaaagatgtcccatctgaagatcaccaacatcaaataacaaaggtagataaatccatgaagatgagggaaaaccagcacaaaaaggctgaaaattccaaacaccagaacgcctcttgtcctccaaaggatcataactccttgccagcaagggagcaaaactggatggagaatgaatttgatgaattgacagaagtaggcttcaaaacgtgggtaacaaccaactcttctgagctaaaggagcatgttctaacccaatgcaaggaagctaagcaccttgaaaaaagagcactgattggtccattttacagtgtgctagttggtccattttacagagtgcttactggtccatcttacagagtgctgattggtgcattttacaaacctctagctacctacagtgtgttgattggtgcattttacaatcctagctacagagtgctgattggtgcattttacaattctcttgtcttcattcaggcaactgagcattcggcaccatctcttcaggatcaacatctcagaagaaagcagaagacaacccaatcaattcttggcttttgggtttcaaagcctcaggggacaccggaaatgcctgatgagaaaaaggctaacttgtcacaccccacacgccctcctccaacgctgccagacaggacagattctccgtactga

SEQ ID NO: 131018 - DNA, 3039 bp, Homo sapiens
atggatgttggctgggacctcggtgaggactgctggcaagaacacctacacacggccttttcctttgactgctggccttgctcacagaatggtgaccgggttcccagtgtgaacccagtgggcgggggggccccgcgctcctacctgcaagtggccagtgccgagtgctgggccgccgctcctgccgtgcatgttggggagccagtacatgcaggtgggctccacacggagaggggcgccgaccccgtgatagggctttacctggtacatcggggtggcgcgtgccagacaccaacggtcggaaaccgccagacaccaacgctcggaatccacgccaggccacgacggagggcgactacctcccttctgaccctgctgctggcgttcggaaaaaacgcagtccgtacagaacctgctaaggccatcaaacctattgatcggaagtcagtccatcagatttgctctgggccggtggtaccgagtctaagcactgcggtgaaggagttagtagaaaacagtctggatgctggtgccactaatattgatctaaagcttaaggactatggagtggatctcattgaagtttcaggcaatggatgtggggtagaagaagaaaacttcgaaggcttaactctgaaacatcacacatctaagattcaagagtttgccgacctacctcaggttgaaacttttggctttcggggggaagctctgagctcactttgtgcactgagtgatgtcaccatttctacctgccatgtatcggcgaaggttgggactcgactggtgtttgatcactatgggaaaatcatccagaaaaccccctacccccaccccagagggatgacagtcagtgtgaagcagttattttctacgctacctgtgcaccataaagaatttcaaaggaatattaagaagaaacgtgcctgcttccccttcgccttctgccgtgattgtcagtttcctgaggcctccccagccatgcttcctgtacagcctgcagaactggcccctctcctgcctggacggctctgctggtctccccgtcccctggagaagaacaaggccatgggtcggcccctgctgctgcccctactgcccttgctgctgccgccagcatttctgcagcctagtggctccacaggatctggtccaagctacctttatggggtcactcaaccaaaacacctctcagcctccatgggtggctctgtggaaatccccttctccttctattacccctgggagttagccacagctcccgacgtgagaatatcctggagacggggccacttccacaggcagtccttctacagcacaaggccgccttccattcacaaggattatgtgaaccggctctttctgaactggacagagggtcagaagagcggcttcctcaggatctccaacctgcagaagcaggaccagtctgtgtatttctgccgagttgagctggacacacggagctcagggaggcagcagtggcagtccatcgaggggaccaaactctccatcacccagggctccagcgcggcccaagcctccacgaggagcgccgccccctgctccacggcgcccggtcccatcgaccgcccaagggccgaggagtgcgggagcaaggcgcagaactggcaggcagctctacctgctgcctggtcccttggctgcaaaaggaagagggagtgtttggatgaatctgatgatgagccagagaaggagctcgcccctgagcctgaggagacctgggtggcagagacgctgtgtggcctcaagatgaaggcgaagcgacggcgagtgtcgctcgtgctccctgagtactacgaggccttcaacaggctgcttgcccctggggtagatcccagccccccacgtaggtcccttggctgcaaaaggaagagggagtgtttggatgaatctgatgatgagccagagaaggagctcgcccctgagcctgaggagacctgggtggcagagacgctgtgtggcctcaagatgaaggcgaagcgacggcgagtgtcgctcgtgctccctgagtactacgaggccttcaacaggctgcttgcccctggggtagatcccagccccccacgtaggtcccttggctgcaaaaggaagagggagtgtttggatgaatctgatgatgagccagagaaggagctcgcccctgagcctgaggagacctgggtggcagagacgctgtgtggcctcaagatgaaggcgaagcgacggcgagtgtcgctcgtgctccctgagtactacgaggccttcaacaggctgcttgcccctggggtagatcccagccccccgcgtaggtcccttggctgcaaaaggaagagggagtgtttggatgaatctgatgatgagccagagaaggagctcgcccctgagcctgaggagacctgggtggcggagacgctgtgtggcctcaagatgaaggcgaagcgacggcgagtgtcgctcgtgctccctgagtactacgaggccttcaacaggctgcttgaggatcctgtcattaaaagattcctggcctgggacaaagatctgagggtgtcagacaagatcccatcggagcccaccatcctgggagcatcacctaaaacccttcctccggcttctcggatttgcatccgaccttcgaatacccctccaccccgcaatttccacatgagcacagtcaccccaatgctgagctatctggccaatgacatggaggaggacgacgaggcccccaaacaaaagatcttctacttcctgtacgggaagacccactctcacatacccttgcgccctaagcattggttccagttatgccgtcccatgaacccgagggccaggaagaactgctctcagatagccttgttccagaagcgtcggttccagttcttctgttccatgcgctgcagggcttgggtttccccggaggagttggaggagaacaccggacccaggggagatgtggattttcagcaggaactttattccagtgctaatggcagacatcaggaaggaggagaggagccatttgtgcagatcatctag

SEQ ID NO: 131019 - DNA, 712 bp, Homo sapiens; identical to SEQ ID NO: 114549

SEQ ID NO: 131020 - DNA, 513 bp, Homo sapiens; identical to SEQ ID NO: 128511
  misc_feature (1)...(513): n = a,t,c or g

SEQ ID NO: 131021 - DNA, 1338 bp, Homo sapiens; identical to SEQ ID NO: 114554

SEQ ID NO: 131022 - DNA, 578 bp, Homo sapiens; identical to SEQ ID NO: 128513

SEQ ID NO: 131023 - DNA, 808 bp, Homo sapiens; identical to SEQ ID NO: 128514

SEQ ID NO: 131024 - DNA, 1305 bp, Homo sapiens; identical to SEQ ID NO: 128515

SEQ ID NO: 131025 - DNA, 1564 bp, Homo sapiens; identical to SEQ ID NO: 128516
  misc_feature (1)...(1564): n = a,t,c or g

SEQ ID NO: 131026 - DNA, 1812 bp, Homo sapiens; identical to SEQ ID NO: 128517

SEQ ID NO: 131027 - DNA, 1724 bp, Homo sapiens
  misc_feature (1)...(1724): n = a,t,c or g
tgggggaggattatggattaggcttctggactcgtggttcgtgatgttgtcacgttagaaacagatctagcacggttacaagtttagatctgaagtgacacaaaaggccccagctgtgatgaagtccaaagccacattctctgaagggtgccctactccctgggaagacccacccaaagtccttgctatgaagcagatcactggggctgaccttgggtgtattaagtgagttttggagtcgtggtcaccaaaatgtgagtttcacagttgaacacgatggttcagaagcagggtatagaatgaaaggcagcagataaaattgtatttctcaattgctctgaactctagctagacttgacatgggacgtgaataaccttcctgtctagagagctgtctccttgaggtgtgacattgtctctctcacttccagaacaccggacccaggggagatgtggattttcagcaggaactttattccagtgctaatggcagacatcaggaaggaggagaggagccatttgtgcagatcatctagaagaacctggaccattcttgacaagagctgaatacagggatcacgcttgtcctccaaggagcaggggtggggttggggtacttctaggaaatncaaattttgcagggctgtacaggaagcatggctggnggaggcctcaggaaactgacaatcacggcagaaggcgaaggggaagcaaggcacgtttcttcttaatattcctttgaaattccttatggcgcacaggtagcgtagaaaataactgcttcacgctgactgtggtccctctggggtggggggtagggggttttctgggatgattttcccatcgtgatccaacaccagtcagagtcccaacccttcgctgatacacgggaggtagaaatggtgacatcactcagtgcacaaagtgaggctcagagcttccccccgaaaagccaaagtttcaacccgagttaggtcggcaaactctcgaatcttagatgtgtgatgtttcagagctgaaagagattaaggccttcgaagttttcttcttctaccccacatccattgcctgaaacttcaatgagatccactccatagtccttaagctttagatcaatattagtgggcaccagcatccagactgttttctacaatcttcttcaccgcagtgcttagactcagtactaccggcccagagcaaatctgatggactgacttccgatcaataggtttgatggccttagcaggttctgtactccagctctcagctcgctccaaggatgcaacaccggatccgcctcggggactgggaaagttccctccacggctcccacaggcgccccgcctcctgggctcccaacggctgctttcgacgttgtgctccaccctttccgggcggggcggaaaaaatacttcccgtctctccttttcgcctagtggctctgtcaaaggtcgagtccgtgacgtcaaagagcctggaccaatcagagcacaccggactgcgttttttccgaacgccagcagcagggtcagaagggaggtagtcgccctccgtcgtggcctggcgtggattccgagcgttggtgtctggcggtttccgaccgttggtgtctggcacgcgccaccccgatgtaccaggtaaagccctatcacggggtcggcgcccctctccgtgtggagcccacctgcatgtactggctccccaacatgcacggcaggagcggc

SEQ ID NO: 131028 - DNA, 1553 bp, Homo sapiens
atggcgatggtctggatgtgtgcaggacccacgctgcaccaactggaggacctacctggatttctgcaaatcacgctgaaaaaaggggctttatttcctctttggacacacaacgtaaggatgaaagaacaacaatctttaggtcatgcagacctccctgatggcatccagaagtttcaccgaggggtgcagacagtgttgatcattggggatgtcacctcccggatacccacctcactcatgaaagcccccagttatgtgagagttcaagtcagtcggtttgtccagaagaaggccatggacagaacggagactaggttccgtaagaggggacagattacgggaaagatcacgaccagccgtcaactgcacccccagaatgagcagagtccccagcggagcacctcggggtaccccctccaggaggtggtggatgatgaagtgttgggaccatcagcccctggggtagatcccagccccccatgtaggtcccttggctggaaaaggaagaaggagtggtcagatgaatctgaggaggagccggagaaggaagctcgcccctaagcctgaggagacctgggtagaggagatgctgtgtgggctcaagatgaagctgaagcaaccgcgagtgtcatccatcctccctgagcaaccacaaggacctaaacagtcagcttgcccctggggtagatcccagccccccgcataggtccttttgctggaaaaggaagatggagtggtgggacgaatctgaggagtcgttggaggaggagccacggaaggtgctcgcccctgagcctgaggagatctgggtggcggagatgctgtgtggcctcaagatgaagctgaagcgacggcgagtgtcgctcgtgctccctgagcaccacgaggccttcaacaggctgcttgaggatcctgtcattaaaagattcttggcctgggacaaagatctgagggtgtcggacaagtatctcctggctatggtcatagcgtatttcagccgggccggcttcccctcctggcaataccaacgcattcatttcttcctggctctctacctggccaatgacatggaggaggacgacgaggactccaaacaaaacatcttccacttcctgtatgggaagacccgctctcgcatacccttgctccgtaagcgttggttccagttaggccgttccatgaacccgagggccaggaagaaccgctctcgcatacccttgctccgtaagcgtcggttccagttaggccgttccatgaacccgagggccaggaagtaccgctctcgcatacccttggtccgtaagcgtcggttccagttacgccgttgcatgaacccgagggccaggaagaaccgctctcagatagtcctgttccagaaacttcggttccagttcttctgttccatgagcggcagggcttgggtttccccggaggagttggaggagaacaccggacccaggggagatgtggattttcagcaggaactttattccaatgctaatggcagacaccaggaaggagaagaggaaccatttgtgcagatcatctag

SEQ ID NO: 131029 - DNA, 561 bp, Homo sapiens
atgctgcctgatcacctcaaaagccctgtagaccaccacagacgccgagcttcgagtaactctcacagtggaagtgcggaaggtgaagcgcgtccgctgaaaatcggtatttttcaggatttggtcgatcgtgttgctggggaaatgaacctgagcaaaacgcaattgcgatccgctttacgtctctacacttcgagctggcgttatctttacggtgttaaacccggcgcaacgcgtgtcgatcttgacggcaacccatgcggaacgcaatatggagaaaattctgataaaggagaatttttctatggaatatgtctaaatgctgattatctggcagacttgactttgtcactcttagagaatggaaatctgcacttggttcacgtgggtacaggaagaatgcttttgaaggaccctcattatggtggtgcttgtctttttccggcttatgccgtggctgccgtccctgaagttttgcaggccgtggcgctgccattgtcaataatgtttaagggagtaccatctgtcggttgggaaacacttgtgatattgagtcattga

SEQ ID NO: 131030 - DNA, 768 bp, Homo sapiens
atggctaaaagaagccaacatacagctcaggccattgcttcacagggttcaggccccaaaccttggcagcttccacatggtgttgggcctgcaggtgcacagaagtcaagagttgaggtttgggaacctctggctagatttcagaggatgtatggaaaggcctggatgtccaggcagaagtttgctgcagggcagagtcctcatggagaacctctgctagggcaatgcagaagggaaatctttgagaagagggccactatcctccagacccagaacagtagatccaccgacagtttgcatagtgtgcctggaaaagccacagacactcaaggccagcccatgaaagaagccaggagtggagctgtaccttgcaaagccatagagtcagagctgcccaagactctgggttcccaccttttgcatccgtgtgacctgaatgcatcagctgagtttggcctggtttttctttgtgctctaacaggacagcagcgagttcagtgcttcacaattgctgtgtctctcacagtggtcaaggaggctcactgcaccaagccacagctgcctggggtcaatgagctgaaagagaagggcaacaaggccctgggcgtggaaaacatcgacaatgccttacagtgctactctgaagccattaagctggatccccacaaccacgtgctctacagcaactgttctgccacctatgccaagaaaggagactaccagaaggcttacaaggacggctgcaagaccgtcgacctaaaagtttga

SEQ ID NO: 131031 - DNA, 418 bp, Homo sapiens
gctcatcactcttggggttccccaggaccttgagcacctcggcgttggtggggttctggcccagggccctcatcacgtccccacactggctgtacaggatcttgccatcccccactcggtcaaacagctcgaaggcctccttgaactcctccagctggtccttgttaaactcgatcaccactttggagagatcgactggaggctcctgggttttctgaggggcctgggggacagctggctcagctttggtcttggctggaggagcccctgctgctgctggcttagcagcaggtttggagatggagggccctgctggtttcttcacgggaacatccttcttgggaggcatgatgtccggtggccaaaggacagtgtgcggatgggggcacccatctcctgcggggtccgtgtctggggc

SEQ ID NO: 131032 - DNA, 1968 bp, Homo sapiens
ctagttgatgctgtcctcatgtcctgccagaacagtctccatctcctcctcagccatcttccctcccagggtggtgaggacttgtctgagctctgctcccgtgactttgctgttcccctccttgactaacacatgaagcccctccaggtagtcctcatatgtgccttggttctgcttcttggctgctgcctggagcatgggcaggaaagtcttgaagtccacatgccgggacttcaggtcatcactcttggggttccccaggaccttcatcaccttggcactggtgaggttctggtccagggcccccatcatgtccccaaactggctgtatgggatcttgccatcccccactcagttaaacagcttgaaggccaccttgaactcctccagctgatccttgttaaacttgatcaccactttggagagatcaactgggggctccttggttttctcaggggcctgggggatgggatagctggctcagctttggtcttggctggaggggcccatgctgctgctggcttggcagcacctttggagatggagggccctgctggttcctcccagaatatccttgggaggcatgatgtctggtggccaaaggacagtgtgcggatgggggcacccatctcttgcaggactcatgaaatggccacagatgataagacgtccccaacactggactctgctaatgatttgcctcgatctcctactagtccttctcatctcacacactttaaacctttgactcctgatcaagatgagcccccttttaaatcagcttatagttcttttgtaaatctctttcgttttaacaaagagagagcagaaggaggccagggagaacagcagcctttgagtggaagttggaccagccctcagctcccttcgaggacacagtctgttaggtcacccacaccttataaaaagcagcttaatgaggaactccagcggcgctcttcagcattagacacaagaaggaaagcagaacctacctttggaggtcatgaccctcgtacagctgttcagcttcgaagcctcagcacagtattaaaacgcctcaaggaaatcatggaggggaaaagccaggatagtgacctgaaacaatactggatgccagatagccaatgtaaagagtgctatgactgtagtgagaaatttacaacctttaggcgcagacaccattgccgactatgtgggcagattttctgcagtcgttgctgtaatcaagaaatccctggaaaatttatgggctatacaggagacctccgagcttgcacatattgtagaaaaatagccttaagttatgctcattccacagacagtaattctattggggaagacttgaatgctctttcagattctgcttgctctgtgtctgtgcttgatccaagtgaaccccgaacacctgttgggagtaggaaagccagccgtaacatatttttagaggatgatttggcctggcaaagttggcattctgttggtggggaaccagccaaaaaggcttctggaatgttgtccttcttcagagggacagcagggaaaagccccgatctctcttcccagaagagagagaccttacgtggagcagatagtgcttactaccaggttgggcagacgggcaaggaggggaccgagaatcaaggcgttgagcctcaagtaatgaatcccccggtggaactcagggagaaggagggtttagcttggacactgtgtgtccaggaccgtgggaagggggcaggctgtgttgctcagaggcatctggtgcaagaaactgctaaggacttcaaaacagatcaacacatccagagcacagctgctggtgctttgcaggagaaaagtgacgtctatcaggttggcctctctggagacaccgagctgtgtgcaatccaggccaaatgtgtaacaattatgccaaaagacatccatgctgcattcatggagaacttgcttgacaatccactatga

SEQ ID NO: 131033 - DNA, 1065 bp, Homo sapiens
atggacaacttcttcgcccccgttttcaccatgggcaaatattatacgcaaggcgacaaggtgctgatgccgctggcgattcaggttcatcatgccgtttgtgatggcttccatgtcggcagaatgcttaatgaattacaacagtactgcgatgagtggcagggcggggcggctgctacaattgcctgggggttcacttcaggccttattcatctgattcactcctgtgcctggagatgtcactcaaggaggctggagagcagcaaagatgggttcctcttccttcttctgggacctctgccctcaggagacaccaacctgatgccagtacgatcactcctgtataggatgtctgacaacccttgctggaaggtctcacccagttgggtagcacaaggagcaagacctgttctaagaagcactttgtcctttggaggaggggtgacaaacaagaaacccacacaggcgtccatcacaaaggtcaaacagtttgaaggctccacatcatttgttcggagatcacagtggatgctcgagcagctttcgccagaattaaatccaagacctagcttgctgcctgttgtcgacttaaagatcccccttgagaagaatccctttgctggaaatatttctgcgctggctgatgcggaaaatatttcacgtaagattattacccgctgtatcaacaccgccaaattgcctaaatcagttgttgctcttttttctcaccccggtgaactatctgcccggtcaggtgatgcacttcaaaaagcctttacagataaagaggaattacttaagcagcaggcatctaaccttcatgagcagaaaaaagctggggtgatatttgaagctgaagaagttatcactcttttaacttctgtgcttaaaacgtcatctgcatcaagaactagtttaagctcacgacatcagtttgctcctggagcgacagtattgtataagggcgataaaatggtgcttaacctggacaggtctcgtgttccaactgagtgtatagagaaaattgaggccattcttaaggaacttgaaaagccagcaccctga

SEQ ID NO: 131034 - DNA, 561 bp, Homo sapiens
atggagactgggaagtccaaaatctgcaaggcaggctggcaggttggaggcccaagaaggagccagtattgcagtacaagtccaaaggccttctaccagcaggattccttcttgcttggggaggtgtcctgtagaaacagcactgaatgtggaaacaaaccaccaacttgcaggtgcactaatctgagtgatcttttcttggcagtgacaaacaagaaacccacacaggcgtccatcacaaaggtcaaacagtttgaaggctccacatcatttgttcggagatcacagtggatgctcgagcagcttcgccaggttaatggtatcgatcctaatggggattcggcagagtttgatttgttgtttgaaaatgcttttgaccagtgggtagccagcacagcgtcagaaaaatgcaccttcttccagatcctccaccatacctgccagaggtacctcacggacaggaagccagagtttattaactgccaatccaaaattatgggaggtcatccttcagtgatcccacaatcatttactcagcgctatgtaaatgtgctaaactag

SEQ ID NO: 131035 - DNA, 1387 bp, Homo sapiens
aagttctgctccttcataaggaccttgaagtactaggaggaaaggtgctttgtgtgtggagttttccatgaagtgcagtcccaactaaaaggctgcgttaaagattcactgcgtgctgtcctcacttgttctacaatgagtgccaaatctgctatcagcaaggaaatttttgcacctcttgatgaaaggatgctgggagctgtccaagtcaagaggaggacaaagaaaaagattcctttcttggcaactggaggtcaaggcgaatatttaacttatatctgcctgtcagtgacaaacaagaaacccacacaggcgtccatcacaaaggtcaaacagtttgaaggctccacatcatttgttcggagatcacagtggatgctcgagcagcttcgccaggttaatggtatcgatcctaatggggattcggcagagtttgatttgttgtttgaaaatgcttttgaccagtgggtagccagcacagcgtcagaaaaatgcaccttcttccagatcctccaccatacctgccagaggtacctcacggacaggaagccagagtttattaactgccaatccaaaattatgggaggaaacagcatcctccattcagctgctgacagcgtgaccagcgcagtgcagaaggcaagccaggccttgaatgagccgtggagagcggattaggccgagcagaggagaagacagaagacctgaagaacagcgcccagcagtttgcagaaactgcgcacaagcttgccatgaagcacaaatgttgagaaactgcctatcctggtgactcttcttaagagaaactgaagagtttgttcagcagtttttacaagaattcgggacctccgcttgcttctttttttccaatatttggacacttagagtggtttttgttttttcttttcagatgttaatgtgaaagaaagggtgttgcatttttacatttccctaatgatcttgctaataaatgctacaatagcatcggcttcattttgggtttttgcctcctcccactgtgtgtatgtgtgtatatgtatgttttgaatatgttttctttattaaaaaatattttttgtagtttggaatatgaaatttggaccaaatgataaactgcgctgagtctaaactggcaacatgtatttttttctctgatattaagcaggaaggcattttaatgtggtgacatcagatgttatttttcctagatgaaaataaaagtcaagcagtgattagtttccactcactggtcctagctacacttaatttgaagattaaaattctacattgtgggaaaacaattgaatttattgggaaaaacagcaggtccttagattttgctccttgcatagtaatcttttgcatgaaccatcaccagcgttcaaaa

SEQ ID NO: 131036 - DNA, 1017 bp, Homo sapiens; identical to SEQ ID NO: 126213

SEQ ID NO: 131037 - DNA, 2967 bp, Homo sapiens
atgggcgaggacttcatgactaaaacaccaaaagcaatggcaacaaaagccaaaattgacaaatggcatctaattaaactaaagagcttctgcacagcaaaagaaactaccatcagaatgaacaggcaacctacagaatgggagaaaatttttgcaatctacccatctgacaaagggctaatatccagaatctgcaaagaacttaaacaaatttacaagaaaaaatcaaacaactccatcaataagtgggcaaaggatatgaacagacacttctcgaaagaagacatttatgcaaccaaaagacacatgaaagaatgttcatcatcactggccatcagagaaatgcaaatcaaaaccaccatgagatactatctcacaccagttagaatggcaatcattaaaaagtcaggaaacaacaggtgctggaaaggatatggagaaataggaacacttttacactgttggtgggactgtaaactagttcaaccattgtggaagacagtgtggcgattcctcaaggatctagaactagaaataccatttgatccagcgatcccattactgggtatatacccaaaggattataaatcatgctgctataaagacacatgcacacgttcaatcctgtatgcccagagcttcctgggcaccagtcatttgaatgggcagttcctgtgtttaaccaggaaggtcgtgggaggatttcgaacctgtcagaagcaaagtgaagggctccagactctccggacagatgggctgaggcactcctgggattgtctttatacggccatggaatctgatagtggtggtcatcgcaaagtttggaaacccggctactgtgtggtccgattcagacgggatgcgaaggcgctgaaatccgtgcgagaggctgcccccgctgccggggactcgcgtcagcgcggccggagctacggtgcccgcgccctggacgcaccagcccgagagcacgcggagtggaccaaatgcattgttcagctgggtcatctccttgctacccagcatcccgcggcgcccacatgtggagtcgtttccagcgccctggtcatgcactcaacagatgtctgtctagcccccactatgcaccaggcactggactgggcagcaggaatttggtttacaggaagattaggactcagagagcataaatcactggcccagggtgactcagtctgtccatgtgaaagtgaacttggtgatttccaagtctatggcttggtcagtacagaaggagtggtgtcctgctttggagagaagaccccgcagcatcctggccctcctgcttcattgtccctggccaacaggtgccacaacgttgtgacagctgtaggagcctggccagctcatgggagcatccttggaaatgttccagaagcccctgtgggagctgatgtgttgggggctggaggatgtgactgggcagacaaagaggccctggcccctgggcaaagggcaaaggtgcacattcttcttgagagttctggacagtctgatccatcctatgctgtccttcctgacagctgggcagccacggagggtttcccaacttacagatctcaggtctcctctccccgcatcccgggtagttccatctggttaggcagtgggtctggttggcctatacttggggaactcagggaatgtgaccagatgttctcctgcatgttgcccactggttgtgcctccttccaggatccaggacgttatggtgattatgacctccctatggatgaggatgaggacatgaccaagacccggaccttcttcgcagccaagatcgtcattggcattgcactggcaggcatcatgctggtctgcggcatcggtaactttgtctttatcgctgccctcacccgctataagaagttgcgcaacctcaccaatctgctcattgccaacctggccatctccgacttcctggtggccatcatctgctgccccttcgagatggactactacgtggtacggcagctctcctgggagcatggccacgtgctctgtgcctccgtcaactacctgcgcaccgtctccctctacgtctccaccaatgccttgctggccattgccattgacaggttttcttccaccatctatgacagcttcttgatctgtccccaggtgggtggctgtgttcaacgggtgttgcttgtgacagttggggtcctcctcagcatcagtctcgacatgactgcaaatggggggtcctcgggatcctcctggaatctcttcctcagcatctggctcatgataagatatctcgccatcgttcaccccttgaaaccacggatgaattatcaaacggcctccttcctgatcgccttggtctggatggtgtccattctcattgccatcccatcggcttactttgcaacagaaacggtcctctttattgtcaagagccaggagaagatcttctgtggccagatctggcctgtggatcagcagctctactacaagtcctacttcctcttcatctttggtgtcgagttcgtgggccctgtggtcaccatgaccctgtgctatgccaggatctcccgggagctctggttcaaggcagtccctgggttccagacggagcagattcgcaagcggctgcgctgccgcaggaagacggtcctggtgctcatgtgcattctcacggcctatgtgctgtgctgggcacccttctacggtttcaccatcgttcgtgacttcttccccactgtgttcgtgaaggaaaagcactacctcactgccttctacgtggtcgagtgcatcgccatgagcaacagcatgatcaacaccgtgtgcttcgtgacggtcaagaacaacaccatgaagtacttcaagaagatgatgctgctgcactggcgtccctcccagcgggggagcaagtccagtgctgaccttgacctcagaaccaacggggtgcccaccacagaagaggtggactgtatcaggctgaagtga

SEQ ID NO: 131038 - DNA, 2716 bp, Homo sapiens
gggagagggagctctcgggtcggggctagggaaggctgaaccccgctcggcccgggtgaaagggcggtgacggcactgggtggggccgagctccagggctggctgctgggctgctaagggaactgtgagccgctcagagccgcgcgcctcccgggcggggcggggccggccgtgggagtccgcgcgtgcccgcgccgagctgcctgctccggcggcttcgctgctagctcgcggcgacgtcgggccgattttcccaggatgacagagctgaggcagagggtggcccatgagccggttgcgccacccgaggacaaggagtcagagtcagaagcaaaggtagatggagagactgcatcggacagtgagagccgggcagaatccgcacccctgccagtctctgcagatgataccccggaggtcctcaatagggccctttccaacttgtcttcaagatggaagaactggtgggtgagaggcatcctgactttggccatgattgcatttttcttcatcatcatttacctgggaccaatggttttgatgataatcgtgatgtgcgttcagattaagtgtttccatgagataatcactattggctacaacgtctaccactcatatgatctgccctggttcaggacgctcagctggtactttctcctgtgtgtaaactatttcttctatggtgagacagtgacggattacttcttcaccctggtccagagagaagagcctttgcggattctcagtaaataccaccggttcatttcctttactctctatctaataggattctgcatgtttgtactgagtctggtcaagaagcattatcgactgcagttctacatgtttggctggacccatgtgacattgctgattgttgtaacacagtcacatcttgttatccacaacctatttgaaggaatgatctggttcattgtccccatatcttgtgtgatctgtaatgacatcatggcctatatgtttggctttttctttggtcggaccccactcatcaagctgtccccgaagaagacctgggaaggcttcattgggggcttctttgctactgtggtgtttggccttctgctgtcctatgtgatgtccgggtacagatgctttgtctgccctgtggagtacaacaatgacaccaacagcttcactgtggactgtgagccctcggacctgtttcgcctgcaggagtacaacattcctggggtgatccagtcagtcattggctggaaaacggtccggatgtaccccttccagattcacagcatcgctctctccacctttgcctcgctcattggcccctttggaggattcttcgcaagtggattcaaacgagcctttaaaatcaaagactttgccaataccattcctggccatggaggcatcatggatcgctttgactgccagtatctgatggccacctttgtcaatgtatacatcgccagttttatcagaggccctaacccaagcaaactgattcagcagttcctgactttacggccagatcagcagctccacatcttcaacacgctgcggtctcatctgatcgacaaagggatgctgacatccaccacagaggacgagtaggggccacccagggtcaggagaacaggaacagaactgagcaggggcaggtctccaaggcaagcccagctggtgtgacttagacaatgacgaggcttcaactcactgtcttttttttttttttttggagggtattttttatttgtgggttcaaaaaatctgtatatacagtctatgtgtttagaatttgtgttgtaagtaaactacagctttgagttggaaagaagtcacgggttgtaaaaccatttggatttttttaaaacaaaagtattaataatctggaagacagtgttgcccaggtcaggagtgttttcttggtggttccagcccccatcaattgaactgtttctgggctcagtcagacacagacattcatctgtgtctgaccaaatcaggggacttccccacctgtggtgggaggcacagcttagatgttttgtacacctggtcttttctagaaatccctgcttggagctgcagaagggttgccttctgtaggtcggaggaatggaggcttactaaccaggtaagccttctatgcatccacaccaaaatcctgcagaatgtaagtaagctctgctttataagatgggttcaccttcatcgcagactgaaagtttcagtttttatttttttcagaaagcacgaaaaattatttataatagtctggagaaaaaacacactgtaatatttcaagtgtatgcagtagaatgtactgtaactgagccctttcccacatgtctaggctccaatgtctcctgtaggtccacctaactgtgtgttttcagggacaatgccatccatgtttgtgctgtagacttgctgctgctgaatcctttctggggactttctcatcgggcagggagcagagggcttctcgttcatgcaccctttgcctgaacacccatgtagctgctgtgttgtgtatatattactcttaagaggagtgtgtgtgtctgtgtttgttttaaaagtcacttatttcttacagtgatttcaattgcaccatgacttcttcactaaaaccacaaagtcctgcttaaaactatggaaaacctaacctgattagagccttgactattttgaagattaaatgcacactttttatataaaaaaaaaaaaa

SEQ ID NO: 131039 - DNA, 990 bp, Homo sapiens
atgaggaaaaaccagtgcaaaaatgctgaaaattccaaaaatcagaatgcctcttgtccttcaaatgattgcaactcctgtccagcaagggcacaaaactggacagagaatgagattgatgaattgacagaagcaggcttcagaagttatggtgattatgacctccctatggatgaggatgaggacatgaccaagacccggaccttcttcgcagccaagatcgtcattggcattgcactggcaggcatcatgctggtctgcggcatcggtaactttgtctttatcgctgccctcacccgctataagaagttgcgcaacctcaccaatctgctcattgccaacctggccatctccgacttcctggtggccatcatctgctgccccttcgagatggactactacgtggtacggcagctctcctgggagcatggccacgtgctctgtgcctccgtcaactacctgcgcaccgtctccctctacgtctccaccaatgccttgctggccattgccattgacagaaagcccaaggctgaaaagaagagagcttcaggccttggatgggaggtgtcatggtgcctggaactgcatctgcaggggaggaaggtgatagtcaagactgagacaaggtatcagggtcagtgcccgccagccatgctccctgtctatggagaaagacccaagaaaaaggtgatgtgcgttcagattaagtgtttccatgagataatcactattggctacaacgtctaccactcatatgatctgccctggttcaggacgctcagctgcgtgttgagtgttcttatcattaaagagtactggatgttgtcaaatggtttcctgaatttattgagaaataaatgtcttctcaggggaaaacagaattttaatcagtgcgtcctagtagatgcaataattgtggcatggacagaatctttgccaacaggagagtcaggacaggaccatgctgtgctgttcctcaatggtggctga

SEQ ID NO: 131040 - DNA, 1050 bp, Homo sapiens
atggggatcacctgctggatcgccctgtatgctgtggaggccctccccacctgccctttctcctgcaagtgtgacagccgcagcctggaggtggactgcagtggccttggcctcaccacggtgcccccagacgtgcccgcagccacccgaaccctcttgctcttgaacaataagctgagtgccctgccaagctgggctttcgccaacctctccagcctgcagcggttggacctgtccaacaacttcctggaccggctgccccgctccattttcggggacctgacgaatctgactgagcttcagctgcgcaataacagcatcaggaccctggacagggacctgctgcggcactcgccgctgctccgccacctggacctgtccatcaacggcctggcccagttgccccctggtcttttcgacgggctcctggctctgcgctccctctcgcttcgctccaaccgtctgcagaatctggaccggctgacatttgaacccctagcaaacctgcagctgctgcaggtcggggataacccctgggagtgtgactgtaacctgcgtgagttcaaacactggatggagtggttctcctaccgagggggacgcttggaccagcttgcctgcaccctgcccaaggagctgagggggaaggacatgcggatggtccccatggagatgttcaactactgctcccagctggaggacgagaatagctcagctgggctggatattcctgggccaccctgcaccaaggccagtccagagcctgctaagcccaagcccggggctgagccggagccggagcccagcacagcctgcccacagaagcagaggcaccggccggcgagcgtgaggcgagccatgggcacggtgatcattgcaggggtcgtgtgcggcgtcgtctgcatcatgatggtggtggccgctgcctatggctgcatctacgcctccctcatggccaagtaccaccgggagctcaaaaagcgccagcccctgatgggggaccccgagggcgagcacgaggaccagaagcagatctcttctgtggcctga

SEQ ID NO: 131041 - DNA, 1416 bp, Homo sapiens
atgggctgcatgcagcccgtgggccgtgggttgtacaagcttggatcagcatcaccatgggaacgaaaagaggtctgctacggacaacttggctgcttttctgatgaaaaaccatgggcaggaacccttcagcgacctgtaaaattacttccctggtcccccgaggacattgacacccgctttcttctgtacacaaatgaaaatccaaacaacttccaactaatcactggcacggaaccagacaccattgaggcttcaaacttccaactggaccgcaagacacgcttcatcatccatggcttcttagacaaggcggaggacagctggccatcggacatgtgcaagaaaatgtttgaagtggagaaggtgaactgcatctgtgtggactggaggcacgggtcccgggcaatgtacacccaagccgtgcaaaacattcgggttgttggggcggagacagctttcttaatacaagcactgtcggtaaaaccctgcctgggccctgtcctgtgggtaggggtcagagaggggcagggagacgcagctaggggtacagcccttgaggacgtgcatgtcatcgcccacagcctgggcgcgcacacggcgcggaagccggcaggagctgggggccgcgtggcaggatcacagatgacctggggacagcataatacaaagtggatggaatgggctgagaaaggagaggggttagattttccatttaaccatgaggaggtggtgtgtgagctgggtttggaggagaaagatttagataaaggaagaatgtgggaaagagcacagcaggctggagaatggcggctggatccagcagggccgtgcttccaggatgaacctgaggaggttcggttggatccatctgacgccgtgtttgtggatgtgattcacacagattcttctcccatagttccttccctaggtttcggaatgagccaaaaggtgggccatctggatttctttccaaatggaggaaaggaaatgcccggatgtaagaaaaatgtcctttcaaccattactgatattgatggaatatgggaaggaattggtggctttgtgtcttgcaatcacctaagaagcttcgagtattactcaagcagcgtcctcaaccctgatggcttcctgggctatccctgtgcctcctacgatgagtttcaggagagtaagtgtttcccttgtccagctgaaggatgccccaaaatggggcactatgctgaccaatttaaggggaaaacaagtgctgtggaacaaacctttttcctgaacacaggagagagtggtaactttactagttggagatataaggtatcagtcacactttctggaaaagagaaagtgaatgggtacatcaggattgctttgtatggaagtaatgaaaactcaaaacaatatgagattttcaagtaa

SEQ ID NO: 131042 - DNA, 807 bp, Homo sapiens
gagccggcatgcatcattgtatcagacgatggaaggagcgtgacctggtcgtgtcaatcagagacttcgatcaccatcttagtgactgcgacaggaaagtacacagcttcggggtatgcagccaggtacatataccatgacctggatcccaatgaggcaaagcagtggctgtacatggagaagtcaaagatgaagctgcacaccactgtggacctcaccatgcatacagacctgacggcagcaaatggcaagaaagtcatagcccttgaaatctttgcttatgccctgcagtactctaaggagcaggcgctgaaggtaggactgatagttgaggccagccagctgtgtgctaggcggtggcacccgtgccagctccgtgtctcgggctgctgcacctgctggccagggtaggaggcacagcctggagggagagtgtgggctttggagtcaacacaacaggatgaaccctcacacgctgctggtgggaaagtaaaatggtgcggcctctttggaaaacagtttggcaattcctaaaaaagtaaagcacagagttactgtaggacccagcagctccactccttgggtggagaaatgaaagaaatccctaagagaaatgaaagaagaaatgaaatccctaagagaaatgaaatccctaagagaaatgaaagaagatgtccacacacacgtatacatgaatgtgcatagcaacattattcataactgtgaaaagtagaaacagtccacatgctgtccacacaaacacacgtatacatgaatgtgcatagcaacattattcacaacgacgaa

SEQ ID NO: 131043 - DNA, 780 bp, Homo sapiens
atgcccaaccccaaggggccagaggacaaagctgtgggcctggtcccaaagccccagggtaatagcatacagctaagaatagaaaaacaaaaagctccatccaaacgacagcaaatccgaaaacacaaaagaacgcaagctttcttggatgagaaagaatcagttaagaactctggtaatttaaaaagtcagaatatccctttatatccaaatgttattagctctccagcaatggttcttaaccagattgaaatgactgaaatgacagacatagttcagaatctggatgttcagtcacaagatgtgggatgctctgaaaagggcatattcttgagcaaagacatccatcactttgcagctgaggctgaccctaagaaagcaggcagccggagacattctgctgaccaccctctcctcagctggtcactacgcaggaaagggagtgctttggaactcagatcagggaatcacagtagcactcagagcgcaggaatcaagtgcagccatggagacacccacttcctcagtgaggtgttgaaggtggctctaagagcaaccacaggtgcaaatcagcttttaaagaaggagcatgggataggacagatcatcgatcatctctatgttctttcaaacatattccaaaagacagcattatgcaaagtatcacttacagatgcatttacatctaaacttgctgtatgcttcacggcaagttggtgtctttccactttctccttgatgaagacctgcatccaatatgaatttaaagaggctctgtaa

SEQ ID NO: 131044 - DNA, 1427 bp, Homo sapiens
ctctggaacattagacaggatgctgatcttctggacaatcacacttttcctgctgggagcagccaaaggaaaagaagtttgctatgaggacctcgggtgcttttctgacactgagccctggggcgggacagcaatcaggcccctgaaaattctcccctggagccctgagaagatcggcacccgcttcctgctgtacaccaatgaaaacccaaacaactttcaaattctcctcctctctgatccatcaacaattgaggcatcaaattttcaaatggacagaaagacccggttcatcatccatggcttcatagacaaaggagatgagagctgggtgacagacatgtgcaagaaactgttcgaggtggaggaggtgaactgcatcttcgttggactggaagaagggctcccaagccacctacacacaggctgccaacaacgtgcgagtggtgggcgcccaggtggcccagatgctcgacatcctcttgacagagtatagctaccccccttccaaagttcacctcattggccacagcctgggagcccacgtggctggagaggcaggaagcaagactccaggcctgagcaaggattacaagggttggatcctgtagaagcaagtttcgagagtactcctgaagaggtgcgactttgatccctctgatgctgactttgttgatgtgattcacacggatgcagctcccctgatcccattcttgggttttggaacgaaccaacagatgggtcatcttgacttcttccccaatggaggagagagcatgccgggatgcaagaagaatgccctgtctcagatcgtggatctagatggcatctgggcgggaacccgggactttgtggcttgcaatcacctaagaagctacaagtattacttggaaagcatcctcaatcccgatgggtttgctgcatatccctgcacttcctacaagtcctttgagtctgacaagtgcttcccgtgtccagatcaaggatgcccacagatgggtcactatgctgataaatttgctggcaggacaagtgaagagcagcagaaattcttcttgaacacaggagaggctagcaatttcgctcgctggagatatggggtttccatcacactgtctggaagaacagccactggtcagatcaaagttgctttgtttggaaataagggaaacactcaccagtacagcatcttcagggggattctcaaaccaggctcaacccattcctatgagtttgatgcaaagctggatgttggaacaattgagaaagtcaagtttctttggaataacaatgtgataaatccaaccctccccaaagtgggtgccaccaagatcactgtgcaaaagggagaagagaagacagtgtacaacttctgtagcgaagacacagtgcgggaagacacgctgctcaccctcacgccctgctaa

SEQ ID NO: 131045 - DNA, 1410 bp, Homo sapiens
atgctgcccccttggaccctcggccttctcctgctggccacagtcagaggaaaagaggtctgctacggacaacttggctgcttttctgatgaaaaaccatgggcaggaacccttcagcgacctgtaaaattacttccctggtcccccgaggacattgacacccgctttcttctgtacacaaatgaaaatccaaacaacttccaactaatcactggcacggaaccagacaccattgaggcttcaaacttccaactggaccgcaagacacgcttcatcatccatggcttcttagacaaggcggaggacagctggccatcggacatgtgcaagaaaatgtttgaagtggagaaggtgaactgcatctgtgtggactggaggcacgggtcccgggcaatgtacacccaagccgtgcaaaacattcgggttgttggggcggagacagctttcttaatacaagcactgtcgacgcagctagggtacagccttgaggacgtgcatgtcatcggccacagcctgggcgcgcacacggccgcggaggcgggcaggaggctggggggccgcgtgggcaggatcacagggctggatccagcagggccgtgcttccaggatgaacctgaggaggttcggttggatccatctgacgccgtgtttgtggatgtgattcacacagattcttctcccatagttccttccctaggtttcggaatgagccaaaaggtgggccatctggatttctttccaaatggaggaaaggaaatgcccggatgtaagaaaaatgtcctttcaaccattactgatattgatggaatatgggaaggaattggtggctttgtgtcttgcaatcacctaagaagcttcgagtattactcaagcagcgtcctcaaccctgatggcttcctgggctatccctgtgcctcctacgatgagtttcaggagagtaagtgtttcccttgtccagctgaaggatgccccaaaatggggcactatgctgaccaatttaaggggaaaacaagtgctgtggaacaaacctttttcctgaacacaggagagagtggtaactttactagttggagatataaggtatcagtcacactttctggaaaagagaaagtgaatgggtacatcaggattgctttgtatggaagtaatgaaaactcgaaacaatatgagattttcaaaggatccctcaaaccagatgcaagtcacacgtgtgctattgatgtggattttaatgttggaaaaatacagaaagttaaattcctctggaacaaacgtgggataaatctatctgagcccaaactgggggcttcccaaatcacagtgcaaagtggtgaagatgggactgagtataatttttgtagcagcgacactgtggaagaaaacgtcttgcaatctctttacccttgttaa

SEQ ID NO: 131046 - DNA, 1798 bp, Homo sapiens
caggcaaggtcccagggaggcaagagcagcccaggtgggcccaggcatttccccagcccctccagaggcccaggatgaactggcctgggatgcaggccctgctaatgagcaaaggcttcagtccactgagcagtacatggtagcacagaagaaggcctggtacaccaacagcaaattgcatttccttctcagaaccctcagctctggtctggtacccccaggcaacaacagcctagcgggcagacaggacaggaggcctgggagctgtgcgtcactcaaagccagactggagagtgacaattgcctcgcagctcccagcgggtttcgagaaggggcaaagctgcaaaacagcccacagggagctcacagtgcctgtggtaatgatgatgacgatgatggtgatgatgctgacaatggtcattatcatggtgacggggtggaggacttggagccaggagacctaattacaaatgataactatgccaccattcagctgaatgaccttggcacctctgtggcccacccctgggactcctgtgggacacaggcaggtgtcatgggtggacaacaaggagcatctcaggagacagggaaggttgcaggtggaggctactctgtcagccccaggcccgaacaaagacaacaggaacagtgttgctgccagcccgcgatggaatctgggggtcatttgctcccaagctttgctatgtctatcctgattgacacccaggcagatgctacgctaaaagcagaggaaggaaaaatatctgtgtcacagcaccaactggaaaccaacgcgcgtacatcctgtctctactctggccgagccgaccaaagcacatcctgcaaaattctagacccccgcaagcggcgggaggcggccgtgcgcacaacatcctgcaaacgccgccctctggtggtggagctggtgaactgcgcccagcagccagtgagagccttcaccagaccctgcccacgctccatcagtagctttgctgcacactggaaatcaatccaaggtcctcccatggcccaggaatccctgcatgaaacgctggtgaaagtaaaagatgctgaagatcagttgggtgcacgagtgggttacatcgaactggatctcaacagcggtaagatccttgagagttttcgccccgaagaacgttttccaatgatgagcacttttaaagttctgctatgtggcgcggtattatcccgtgttgacgccgggcaagagcaactcggtcgccgcatacactattctcagaatgacttggttgagtactcaccagtcacagaaaagcatcttacggatggcatgacagtaagagaattatgcagtgctgccataaccatgagtgataacactgcggccaacttacttctgacaacgatcggaggaccgaaggagctaaccgcttttttgcacaacatgggggatcatgtaactcgccttgatcgttgggaaccggagctgaatgaagccataccaaacgacgagcgtgacaccacgatgcctgtagcaatggcaacaacgttgcgcaaactattaactggcgaactacttactctagcttcccggcaacaattaatagactggatggaggcggataaagttgcaggaccacttctgcgctcggcccttccggctggctggtttattgctgataaatctggagccgactttacgaaacacggaaaccgaagaccattcatgttgttgctcaggtcgcagacgttttgcagcagcagtcgcttcacgttcgctcgcgtatcggtgattcattctgctaaccagtaa

SEQ ID NO: 131047 - DNA, 2133 bp, Homo sapiens
ggcggctcagacacggcccgagcgccgccgcggacgcggacagagacccgcacgggcacgggcgctgcgctggaggctcccctcgcggtccggggctgcgcgaccatggcggacaaggaggccggcggcagcgacgggccccgagaaacggctcccacatctgcatattcatctccagcccggagtcttggggacacaggaataacgcctctgtccccctcccatattgtgaacgacactgactccaacgtctcagaacagcagtcatttctcgtggtggtggccgtcgactttgggaccacatccagtggctatgcctacagcttcaccaaggagccggaatgcatccatgtgatgaggcgatgggagggaggtgaccctggtgtgtccaatcagaagactccaaccaccatcttgctgactcccgagaggaagttccacagcttcgggtatgccgccagggacttttaccatgacctggatcccaatgaggccaagcagtggctgtacctggagaagttcaagatgaagctgcacaccactggggacctcaccatggatacagacctgacggcagcaaatggcaagaaagtcaaagcccttgaaatctttgcttatgccctgcagtactttaaggagcaggcgctgaaggagctgagtgaccaggcgggttcggagttcgagaactctgatgtcagatgggtcatcacggtgcctgccatctggaagcagccggccaagcagttcatgagacaagctgcctaccaggcaggcctggcctcccccgagaactcggagcagctcatcattgccttggagcctgaggcagcctctatctactgccgaaagctgcggctacaccagatgattgagctgagcagcaaggcagccgtcaatgggtacagcggcagtgacacagtaggagctgggtttacacaggctaaggaacacatacggcgtaatcggcagagtcggacctttttggtggagaatgtcataggagaaatctggtccgagctggaggaaggtgataagtatgtggttgtggacagtggcggtggcaccgtagacctgacagtccatcagatccggttaccggagggacaccttaaggaactgtataaagcaacaggcggaccctatggatctttaggagtagattatgagttcgaaaaacttctgtataaaatatttggagaggattttattgaacaattcaaaatcaaacgccctgcagcctgggttgacttaatgattgcgtttgagtctcgcaaaagggcggctgccccagacagaactaacccgctgaacatcaccctgcccttctccttcattgactactacaagaagttccgcgggcacagtgtggagcacgccttgcggaaaagcaatgtggattttgtgaagtggtcctcgcaggggatgctgcggatgagtccagatgccatgaacgccctttttaagccgaccatcgatagcatcattgagcatctccgggacctgtttcagaagcccgaggtgtccaccgtcaagttcctctttctggtgggcggctttgccgaggcgcccctgctgcagcaggcggtgcaggctgcttttggggaccagtgccggatcatcatcccccaggacgtgggcctcaccatcctcaagggtgccgtcctctttggcctggaccccgcggtcatcaaggtgcgccggtcgccgctcacctacggggtaggcgtgctgaaccgctacgtggagggcaagcacccgcctgagaagctgctggtgaaggatggcactcggtggtgcaccgacgtctttgacaagttcatctctgccgaccagtctgtggctctgggtgagctggtcaagcgtagctacaccccggccaagccctcccagctggtcattgtcatcaacatctacagctctgagcacgacaacgtcagcttcatcactgatcccggggtgaagaagtgtggcacgctccgcctggatctcacagggaccagtggcactgcggtgcccgcccggagggagatccagacccttatgcagttcggggacaccgagatcaaagccacagccattgatatagccacttcgaagagtgtcaaagttgggatcgacttcttaaattactaa

SEQ ID NO: 131048 - DNA, 1818 bp, Homo sapiens
atggacagaaagacccggttcatcatccatggcttcatagacaaaggagatgagagctgggtgacagacatgtgcaagaaactgttcgaggtggaggaggtgaactgcatctgcgtggactggaagaagggctcccaagccacctacacacaggctgccaacaacgtgcgagtggtgggcgcccaggtggcccagatgctcgacatcctcttgaccaaattcagccttggtaaatgggcagcaatggctgctattggcttttggaccacatcccttggggcccctggtccaagtgtttggggaggaccctttttaagagtggcttcacctgaaacctgccccaagtatgggccggacctcaccatggatacagacctgacggcagcaaatggcaagaaagtcaaagcccttgaaatctttgcttatgccctgcagtactttaaggagcaggcgctgaagcaggacgacctggacttcctaaatagcaaaggacaagtgagcaagctccaatgcactggcaggaattttcaagcctctgctggcttcctgtttgccaaggtcctattggccaaaacaaatcatgtagctacaccgagtccagtactgaatgctgtcaaagccactgtcatttactcaacatccatttcccccttattccctgatggaagagccctgaatttgttcatcctcatggaaggtgaccctgtccccagctcagagatgacaaaacagatgtccagccaccagctgagcagctcccactctgggatgggcgccagccagatctcagacttgctgagatcccaatgccatatgggaggggcaagatgtaacagccttggcatcttcctgtggttctcaccccagacaggaatgaatcaggacggctttggaataggagcaaagccagagttggctcttcggctgctgctcttagaggaacagaagaaaaacaaaacagctcctgaggaggatgaagagagtggaggtgtggatgtttgggcaaagctgcaaaacagcccacagggagctcacagtgcctgtggtaatgatgatgacgatgatggtgatgatgctgacaatggtcattatcatggtgacggggtggaggacttggagccaggagacctaattacaaatgataactatgccaccattcagctgaatgaccttggactagctccaggtatggtggaggatggaggagatggtctgcgacagtgccctgcagctatgcagggagtgactgctgttccttgttgctgggcagtccctgtggatgaacgggatctttgcccttcgcggctggatccagcagggccgtgcttccaggatgaacctgaggaggttcggttggatccatctgacgccgtgtttgtggatgtgattcacacagattcttctcccatagttccttccctaggtttcggaatgagccaaaaggtgggccatctggatttctttccaaatggaggaaaggaaatgcccggatgtaagaaaaatgtcctttcaaccattactgatattgatggaatatgggaagatgatcacactagctccccagcaatggttcttaaccagattgaaatggctgaaatgtcagacatagaattcagaatctggatggcaaggaagctcaatgagacacaagagaaggttgaaacccaatccaaggaaaacaataaaatgatccaagggttgaaagatgacatcaccattttaagaaagaaccaaaatgaacttctggaaatagaaaatttacaggaatttcataatacaattggaagcattaacaacaattggaatagaccaacctga

SEQ ID NO: 131049 - DNA, 378 bp, Homo sapiens
atgcagcgggaggagggatttaacaccaagatggcggacggcccggatgagtacgataccgaagcgggctgtgtgccccttctccacccagaggtgaggaaccgtgctgagtggattccttgccctgcggccctccagcctttcttccccggactcgccgagggcggcggccgacgtgtgtggggtagtgggacgtgccgaagttggggagggtggggaggcgaatccaggcctgagcgcggctgcgagcggataacgggggaggagatagcggggcgggcccgaccggggcgggctctgggacgcagtccctggctgtgcctggaggacagaggtggaggtgttgatggttctgctgtgtcgccgcgctgcgtttga

SEQ ID NO: 131050 - DNA, 2006 bp, Homo sapiens
gaagaaggaggaggaggcccgcgtcgcctccggcggggctcgcgctcgccccgcgctcgccctccgcctcgcccgagccccgggagggtgaaacgctttctcccagcatgcagcgggaggagggatttaacaccaagatggcggacggcccggatgagtacgataccgaagcgggctgtgtgccccttctccacccagaggaaatcaaaccccaaagccattataaccatggatatggtgaacctcttggacggaaaactcatattgatgattacagcacatgggacatagtcaaggctacacaatatggaatatatgaacgctgtcgagaattggtggaagcaggttatgatgtacggcaaccggacaaagaaaatgttaccctcctccattgggctgccatcaataacagaatagatttagtcaaatactatatttcgaaaggtgctattgtggatcaacttggaggggacctgaattcaactccattgcactgggccacaagacaaggccatctatccatggttgtgcaactaatgaaatatggtgcagatccttcattaattgatggagaaggatgtagctgtattcatctggctgctcagttcggacatacctcaattgttgcttatctcatagcaaaaggacaggatgtagatatgatggatcagaatggaatgacgcctttaatgtgggcagcatatagaacacatagtgtggatccaactagattgcttttaacattcaatgtttcagttaaccttggtgacaagtatcacaaaaacactgctctgcattgggcagtgctagcagggaataccacagtcattagccttcttctggaagctggagctaatgttgatgcccagaatatcaagggcgaatcagcgcttgatttggcaaaacagagaaaaaatgtgtggatgatcaaccacttacaagaggcaaggcaagcaaaaggatatgacaatccgtccttccttagaaagctgaaagctgataaggaatttcggcagaaagtaatgttaggaactcctttcctagttatttggctggttgggtttatagcagacctaaatattgattcttggctcattaaagggctaatgtatggtggtgtttgggctacagtacagtttctttcaaaatcctttttcgatcattcaatgcatagtgcattgccccttgggatatatttggcaaccaaattctggatgtatgtgacgtggttcttctggttttggaatgatctcaactttttatttatccatcttccattccttgccaatagtgttgcacttttctacaattttggaaaatcttggaaatcagatccagggattattaaagcaacagaagagcaaaagaaaaagacaatagttgaacttgcagagacaggaagtctggacctcagtatattctgcagtacctgtttgatacgaaaaccggtgaggtccaaacattgtggtgtgtgcaaccgctgtatagcaaaatttgatcatcattgcccatgggtgggtaactgtgtaggtgcaggcaaccatagatattttatgggctacctattcttcttgctttttatgatctgctggatgatttatggttgtatatcttactggggactccactgtgagaccacttacaccaaggatggattttggacatacattactcagattgccacgtgttcaccttggatgttttggatgttcctgaacagtgttttccacttcatgtgggtggctgtattactcatgtgtcagatgtaccagatatcatgtttaggtattactacaaatgaaagaatgaatgccaggagatacaagcactttaaagtcacaacaacgtctattgaaagcccattcaaccatggatgtgtaagaaatattatagacttctttgaatttcgatgctgtggcctctttcgtcctgttatcgtggactggaccaggcagtatacaatagaatatgaccaaatatcaggatctgggtaccagctggtgtag

SEQ ID NO: 131051 - DNA, 654 bp, Homo sapiens
ttttcgtccggctcggctccttggcgctgcctggagtcctttccgcccggtccccgcttgccagcccccgctgctctgtgccctgtccggccaggcctgttatcctacaccaccgccatcatgccggccgtgtccaagggcgatgggatgcggtggctcgcggtgttcatctccgacatccggaactgtaatagcaaagaggcggaaattaagagaatcaacaaggaactggccaacatccgctccaagttcaaaggagacaaagccttggatggctacagtaagaaaaaatatgtgtgtaaactgcttttcatcttcctgcttggccatgacattgactttgggcacatggaggctgtgaatctgttgagttcccataaatacacagagaagcaaataggttacctgttcatttctgtgctggtgaactcgaactcggagctgatccgcctcatcaacaacgccatcaagaatgacctggccagccgcaaccccaccttcatgtgcctggccctgcactgcatcgccaacgtgggcagccgggagatgggcgaggcctttgccgctgacatcccccgcatcctggtggccggcctctgggaacagaagacaaagcttgtccgagaagttctcgaaggctgtacttcaaagtga

SEQ ID NO: 131052 - DNA, 275 bp, Homo sapiens
ggaaagcgtggcggctgctgctagagcctttccctttaccgcacccaaggagctggagcgacaacaacgacgtcgtttccgtttccaccacctcttcctgttcccgtccttgaggacgccgtgccgggtacaatcctgagaacctggccaccctggagcgctatgtagagacgcaggccaaggaaaatgcctataatctggaagccaacctggctgtcctgaagctgtaccagttcaacccagccttctttcagaccacgggtcaacgcccagat

SEQ ID NO: 131053 - DNA, 273 bp, Homo sapiens
atgggcacagatgacgacaagagccaacgttggagcatttcctgtgcatcagataccatcttcacagagtggttaagtcatctgtccaaagccacacaagctcaggcagccagcagcagcactgctcctgacacagtgccgggaacactggaggtgcatggtacaccatggtacaatcctgagaacctggccaccctggagcgctatgtagagacgcatgccaaggaaaatgcctatgatctggaagccaacctggctgtcctgaagctgtaa

SEQ ID NO: 131054 - DNA, 912 bp, Homo sapiens
  misc_feature (1)...(912): n = a,t,c or g
gaaagcgtggcggctgctgctagagcctttccctttaccgcacccaaggagctggagcgacaacaacgacgtcgtttccgtttccaccacctcttcctgttcccgtccttgaggacgccgtgccgggntcaagtgttagcctccagccctggttgtgggaaggcgacagaagtcatggcgaatgtttgagcagatgagagccaacgtgggcaagttgctcaagggtatcgacaggtgacaatcctgagaacctggccaccctggagcgctaatgtagagacgcaggccaaggaaaatgcctatgatctggaacccaacctggctgttcctgaaagctgtaccaagttcaacccaagccttctttcagaccaacgggtcaaccgcccaagattcttgctgaaaggccctcaccaactttgccgcacaccagacttcaccctgtggcaagtgcattgattcgaccagggcacattcaagaaggaacggccaattccgacagatttttgttacctcgggggacctggctgggagacctggccattttccagggccttctgggaaagccctgggatgaaaacagtggaccttctttggaaggtataacttggcttttgaagactctgttccgaaagtttatcttgccatgttgttgggtatcacttaccagcacattgaccgcttggctgctggccgagatgctcggggatctgttcggacaagccagctaaaggtgttggattgagcaaatacggctggagtgccgacgagtcggggcagatcttcatctgtagccccagaagagagcatttaacccccaggaacattgtggagaagattgactttgacagtgtgtccagcatcatggcctcctcccagtaacttcaggtgtttaataaagatgtgttgactcag

SEQ ID NO: 131055 - DNA, 780 bp, Homo sapiens
atgagtggggagaatgtcaccaaggtcagcaccttcatcctggtgggcctccccacggccccagggctgcagtacctgctcttcctcctcttcctgctcacctacctctttgtcctggtggagaacctggccatcatcctcatcgtctggagcagcacctccctccacaggcccatgtactactttctgagctccatgtctttcctggagatctggtacgtgtctgacatcacccccaagatgctggagggcttcctcctccagcagaaacgcatctctttcgtcgggtgcatgacgcagctctacttcttcagctccctggtgtgcacagagtgtgtgcttctggcctccatgggctacgaccgctacgtggccatctgccacccgctgcgctaccaacctggcctgcacggacttctccactgcagagctggtgatttcatcctggccttcatcatcctggtgtttccgctcctggccaccatactgtcatattggcacatcaccctggctgtcctgcgcatcccctcggccaccggctgctggagagccttctctacctgcgcctctcacctcaccgtggtcaccgtcttctatacagccttgcttttcatgtatgtccggccccaagccattgattcccagagctccaacaagctcatctctgccgtgtacactgttgtcacgccaataattaaccctttgatttactgcctgaggaacaaggaatttaaggacgccttgaaaaaggccttgggcttgggtcaaacttcacactaa

SEQ ID NO: 131056 - DNA, 876 bp, Homo sapiens
gtctcccccatcagcatatgagctcacgggtgaggacctcatccaccctgctcactggcctgcagctcccaagcacagaggcatgagtggggagaatgtcaccagggtcggcaccttcatcctggtgggcttccccacggccccagggctgcagtacctgctcttcctcctcttcctgctcacctacctctttgtcctggtggagaacctggccatcatcctcaccgtctggagcagcacctccctccacaggcccatgtactactttctgagctccatgtctttcctagagatctggtacgtgtctgacatcacccccaagatgctggagggcttcctcctccagcagaaacgcatctctttcgtcgggtgcatgacgcagctctacttcttcagctccctggtgtgcaccgagtgtgtgcttctggcctccatggcctacgaccgctacgtggccatctgccacccgctgcgctaccacgtccttgtgaccccgggctgtgcctccagctgcgtcacgttctgtggctccaacgtcttgaaccacttcttctgtgacatttcccccatcctcaagctggcctgcacggacttctccactgcagagctggtggatttcattctggccttcatcatcctggtgtttccactcctggccaccatgctgtcatatgcgcacatcaccctggctgtcctgcgcatcccctcggccaccggctgctggagagccttcttcacctgcgcctctcacctcaccgtggtcaccgtcttctatacagccttgcttttcatgtatgtccggccccaggccattgattcccggagctccaacaagctcatctctgttttgtacacagttatcacccccagtgtatt

SEQ ID NO: 131057 - DNA, 897 bp, Homo sapiens
atgcctgatgttcactgcactgacacatatggaagctgtgaggagtgtttcatatggtccatggatgcccttcattacagcatagttggaaaatacaggattcagatggctgtgattctgagcatcccagcagtatctgctagtagaatagggaagaatccctgtaatacaaaatcagaggaaaaaaaggatgatgagtactctgaaattttaattggtgaaataaggatgtgggatgtactattttggtctactggaaaggggcacatcaccccccaggactgttccttgatcactgtgggtgctgtcccacctcgggaacattcacttgctgtttcctcagcctgcaaccgtcttctctcaaatatctgcagagctggccttactcaccgtcctgacagagtttatcctctagcgtttggtggtggttgtggggcaaaattcgttggactttttgatgcacctaacaccggagctcccaaatttataaaacaattactaatagacctaagaaatgagatagacagcaacaccataatagtggaggacttcaatactccactgacagcattagacaggtcatctagacagaaagtcaacaaagaagcaatggatttaaactatgttcaggaacaaatggacttaacagatacatacagaacatttcatccaacaactgcagaatacacattctattcaacaatgcatggaactttctccaagatagaccatatgataggccataaaatgagcctcaataaatttaagaaaattgaaattatattaagcactctctcagagcacagtggaataaaactggaaatgaatgccaaaaggaaccttcaaaaccacacaaatacatggaaattaaataacctgctcctgaatcagcattga

SEQ ID NO: 131058 - DNA, 501 bp, Homo sapiens
agaagtgaggcagatgtggcctcagagggtctggcggatggctgccgggatcaccgggggctggactttgagatgtccaggacgaagtgttgccctttcagtgctgccctccctgtgtctgctggaactgttggagccgcagtgcagcctaattttgacttcaggctgtccccggaagctgctgaaaaccgacgattccatcaagaaggaacccggaaaggagagaaacccctgcctttctgcaggcctgcagtaggacctgcttcaactgctgccctggaagagcccgaggacctcagtgggaacctcatgctgtctctggggacttttgcactggaactgtgccctgcacgcataagagccttgagacatctagcagactgcctgcaccatcaagatctggactgcagagcacgtctttcaccacccgtgggaaactgttacaacagctgcaatgcacaaatacccaagccctgcgaacctgagcagggtgtgggttga

SEQ ID NO: 131059 - DNA, 824 bp, Homo sapiens
gtacttccaccccgggtgaagacatcccctggagagcagaccactgccaagagcacacctgcagaggctccaatacaatgctctgcacagccgcccagcaccgcctgacctcccggatagcagcgccagcacagaccaacgagtgtgtagacactcgcacagcactacaccacacgactactgctgtcacagaccgcctaggcccaaggtacgcctcgggccagtatgggtaccccaagtgtactaagtgcacttacgagtcctctacttacaaactgcttctcacaaaacatcgaaactccagggcagggcttggcatgcctgccagccttttcttgcctggcgatgactcatctggtgctcatgggccctactggcatgtttctgatgttgctagcacattcagacctgatagagaccagtgcagaaccccagagacagtggactttcagctggatgcagtgactggctgggacctgaaggtgtcccctataagaggtgaaccccaagttgttcagggagcagcagagatcccccctcttttaggaaagaaccagtgctgtggcgcatatggccctgaagactgggacctcaacgtctacttcaattgcagcggtgccagctacagccgagagaagtgcggggtccccttctcctgctgcgtgccagatcctgcgattgtcagtgccggctctcatgcaacaaaagcggaattgagtctgtgtctgaagtactcactctctagcccttcacagagaaagtttgccaccctgtcctggtctgaaggattagttggtggcatgattgaaggacatgagctgtaa

SEQ ID NO: 131060 - DNA, 874 bp, Homo sapiens
atgggaaagagtggacaagcagtgttatctcagtcccatgggaaaaggtggttcttggtgggaggtgtggagggagaggcactagtgggaaccgtggcacttgcaggccagctggagttccgggtgggcgtgggcttggcggccctgcactccgagcggcaggccggccctgccagccggggcaatgaggggcttagcacctgggccagcggctgcggaagccagtcctgtgcggctggagcctccccaacgagtgtcgccccctgctgcatggcgcccagtcccatcgaccacccaagggctgaggagtgtgggcgcacagcccaggactggcaggcagctccacctgtggccccagtgcaggatccactgggtgaagccagctggtttcctgactgggagataagacagtatgttttcctcaaaaggcttgtagtctggaaagcaaataggcaaacaggacgcaagcacacgaacgggtacaaaagcctgagaaagaaagctgctgccagtgaggagcagaggccgttctgtggctatctcagtcattctccaggttttaagtggggctcagctgttcttcttctgggaccacctacttggctgtgctcatctcagcagggctgcaggagatccagaagacatatggatgtccctcaacatctccactcagagctgacacaaggaaatagcatccttgtccttcctgcaagaatggaggggaagaaattgggagcaaatcaggctacagcttctaatagagctataacactcactgtgtggcccaagattccattctttggaatccctgaggccaagaaccccaggtcagagaacaagaggcttgctgccaccttgggagccggccacgaaa

SEQ ID NO: 131061 - DNA, 397 bp, Homo sapiens; identical to SEQ ID NO: 116236
  misc_feature (1)...(397): n = a,t,c or g

SEQ ID NO: 131062 - DNA, 1143 bp, Homo sapiens
atggtaaatgtgggggattttattgccgatgaaagtggctctcagcaggaaagggagctgaaaggggacagaatgggaaggcaatcttcctctaaagtccggctgtccttggctggactcctctctgaagcctcttctgagatagcaaataagaggactggatcaatcctacactgttggcaaaggtctggattaccctgcaaggtaaagaaagcctgcacatatggggcctcaggccatttgccctcacatctacagaaaaggtcttactgcatagaaatgagtggttccttcctgaggccaagccagtccttcctgcagattataatttgtccaaacctttgtgcagagggctatgaggccagccccacagcagcatctggcagcagaataaccaatgcagagaagtccttaaaggacctgatggagctgaaaaccaaggcacgagaactatgtgacaaatgcacgagcctcagtagccgatttgatcaattggaagaaagagtatcagtgatggaagatcaaatgaatgaaatgaagcaagaagagaagtttagagaaaaaagaataaaaagaagcaaacaaagcctccaagaaatatgggactatgtgaaaagaccaaatctacgtctgattggtgtacctgaaagtgatggggagaatggaaccaagttggaaaacactctgcagaatattatccaggagaacttccccaatctagcaaggcaggccaacattcaaattcgggaaatacagagaatgccacaaagatactcctcgagaagagcaactccaagacacataattgtcagatacaccaaagttgaaatgaaggaaaaaatgttacaggcaatcagagagaaaggtcaggttacccacaaagggaagcccatcagaccaacagcggatctctcggcagaaactctacaagccagaagagagtgggggccaatatttaacattcttaaagaaaagaattttcaacccagaatttcatatccagccaaactaagcttcataagtgaaggagaaataaaatcctttacagacaagcaaatgctgggagattttgtcaccaccaggcctgccctaaaagagctcctgaaggaagcactaaacatggaaaggaacaactggtactag

SEQ ID NO: 131063 - DNA, 3138 bp, Homo sapiens; identical to SEQ ID NO: 121688

SEQ ID NO: 131064 - DNA, 457 bp, Homo sapiens
tttcgtggagacccaggcgggcgggcagagcaggcggcaccgcacctcggccagaggcggctgcagcagctgctgcccttgtccctgccgccgcctctccagtcccttctgtgattaccactccagctgctgggaacgggcgagaaagaggaggaggcgagaaactcccaccgacccacagagggagcatgacttcggcaacttcacctatcattctgaaatgggaccccaaaagtttggaaatccggacgctaacagtggaaaggctggtggagccacttgttacacaggtgactacacttgtcaacacaagcaacaaaggcccatctggtaaaaagaaagggaggtcaaagaaagcccatgtactagctgcctctgtagagcaagccactcataatttccttggaaaaggtgaacagatcgctaaggagagtcaagatctcaaagaagagttggt

SEQ ID NO: 131065 - DNA, 2602 bp, Homo sapiens
ggattttgccgatttcggaaccaccatcaaacaggattttcgcctgctggggcaaaccagcgtggaccgcttgctgcaactctctcagggccaggcggtgaagggcaatcagctgttgcccgtctcactggtgaaaagaaaaaccaccctggcgcccaatacgcaaaccgcctctccccgcgcgttggccgattcattaatgcagctggcacgacaggtttcccgactggaaagcgggcaagtcaagcatgaaggtcagcacacgaagatgtcccaggttttatggagatcccaggaagagaacccagccacattaggaaacaatattcagctctttgattggataccccagaatgatcttcttggacatcccaaaaccaaagcttttatcactcatggtggaactaatgggatctacgaagctatttaccacggagtccctatggtgggagttcccatgtttgctgatcagcctgataacattgctcacatgaaggccaaaggagcagctgtggaagtgaacctaaacacaatgacaaggccaggcggtgaagggcaatcagctgttgcccgtctcactggtgaaaagaaaaaccaccctggcgcccaatacgcaaaccgcctctccccgcgcgttggccgattcattaatgcagctggcacgacaggtttcccgactggaaagcgggcagtgagcgcaacgcaattaatggattttgccgatttcggaaccaccatcaaacaggattttcgcctgctggggcaaaccagcgtggaccgcttgctgcaactctctcagggccaggcggtgaagggcaatcagctgttgcccgtctcactggtgaaaagaaaaaccaccctggcgcccaatacgcaaaccgcctctccccgcgcgttggccgattcattaatgcagctggcacgacaggtttcccgactggaaagcgggcaggattttgccgatttcggaaccaccatcaaacaggattttcgcctgctggggcaaaccagcgtggaccgcttgctgcaactctctcagggccaggcggtgaagggcaatcagctgttgcccgtctcactggtgaaaagaaaaaccaccctggcgcccaatacgcaaaccgcctctccccgcgcgttggccgattcattaatgcagctggcacgacaggtttcccgactggaaagcgggcagattttgcccgatttcggaccccaccatcaaacagaattttcgcctgctggggcaaaccagcgtggaccgcttgctgcaactctctcagggccaggcggtgaagggcaatcagctgttgcccgtctcactggtgaaaagaaaaaccaccctggcgcccaatacgcaaaccgcctctccccgcgcgttggccgattcattaatgcagctggcacgacaggtttcccgactggaaagcgggcagtgagcgcaacgcaattaataccaaaggtagataaaaccacaaagatagggaaaaaacagagcagaaaaactggaaactctaaaaatcagagtgcctctcctcctccaaaggaaagcagctcctcacacgcaacagaacaaaactggacggagaatgactttgacgagctgagagaagaaggcttcaaacgatcaaactgctccgagctacaggaagaagttcaaacccatggcaaagaggttaaaaaccttgaaaaaaaattagacgaatggctaactagaatcaccaatgaagaaaagcccttaaaggacctgatggagctgaaaaccaaggcacaagaactacgtgacaaatgcacaagcctcagtagccgattcaatcaactggaagaaagggtatcagtgatggaagatcaaatgaatgaaatgaagcgagaagagaagtttagagaaaaaagaataaaaagaaacgaacaaagcctccaagaaatatgggactatgtgaaaagaccaaatctacgtctgattggtgtacctgaaagtgatggggagaatggaaccaagttggaaaacactctgcaggatattatccaggattttgccgatttcggaaccaccatcaaacaggattttcgcctgctggggcaaaccagcgtggaccgcttgctgcaactctctcagggccaggcggtgaagggcaatcagctgttgcccgtctcactggtgaaaagaaaaaccaccctggcgcccaatacgcaaaccgcctctccccgcgcgttggccgattcattaatgcagctggcacgacaggtttcccgactggaaagcgggcatcaggcaccgtgtatgaaatctaacaatgcgctcatcgtcatcctcggcaccgtcaccctggatgctgtaggcataggcttggttatgccggtactgccgggcctcttgcgggatatcgtccattccgacagcatcgccagtcactatggcgtgctgctagcgctatatgcgttgatgcaatttctatgcgcacccgttctcgcagcactgtccgaccgctttggccgccgcacagtcctgctcgcttcgctacttggagccactatcgactacgcgatcatggcgaccacacccgtcctgtggatctacccactagtcaattcaccatcttgttga

SEQ ID NO: 131066 - DNA, 1495 bp, Homo sapiens
atgggtactttaaaaaaccgagctacagataaagatttccagtctgacgctaatgaagagttcataagcggtatggaggaacaaaaggcaaggaaatgccgtatagagtgttttgatcaagacaaaagttcttttaaagtccaaatctcccttcctctcccctcgggactccacatcccaacaaacctcccttccgcggcagtcactacctttgcagcactctggccctgcgctcctcctgccacgtgtcggacccctgctgggctggcctcctttcctactctgcgacacccctcccccccccgcccctatcctgcccgctcccgcacccggtccctctccccgggcctcgcgactccggcgattcagctccgggtccccgcccgcatgtaacgcggttgtcatggacacggcacctgcgccctacggagtggcccttcggcgccgtcgctctctcccaactgcgacgtcgctttgcggacttccagagctccgccctaccccgccccgccctttcgggcctccccaggccgcgcgcgcccggcccccacccagccacccctcgatgcccggtgcctttccaggcgccgcggagccacggggaccgcgggggcgcgcgagcgagcaagcggccgcatgcgcactggctgcctcccctagcggcgatccgggccctgccgctcgcgcttgggcaggacgcggggcgattggggggaggggggagcggcttcgcttccagccccgagtgaggcggagacccaggcgggcgggcagagcaggcggcaccgcacctcggccagaggcggctgcagcagctgctgcccttgtccctgccgccgcctctccagtcccttctgtgattaccactccagctgctgggaacgggcgagaaagaggaggaggcgagaaactcccaccgacccacagagccactcgccctagagcacagctctgcatccctttcctcttgtctccatctcttcttcccccctttcttacctcttccccgtttttctgcagagtggtgtgggtgtatgccccagtttttgatactgtgcttagtatagaaacacaggaggaatttcaaacccatcgtaaagaagctaaaaaccttgaaaaaagattagatgaatggctaactagaataaccaatgtagagaagtccttaaaagacctgatggagctgaaaaccatggcacaagaactacatgacaaatgcacaagcttcagtagccgatttgatcaactggaagaaagggtatcagtgactgaagatcaaatgaatgaaatgaagcaagaagagaagtttagagaaaaaagagaaaaaagaaagaaacaaaacttccaagaaatttgggactatgtgaaaagaccaaatctacgtctgattggtgtacctgaaagtgacggggagaatggaaccaagttagaaaacactctgcaggatattatccaggagaactttcccaacctagcaaggcaggccaacatttaa

SEQ ID NO: 131067 - DNA, 2210 bp, Homo sapiens
acatccacaccaaaaccccatctgtatgtcaccatcatcaaagaccaaaggtagataaaaccacaaagatggggaaaaaacagagcagaaatactggaaactctaaaaatcagagcacttctcctcctccaaaggaatgcagctctgcaccagcaatggaacaaagctggatggagaatgactttgacgagttgagagaagaaggcttcagacgatcaaacttctctgaactaacggaggaagttcgaacccatcgcaaagaagctaaaaaccttgaaaaaaagattagacaaatggctaactagaataaccaatgtagagaagtccttaaatgacctgatggagctgaaaaacatggcacgagaactacgtgacaaatgcacaagcttcagtagccgattcgatcaactggaagaaagggtatcagtgattgaagaccaaatgaatgaaatgaagcaagaagagaagtttagagaaaaaagagtaaaaaagaaatgaacaaagcctccaagaaatacgggactatgtgaaaagaccaaaatctacgtctgattggtatacctgaaagtgacgaggagaatggaaccaagttggaaaacactctgcaggatattattccaggagaacttccccaatctagcaaggcaggccaacattcagattaaggaaatacagagaatgccacagagatactcctcgagaagagcaactccaagacaaataaattgtcagattcaccgaagttgaaatgagggaaaaaagtgttaagggcagccagagagaaaggtcgggttacccacaaagggaagaccatcagactaacagtggatctctctgcagaaaccatacaagccagaagagaatcaacaagacagaaagttaacaaagatatccaggaattgaactcagctcagcatcaagcagacctaacagacaactacagaactctccaccccaaatcaacagaatatacactcttctcagcaccacatcacacttattccaaaattgaccacatagttggaagtaaagcactcctcagcaaatgtaaaagaacagaaattataacaaactgtctctcagaccacagtgcaatcaaactagaactgaggattaagaaactcactcaaaacctctcaactacatggaaactgaacaacctgctcctgaatgactactgggtacataacgaaatgaaggcagaaataaagatgctctttgaaaccaatgagaacaaagacacaacataccagaatctctgggacacatttaaagcagtgtgtagagggaaatatatagcactaaatgcacacaagagaaagcaggaaagatctaaaattgacaccctaacgtcacaattaaaagaactagaaaagcaagagcaatcgcattcaaaagctagcagaaggcaagaaataactaagatcagagcagaactgaaggagatagagacacaaaaaactcttcaaaaaatcaatgaatccagggactggttttttgaaaagatcaacaaaattgatagacagctagcaagactaataaagaagaagagagagaagaatcaaatagacacaataaaaaatgtgttggaatttctggccaaggcaattaggcaggacaaggaaataaagggtattcaattaggaaaagaggaagtcaaattgttcctgtttgcagaagacatgattgtatatctagaaaaccccatcgtctcagcccaaaatctccttaagctgataagcaacttcagcaaagtctcaggatacaaaatcaatgtgcagaaatcacaagcattcttatacaccaataacagacaaacagagagccaaatcatgagtgaactcccattcacaattgcttcaaagagaataaaatacctaggaatccaacttacaagggatatgaaggacctcttcaaggagaactataaaccactgctcaacaaaataaaagaggatacaaagaaatggaagaacattccatgctcatgggtaggaagaatcaatatcatgaaaatggccatactgcccaaggtaatttatagattcaatgccatccccatcaagctaccaatgactttcttcacagaattggaaaaaactactttaaagttcacatggaaccaaaaaagagcccgcattgccatgtcaatcctaacccaaaagaacaaaattggaggcatcatgctacctgacttcaaactatactaa

SEQ ID NO: 131068 - DNA, 702 bp, Homo sapiens
ggtggacttctaactttttctgcacaggaatttggaagactttgttatggcaggtgccgtactcttactttacaaacaaacattaggggcagcccaggcagcacacctttctggatttaccaaaaatacacattttcctattctactgttgctttaccacatggttcagttgtagcctcagaattactttatggaagaaactgagtgtagacagaaagtaagaggtgtgatgaccaagtcatgggataaatgtttggagtccacagtatcatgagaacttcttaggaataaagtataggcttcccagtgatgttagtcttatccatcctcctctatacatgtgagatgtttcaggattcagtggcctttgaggatgtggctgtgaccttcacccaagaggagtgggctttgctggatccttcccagaaaaatctctacagggaagtgatgcaggaaaccttgaggaacctgacctccataggaaaaaaatggaacaaccagtacattgaagatgagcaccaaaatcctaggagaaacctaagcaatccttcctaccgcctcgaagttttagacaaagcttcacactctccaccaacggccaccttcagaatccctcaaccacctgcaccttctaaccccccttccacaggtcccgccctttctgccaaaggaacttacacctttccaggcattgatgcatga

SEQ ID NO: 131069 - DNA, 803 bp, Homo sapiens
cgacccacgcgtccgtgcttttgtcttagatggatgtcagcagctgctgcagaacccggtgaaaacaccccccgggtagcacgaggctctgcgagccgtaactccgacaaacgcagaacttcttgaggctttcttcttctaaggagtatgacacagttaaaaaggaaaaaagaaccacaagcaaaacagttgccagtgaaataggagagggagctctttaaacaaggctggctgcagctggcctccgccgctcatctgcagggcgtgagcgcttggtccatgcagtgaagctcttccaacctgggtcaacgaaaacggagaagaaatggcccaagaaatagatctgagtgctctcaaggagttagaacgcgaggccattctccaggttctgtaccgagaccaggcggttcaaaacacagaggaggagaggacacgggctgcaggaaactgaaaacacacctgcagcatctccggtggaaagggaccgaagaacacggactgggagcacaaagagaagtgctgtgcgcgctgccagcaggtgctggggttcctgctgcaccggggcgccgtgtgccggggctgcagccaccgcgtgtgtgcccagtgccgagtgttcctgagggggacccatgcctggaagtgcacggtgtgcttcgaggacaggaatgtcaaaataaaaactggagaatggttctatgaggaacgagccaagaaatttccaactggagataactctgtgatgaacgtcttgtacaggcaaacatgagacagttggagggcagctcttgcaatcttatcagaag

SEQ ID NO: 131070 - DNA, 1176 bp, Homo sapiens
atgaagcatttatccaagagaaatgaaagcatatgtccacacaaagctttatacacagatgttcatcgctgctttctttgtgacagccccaaactggaagtaattcaaatgtccatcaacagtgaagctcttccaacctgggtcaacgaaaacggagaagaaatggcccaagaaatagatctgagtgctctcaaggagttagaacgcgaggccattctccaggtcctgtaccgagaccaggcggttcaaaacacagaggaggagaggacacgcctggggtcaggtgttccatctaatactatcttctttaactctgagggctgcaggaaactgaaaacacacctgcagcatctccggtggaaaggagcgaagaacacggactgggagcacaaagagaagtgctgtgcgcgctgccagcaggtgctggggttcctgctgcaccggggcgccgtgtgccggggctgcagccaccgcgtgtgtgcccagtgccgagtgttcctgagggggacccatgcctggaagtgcacggtgtgcttcgaggacagggcaagatcaggagagcggaaggtaaagaaacagctgctctatgtgctgaagaataagaagccatccattggaagtgctggctcatttcttgaacccatttcagagttcctgtctgagcgatcgcttcaagtaaagaaggcgccccagataaaaaggcaggcagtccagacaccacagcatgtgcatgccacacgcatgcgcccccccaacccctatgatgagaagacacaccctcgagtgatgaacttctttctgtgctggagcccatggggtcctctgagtcccacttcctgccttcctcagaagataagaactgtatccgccttgccttccacaggagtgggtgtcaatggattgttcacactcacggataaccctgcccagttagatcctacaccaagagatcacacgacctctctggggagcgcatctgcacgttctcagcgggaacttggcctcctcacctggctgaccccgtgcatagtcaccgagtgtcactctgaggccatggccggcctgggtcaggccaaaggcgccagcggcagccgctcaggggagggaacacgaaaggaaactctccaggaagccagcgcgctcgacctgagcgcaggccccgcggctgcgggctaa

SEQ ID NO: 131071 - DNA, 1219 bp, Homo sapiens; identical to SEQ ID NO: 117723

SEQ ID NO: 131072 - DNA, 577 bp, Homo sapiens
agagctggtgatattcattcctagactacctcggaccaggccttttgtagttctaaatccctgctgcaattgacaaggatcctgaaataataaacattactgacccccaaattgtgtaccccgatatacacggaaataggggttacttcccataagtattagatgccatacacatcattgttattcccatgctaaggctcatcagggcagtcagaatctgcacaaccccaaggactttgggttctcccttcaagaacttctcttgcaatcctttccacagatgtgaatgtatgacagccatgtttcccagctggggcacaccagggccagcccctggcatggcctgttccattccttgcatggttgtcatggcagcagaaaaggtgctgaaaacagcaaaggagtagcagaaatcttgtagatcatagaaacccaggatggctacatgaagaaggagataaaacacctttcttccaccaccccttcccccagttaggacaatctctgagtcagcagagccttcttcctgcagggagaaggtaagcgagaggaccccagcagctcccatcaccaccat

SEQ ID NO: 131073 - DNA, 2526 bp, Homo sapiens
atgggattaatatcagattacccagaaaatgaatatagagggagaagagaagatggcctacaactatattcagtgagcaagagaaagaagaacctcaaagatatcagagaagaattgactggagaaacagaagaaaatgtaggtttgtgtggtatcagaccaagaaaagagtttcaagaaaaaggaattaggacaatctctgagtcagcagagccttcttcctgcagggagaagtttattatttcaggatccttgtcaattgcagcaggaattagaactacaaaaggcctggttgtgcagattctgactgccctgatgagccttagcatgggaataacaatgatgtgtatggcatctaatacttatggaagtaaccctatttccgtgtatatcgggtacacaatttgggggtcagtaatgtgccctgagaacagccaccaccaatacagcagagcacatgcacaggcaaggccacctaagctcccaggtatctgccatggagtgatgggccatgagttacacacagtctcactcctggagaaagctctgcccttctgctatattgattgtctcttcctggtgggctcagatgaagggactgcccaacaaggactagacaccctgttgatccacatgcagcaacccagctgggccattaacacagacaagataaaaagacctaataatatccaaatgaaactaataaaactcctgggcataattcagaaagcagaaaagcctctcattgcaaagatgattgtcaagattttgaacttctctgtccctccccaccaaaaaccacaaaaaaaaccccagcaattggtagacctatttggctactgttcactggacaaagtgatgaaagaaaattatgaactcagggattctaactctaagcttcagaagcagatactgagcctcaaatcttctaagattgccctgagtgagagtcttatcttctgtagagaaagagctgaaattgtggacactcagacacaagcttttatcatgcgatttgctgacctgcaacaaaaggtaactggattggggaaagaaagaaaaaatgatcagaccttttgggaactactggacactgactctgagctgacattgattccaggggacccaaaaagtcattgtgatcctccagttatagtaggggcttatggaggtcatgtaattaatggagctttagctcaggttcaacttacagtggctccactgtcaggacccccacactggcccctgactcatagagtgaaggctactatggtggaaaaggccaaatggaagccattagagctgcctctacctagaaaagcagtaaatcaacaacaatatcccatccctgaagggattgcagacattagtgccaccatcaaggacttaaaatatgcaagggtgatgattcccaccacatccccattcaactctcccatttggccagtgcagaagacagatggatcttggagaatgacagtggattatcatgagcttaaccaagtagtgactccagttgcagttgctgtaccagatgtggtttcattgcttgagcaaattaacccatcttctggtacctgctggcaagaccagcaatgtacctttactgtcctacctcaggggtatatcaactcttctctggctttgtgtcatgaccttgttcagggagatcttgatcacttttcccttccacaaaatatcacactggtccattatattgatgccattatactgatgggatccagtgagcaagaagtagcaagcacactggacttattgcctgcactgatggtctcatggggagttccccaggatcaattaacagaggaagagaagacaagggccctgtttacagatggctctgcacgatatgcaggcaccacctcaaagtggtcagctgcagcactacagccccttcctaggacatccctgaaggacagcggtgaaggaaaatcgtcccaggatggaggatatgcatgggctcagcaacatggacttccattcactgacctggctatggccactgctgagcacctaatttgccagcagcaaagaccagcactgagccctcaatatagcaccattcctcggaatgatcagccagctacttggtggcaagttgattatattagacctcttccatcacggaaagggcagcggtttttcctcaccagaatagacacttactttggatatgggtttgcctatcctgcacacaatgcttctggcaagactacaatccaagaactcatggaatgccttaaccactgtcatggtatcccacatagcattgcctctgaccaaggcactcacttgttggctaaagaaatgcggcagtgggctcattctcatggaattcactggtcttaccatgtttcccatcatcctgaagcagctggattgatagaatggtggaatgtccttttgaagtcacaattacaacatcaaccaggtgacaatacttttcagggctggggcaatgttctccagaaggctgtgcatgctctgaatcagcgtctaatataa

SEQ ID NO: 131074 - DNA, 558 bp, Homo sapiens
tcagcgcatgcgccgtcctgaagtgcggagcccaacagctatattccccggtgtctgcgccagaggagttaccagcagcagctggctgcactggctgaagtgcttgattctcactggggccagctgctttggagccctcattttctgagcctttggagttctgccatgctccgggatttcaccactttcaggaggaaagcccagtccagttcctggaccaaggtcacacaaatagtgggttgcggaggcaagctttttcgtgctctgggaagcagggaaggcaggcagggaaaccagcagttgtaatccagcgctgcggaaagtgttccaggcagaggaaactgctggagcaaatgctcctagcaggaggccactggcgcctccgaggatcagcaggggggccagtgtggaggtgagaggctgctcataccctcctagcactggaagagccttgtccttgggaccggacactatggctttgccctctctcacaggtcccattgagagggaaataccagcacttgcacagtgcctgaaatcaaaagcttcctcctccat

SEQ ID NO: 131075 - DNA, 2498 bp, Homo sapiens
  misc_feature (1)...(2498): n = a,t,c or g
tttttttttaactgtccgcaagttaaaaaggattttattgcttattccaggctttcaaaatgagccccagaacttcagggctggtgtgtgtttcaagaagttgtttatgatgtaacagggaggatagaaaaatcccaggcaagtttgaatgtcgaggcccaccctctcttcccttggaccccctgctcccaaaagcagctgctgggtgaggctctttccccatctgccctcattccaccccaacaggactcccaagactgaaggcagcgcagccttagtgatccccccacagcctcacaggtgaagaggctgctcataccttctcctagcactggaagagcctttgtccttgggaccggacactatgggctttggccatagatggaagcggagaaatggttgccacaggagttgtcttaagaggacaagggcatgcacgggtctgagatcagaggggtgtgaccgtgggccaccccatgaagccaggnccgttttgggacacatcacactcgcacagctttttttaaaaaaataataagcggcccaatcttttaagtgggtaagatttcctatacaaattctggatttttggcttctctaggagttaacattggaaactttttttttgagacagagtctcactctgtcaccaggctggagtattgccagtatctggcagttgtcttcacagactggctatgcactctccaactgacttcagtccttggcacccttaattatatttccaactggagaccaggcctcagcagccttgtatcaatgggcacatgtgctgtgactttctgtgtaagaaatatttacattgtaatagcatctttaatcaaaaaggaaaaatcggctgggtgtagtggctcatgcctgtaatccagcgctttgcaaggccaaggtggacagatcacgaggtcaagagatcgagaccatcctggccaacatggtgaaaccccatctctactaaaaatacacaaattagccgggcgtggtggcagggcctgtagtccaagctacttgggaggctgaggcaggagaattgcttgaacccaggaggcggaggttgcagtgaggtgagattgcaccactgcactccagcctggtgacaaagtgagattctgtctcaaaaaaaaaaaaagcgaaaaatcgaaatcaagcctggaagcaacatgtttctcacggttcttatcagtcatttaagtctcttgctaggccctgcgggtaccgtgagtttgtaaacaacagagcactcctaatatctcccccaagggattcctcccccacacaccctacctctccaggatacactgcaccctagtattaattgggcaaatctagaaaggaaataaaaattagtcacagaagttaagggaggaatagactaagagcaaatacttttgccccttcattgtaacagggggccggaggagaacaaaaacgttaatactctcacttcgcttttaacttagtgacaaaaaaaaaaaagagtgaaagagagagagtcataaagattcttcaggtcctaaaacactctggttcccattccttaactgctttggaaatgaacgaggctctttagagagaatgttaacggggatgagtaacgtggtcagcccagcagatgccctgggctatcaagaactgtccaactcattctcccttaggtcagggctgcttgccccagcctaaaatgtaagtggtacaaaatgattttcagtgagggtagtggactcactgtagaaaggggattaaaggggggcagagagtgggagtttggccttggcaaacacaaaacagaggaaaagggaccttcctcacaccgctccattctgctgtggcagatgccatgttatatgccctttagagaggcagcgatcttgatgcagcccagacgcttcccactgctgctcaggacgctctctatgcggtagttcccggtggtgagccaactgggcagctccaggtcaggcacaacgaattcgctcttgggcagtgagtaggttccttctttgaagggacagtggcaaggaagcccataggtacgcaggggctctgggcagggctccccagtaggaattaacatgtcaagcacatcacagaagtgttcaaaggtacagctgccaatgtagtctgtgcatgggatcttgatccagaggccagccacctccttctccaaaactaaatccaccttcagaggagaactcagggggacactggtgctgcccacgacactgagggtcacatttccaggaacgacgatggggtcaggctccagagtcaggcttctgatcaccgcagggtccttcccttcatcacagttatcccaggaaaagctactgagctgggatggctttttcaggtgggcttgcgcaggggtcgcgagaagcaagcccagggcgatcaggaggggagcctgcatcagggactgcatcgggaagggtgggtcagggcggagttaactgcaaggtctgtggcggcagaggtgcctt

SEQ ID NO: 131076 - DNA, 738 bp, Homo sapiens
atgctcttcacagatgacctttcccctgaccgtaggctgagagtcagagactcacattgctgctcccagaacctctgcactcagaagcctgatgccactaccatcccacagctgccccccaccaggaagactgaaggcaaaggtggtgctgatctcttgttctcaagaggagagaggggaaccccagagatgcaggagagcgagactgtggagggcagcctccacccacctccggtggggcatctgggcttgcttctgaataaccagctggaaagcctgccctgcccgccagctctgggggaagggaagctggaggcccaggacagttctcttgatttgcaagctcacgaaacagtgcgtcagcaaagcagtgcccctagaagggttgacaacgcgtctgctctgaacggggttccagtggtggtgtcgacccacacagttcagcacttagaggaaggccctgttcagggcactttgcttatattcactggtttgactccataccagccccttgagatggaggctataattatccccatttttacagatgaggaaactgaggcccagcgaggctcagtgatgctcagggattccaaactccagagcccacattcctatcctatgtgctacactgatgtctacatagagcttcagcactgggctggcatacggcaagctctccatacaagtcatatatggttatcattattacgagttccaggacctttggggcactga

SEQ ID NO: 131077 - DNA, 2813 bp, Homo sapiens
ctccaccgacagccaggcactgggcagcacgcactggagacccaggaccctgtgcaggagcagctccgggtgacacgaggggactgaagatactcccacaggggctcagcaggagcaatgggtaaccaaatgagtgttccccaaagagttgaagaccaagagaatgaaccagaagcagagacttaccaggacaacgcgtctgctctgaacggggttccagtggtggtgtcgacccacacagttcagcacttagaggaagtcgacttgggaataagtgtcaagacggataatgtggccacttcttcccccgagacaacggagataagtgctgttgcggatgccaacggaaagaatcttgggaaagaggccaaacccgaggcaccagctgctaaatctcgttttttcttgatgctctctcggcctgtaccaggacgtaccggagaccaagccgcagattcatcccttggatcagtgaagcttgatgtcagctccaataaagctccagcgaacaaagacccaagtgagagctggacacttccggtggcagctggaccggggcaggacacagataaaaccccagggcacgccccggcccaagacaaggtcctctctgccgccagggatcccacgcttctcccacctgagacagggggagcaggaggagaagctccctccaagcccaaggactccagcttttttgacaaattcttcaagctggacaagggacaggaaaaggtgccaggtgacagccaacaggaagccaagagggcagagcatcaagacaaggtggatgaggttcctggcttatcagggcagtccgatgatgtccctgcagggaaggacatagttgacggcaaggaaaaagaaggacaagaacttggaactgcggattgctctgtccctggggacccagaaggactggagactgcaaaggacgattcccaggcagcagctatagcagagaataataattccatcatgagtttctttaaaactctggtttcacctaacaaagctgaaacaaaaaaggacccagaagacacgggtgctgaaaagtcacccaccacttcagctgaccttaagtcagacaaagccaactttacatcccaggagacccaaggggctggcaagaattccaaaggatgcaacccatcggggcacacacagtccgtgacaacccctgaacctgcgaaggaaggcaccaaggagaaatcaggacccacctctctgcctctgggcaaactgttttggaaaaagtcagttaaagaggactcagtccccacaggtgcggaggagaatgtggtgtgtgagtcaccagtagagattataaagtccaaggaagtagaatcagccttacaaacagtggacctcaacgaaggagatgctgcacctgaacccacagaagcgaaactcaaaagagaagaaagcaaaccaagaacctctctgatggcgtttctcagacaaatgtcagtgaaaggggatggagggatcacccactcagaagaaataaatgggaaagactccagctgccaaacatcagactccacagaaaagactatcacaccgccagagcctgaaccaacaggagcaccacagaagggtaaagagggctcctcgaaggacaagaagtcagcagccgagatgaacaagcagaagagcaacaagcaggaagccaaagaaccagcccagtgcacagagcaggccacggtggacacgaactcactgcagaatggggacaagctccaaaagagacctgagaagcggcagcagtcccttgggggcttctttaaaggcctgggaccaaagcggatgttggatgctcaagtgcaaacagacccagtatccatcggaccagttggcaaacccaagtaaacaaatcagcacggttcccaccaggttctcctgccaccaagatgtgttctccttactccatctcctccccaaacacgctccatgtatatattcttctgatggccagcaaatgaaattctgcctagaaattaagcccgagctgttgtatattgaggtgtattatttacgtctctggtccagtcttttctggcaaataacagtaaagatggtttagcaggtcacctagttgggtcagaagagtcgatgatcaccaagcaggaaagggagggaatagaggaatgtgttcgggttaagtgatgaaaatggcagtggtggccgggcgtggtggctctcgcctgtaatctcagcactttgggaggccgaggcaggtggatcacctgaggtcaggagttcaagactagcctggccaacatcatgaaaccccgtctctactaaaaatacaaaaattagccaggcatggtggcacacacctgtagtcccagctactcgggagcccaacgcacgagaaccgcttgtacccaggaggtggaggttgcagtgagccgaagttgcaccattgcactccaccctgggcgacagagcaagattctatcaaaaaaaaaaggcagtggcaagtaagttatagaagagaaatgctgctagaaggaattaagcgttgtagtaaacgcgtgctcatcctctaagcttgaagaagggagacgaaaatccatttgtttaaattcacatctcaaggagggagaacccgggctgtgttgggtggttgccaatttcctagaacggaatgtgtggggtatagaaaaaggaatgaataagcgttgtttttcaaatagggtccttgtaagttattgatgagagggaaaagattgactggggagggcttaaaatgatttgggaaaacaattgcttttgaggctcagtgacaacggcaaagattacaactt

SEQ ID NO: 131078 - DNA, 1302 bp, Homo sapiens
atgcacatttcttcaggcttggctagtaggagcacacagcttctagaacactgtagaggaacacctgcctcagaagggcagcttctccaagaaaaaaggacagatctgaaaacaaaggagagtttctgttccaattccagacctgtggcatatcggtggtcaatcccttttgctactcatggatgtctagaagctctttctggagcctgccatcaggcattgcccaaggccatgtcccatgatccatccatacagtgttgtcatcattctagctgtgatgttctgggagctgtccagacaagtattgaatgtgtaagcagacacaggggtaactctcaaggaacaaaattgcctgaaggcttttccacaggtacagtgttggaagttctggccagggcagtcaggcaggagaaagaaataaaggagattcaattaggaaaagaggaagtcaaattgtccctgtttgcagatgacatgattgtatatctagaaaaccccatcatctcagcccaaaatctccttaagctgataagcaacttcagcaaagtcttaggatacaaaatcaatgtgcaaaaatcacaagcattcttatacgccaataacagacaaacagagagccaaatcatgagtgaattcccattcacaattgcttcaaagagaataaaatacctaggaatccaacttacaagggatgtgaaggacctcttcaaggagaactacaaaccactgctcaccgaaataaaaaaggatacaaacaaatggaagaacattccatgctcatggataggaagaatcaatatcgtgaaaatggccatactgcccaaggtaatttatagattcaatgccatccccatcaagctaccaatgactttgttcacagaattggaaaaaactactttaaagttcatatggaaccaaaaaagagcccacattgccaagtcaatcctaagccaaaagaacaaagctggaggcatcatgctacctgacttcaaactatactacaaggctacagtaaccaaaacagcatgggcttgctcctactatccatgtcttgcggactcacaggtttatatcctcagcctggacatctatatacagagaccttcctctgtttgtctcacaggcatctccccctctacacgtctacacctgcgtttgcttcttatacctcttcttcctgggggtttctcatctctcatctgctctgtggttaacttccagtattgttcccttcagtactcccttaatactgctgccagaataattctaaaaagctggggatatttctacctgcagttatga

SEQ ID NO: 131079 - DNA, 262 bp, Homo sapiens
aaatatagtgattaaggtttctaaacacattgttacaattacagagattttaattaaaattatggcaattatcagtgatttggaacttaattacttcggtggttatagcagtgtgcctgaatactatgactacggtcatggagtaagtgaggatgcctatgacagctacggtgagaaactaagactgagagcattaagtaccttgcctcagttcaacaatttgccagtaacagaacaagaatgtgaattcaagtgtgtctga

SEQ ID NO: 131080 - DNA, 2572 bp, Homo sapiens
ctcaggtcgggcttctcagctgcgcacagcagtactcatcttggccctgggaagaaactcaagaagaagcttttgaaacataaagcttggatggggtttgacctctgcagggcagcgcccagctataggagttcccctgctgagcagagaagatgactgcagaattgagagaagccatggccctagccccatggggcccagtgaaggtgaaaaaggaggaggaagaagaagaaaacttcccaggtcaggcatccagccaacaagtgcactccgagaacatcaaagtctgggccccagtgcagggtcttcagacaggccttgatggatcagaagaggaagaaaagggtcagaacatatcctgggatatggcggtagtcctgaaagcaactcaggaggcacctgctgcttcaacccttggcagctactcattaccagggactctggccaagagtgagatactggagactcatgggaccatgaactttctaggtgctgaaaccaagaacctacagttactggttccaaaaactgagatatgtgaggaagctgaaaaacccctcatcatatcagaaagaatccagaaagctgatcctcaaggacctgagttaggagaagcttgtgaaaagggaaacatgttaaagaggcagagaataaagagagaaaagaaagatttcagacaagtgatagtgaatgactgtcacttacctgaaagcttcaaagaagaggaaaaccagaaatgtaagaaatctggaggaaaatatagccttaattctggcgctgttaaaaatccaaaaacccagcttggacaaaagccttttacgtgtagcgtgtgtgggaaaggatttagtcagagtgcaaacctcgttgtgcatcagcgaatccacactggagagaaaccctttgaatgtcatgagtgtgggaaggccttcattcagagtgcaaacctcgttgtgcatcagagaatccacactggacagaaaccttatgtttgctcaaaatgtgggaaagccttcactcagagttcaaatctgactgtacatcaaaaaatccactccttagaaaaaacttttaagtgcaatgaatgtgagaaagcctttagttacagctcacaacttgctcggcaccagaaagtccacattacggaaaaatgctatgaatgtaatgaatgtgggaaaacatttactaggagctcaaacctcattgtccaccagaggatccacactggggagaagccctttgcctgtaacgactgtggcaaagcctttacccagagtgcaaatcttattgtacatcagcgaagccatactggtgagaagccatatgagtgtaaagagtgtgggaaagcctttagttgtttttcacaccttattgtgcaccagagaattcacagtggagatcttccttacgtgtgtaatgaatgtgggaaggccttcacatgtagctcatacctacttattcatcagagaattcataatggagaaaaaccttacacatgtaatgagtgtgggaaggccttcacatgtagctcatacctacttattcatcagagaattcataatggagaaaaaccttacacatgtaatgagtgtgggaaggccttcagacagaggtcgagcctcaccgtgcaccagagaacccacactggggagaagccctatgaatgtgagaagtgtggtgcagctttcatttccaactcacacctcatgcgacaccatagaacccatcttgttgaataacaagtaaggaagaggaagacctccagcattggtcataaccttctgcctccctaatgagacacctctttgctgttttcttcctcctctataaaagtgagggctgtgtccttaaaagttatagttttcaggaatgcagcagaagacacaagaaaagcatttcgagaggctaatttaaaacaaaaagtaagcacctaaagggaaggactttgttttaactgtaccttaagcggtcatgttctctgaagtggaatgtggctttcctaggaatgggtcgtacaaagctaagtggtaatgatgctatttggggaaaggtcttttttgcttaattttgttttttaaaactctgatgattgcttgagcaacaggcaggttatctgcctggttgaattctggttgaaccgtgtattctaatatttctggttaagtggtgactgggtaaggaaaccacttggggtagcagttcaacaatcacttacgaatgtttataagctttccatttcctaggtaattttttaaaagccagtcaaaacaaaaactttactgaaaatggacagaaaataggaaatggactttttccttactgtctatcctcctgaaccttggtattgtaaagatctggggacctctgggtctgttctgaccattccctagtctccatggccaagcactcaaggattgatggacaccacacaccagctatattcatttgccaagatcaacagctccttctccaaacaactcaagcccccaattcccatcgcattccatttgggtgagatgcaactaacagccccttcctggatgaaggagtcaaagaataaagcttgcctagaggc

SEQ ID NO: 131081 - DNA, 1185 bp, Homo sapiens
atggtcaccaaacatagtcttggggatgacttggtgagaggaagggttttcttggtgctggggtctcagggactccttcggggagctgatctcagaggatttgccatggatgaccaggttgcaaaaatccacaaggctgtggttgagatggcaaacagctttaacctgggtgtgaatgaggatgacattgaggagctcctagcggtggtttcagccccagcacagaaacaggaaatgcattttgaggagacaacagctctgggtacaacaaaggaatctcctcctacctcacccctcagtgggggctcagcccctggagcccacctggagcctccttatgacccagggacacaccacctccccagtggggacttcgtgaccctgtttgttccttttgcttattctctaatcattcgtgtagttagtaagttttcatcaagggcatgtcgtaggaaaggcactgccagagaccagagagatgtagtacatctattgtcactgatttcaaagagcttgttatctagatggagttcccctgctgagcagaaaaaagactgcagaattggaaaaaagcctggccctagcccctggggcccagtgaaggtgagaaaggaggaggaagaagaagaaaacttcccaggtcaggcatccagccaacaagtgcactccgagaacatcaaagtctgggccccagtgcagggtcttcagacaggccttgatggatcagaagaggaagaaaagtggcccttggggcagggaacacatgggtcccaggcagcaggtagccttagagggctgaagtcagaggaagctccggccctactctcagggtgcctttctcccagagctcatgctgttgtcaccaggctagtactgagacctggaaaaaaaaattctggagacaagtccactgatggcccttgggaggggaagctaaagaaggtcacagtgctgaccctaacttctccaccccttttgctggtgggcagtggccagaaccccatagtaagtaaaggtaaactttcagggagggtctggtgtttaaaggcaaaaaagactgagtggtcatctccaggatggaccctggccccatgcagcccacagaagcatccctcccaaagagcatcccttctcttcttggacaatgaccccaccctggttaataaccacagcgatgtcaaatga

SEQ ID NO: 131082 - DNA, 1132 bp, Homo sapiens
cacgaattataaccagcaattgcgccaagaacttaaaacagtgaaaaaaaattatgaagctctcaaacagagacaagatgaggaaaggatggtacagagctctcctccaatatctggtgaagacaacaaatgggagcgagaaagtcaagaaacgactagagaacttctgaaagttaaagacagattaattgaagtagaaagaaataatgctacactgcaagcagagaagcaagcgttgaaaactcaactgaagcaacttgaggccacggaaccaataatttgcagggctccagattcttgcacttcagaggcagacagtgtcattaccaagaacagaataccactcttcaaacacagaatgccaagcttcaggttgaaaattccacccttaattcccaaagtacctcactcatgaaccagaatgcccaactcctaatccagcagtcttccttagaaaatgaaaatgaatctgtaatcaaagagcgagaagacctaaaatctctctatgattctctgatcaaagatcatgaaaagctggaacttcttcatgaacgtcaggcttcagagtatgaatctcttatctctaaacatggaactctgaagtctgcccacaaaaatcttgaggtggaacatagagaccttgaagaccgttacaatcagttattaaaacagaaaggacagttggaagatttggaaaaaatgctcaaagtagaacaggaaaaaatgctgcttgaaaataaaaatcatgaaacagtagctgcagaatacaagaaactttgtggtgaaaatgataggctgaatcatacctatagtcaacttttaaaagagactgaagttttacaaactgaccataaaaatttgaaaagtcttctgaataattccaaactggaacaaacaagattagaagctgaattttcaaaactaaaggaacaataccaacaattggatattacatcaaccaagctgaataaccagtgtgagttgctaagccaacttaaaggaaatttagaagaagaaaatcggcatctactagatcaaattcagacattaatgctacagaacagaacacttttggagcagaatatggaaagcaaggatctttttcatgttgaacaaaggacagtacatgtag

SEQ ID NO: 131083 - DNA, 610 bp, Homo sapiens
atgcctgatgcgaccttgtcgcgtctgatcatgcctacaagtctgtgccgaaccgtaggccggataaggcgttcacgccgcatccggcaattgagcgccggaaatatcaaccggctcaccccgcgcacctttaacgcatcagccaacggctcaacgtcttccggcgtggcgctcgcccatgctttgcgcctcgccatacacgccgtgggcatgaaacgcgttcaggcgtaccgttacatcgccgagtcttttgatgttcgccgccagttcttcgatgtgttgcaaataatccacctggccagggatcaccagcaaacgcagttccgccagcttgccgcgctctgccagcaaatagatttaagccagtatacactcaactatcgctacgtgactgggtcatggctgcgcaacgacacccgccaacacccgctgacgcgccctgacgggcttgtctgctcccggcatccgcttacagacaagctgtgaccgtctccgggagctgcatgtgtcagaggttttcaccgtcatcaccgaaacgcgcgaggcagctgcggtaaagctcatcagcgtggacgtgaagcgattcacagatgtctgcctgttcatctga

SEQ ID NO: 131084 - DNA, 2481 bp, Homo sapiens
ccttaaagggagcccccgatttagagcttgacggggaaagccggcgaacgtggcgagaaaggaagggaagaaagcgaaaggagcgggcgctagggcgctggcaagtgtagcggtcacgctgcgcgtaaccaccacacccgccgcgcttaatgcgccgctacagggcgcgtcccattcgccattcaggctgcgcaactgttggaaagggcgatcggtgcgggcctcttcgctattacgccagctggcgaaagggggatgtgctgcaaggcgattaagttggaacctgtgccaaattgtgcagatgtacgagggacattcccagcagcctggtctgcaacccagattgcagagatggagctctcagactttgaggactgcctgacattatttgcaggagacccaggacttgggcctgaggaactgcgggcagccatgggcaaagcaaaacagaaacatgaaacagaatttttacaatgcccacaagggcccaatacacaacccccaaaacacacacatcccacccagatagtgtctgagcccctagatgggtaccgagctcgaattgatatacagggctcacagtgcacagggctgttcagcaccacagtgctgggtggctcctccagtgccccgaatcttcaggactacgcccgcagccatggcaaaaagctaccacctgccagtctgaagcaccgagatgggcagtttgatgtgccttcctggccaaaagccaaggcccaaggcatccctcaatggcaactctttaatctgagaagtagcaaccagttaaagaagcactactgggagaccagctgtgaaagagagattaaagtcagaactggcgtaagcatccgaggactcagtctgcctccagcttgcactcgagcagagcgacgagaggtgcaacgtgttgtggtggatgcactgagtggcctgaagggtgacctggctggacgttactataggctcagtgagatgacagaggctgaacagcagcagcttattgataaccactttctgtttgataagcatgtgtccccgttgctgactgcagcaggaatggctcgagtctggccatatgctcgtggattttggcacatcaatgagaagagcttcctgatctgggtgaatgaggaggatcatacacgggtgatctccatggacaagggtggtaacatgaagagagtgtttgaaagattctgccgaggcctcaaagagagccaggaagaggagcaaggtgcttccttgccacctctgtgcacgccttacaaagttgagaaaggactccctgggaggaaccaaggaaatattaattcttatgccatctgtgctgtgtcctccacctccattctgcacccaagtctgaagccctgttatttcctgcctctgcttctcatgatcccggggatcactctagagtcgggcaccgacattgcagcatttgatctatctgctcaggtagatggtaactctcaatttggcttcagtgatcaaccctccctaaattcacacgtgtctgaagaacatcaaggccttgggctgctccagcagctacctgagagtggagcacaagagctctccatagaaggggagcaagagctttttgaaccaaatcagtctccacaggtgccacctatggtaaccagccagccatctgaggaggtcagccagccatgtcagaaggtccttaacatcagtcagccatgccaggacatttctgaggcgctcagccagccatgtcagaaggtccctgacatcagacagcaatgcctggagaaccatggcaatggggttggtagcttggtccaggaaacccttgtagaagttggcagctcagctgaagagatccctgaggaggtcatccagccataccaggagttctctgtggagctggctcccaccagaagtacttccctgctcaactccatgactatcatccagaatcctgtgaaggtctgtgatcaggtatttgccctgatcgaaaacctcacccaccagatccgggaacgaatgcaggaccccaggaaaccagagttgtggagccaggatgaagtagagcaagctggacgcctagtattcactctgtctactgaggcaatttccttgatccccagggaggccttgggtccagagaccctggagcggcttctagaaaagcagcagagctgggagcagagcagagttggacagctgtgtagggagccacagcttgctgccaagaaagcagccctggtagcaggggtggtgcgaccagctgctgaggatcttccagggtttattgagaatatgtttttcgtctcagccaatccctgggtgagtttcaccagttttgatttaaacgtggccaatatggacaacttcttcgcccccgttttcaccatgggcaaatattatacgcaaggcgacaaggtgctgatgccgctggcgattcaggggtaccgagctcgaatgcgaaaagctgtggtgtgtccactcaattga

SEQ ID NO: 131085 - DNA, 2025 bp, Homo sapiens
atgactgttctggaggagagtacctaccacaagttggaaatacttattgagtacctgaacatgtcgacccatgttctagatgttgaagatgggaaaaacaaagttcccaccttcagagatattatagatgatattcagccgagtcgagcaaggccgaggggagccgtgcaaggccgagcagagccgagcgcctccgagagcggccgagcccagccgagcggcccggagtcggttggtgcagctgcgtccccgccgctcagcagtccgcggctccggcgtcgccgccgccgccgcctctgcggggcctgcgccggccgcccgcccggccgcggggagggaggcccgcagcgcgggaagagtggcccggtcgcgggcgccgccaccgccgccgctgccaggtctgtggtcttgctgacttcaagaaaggagctgcggacctttgtggtgagtgttacagctcttaaagatggcatggacctaaagactcccggagacggtcacagcttgtctgtaagcggatgccggaagcagacaagcccgtcagggcgcgtcaaccgggtgttggcgggttgtcggggctgttttaattatgcggcatcagagcagattgtactgaaaggtgcccccatatgcgggtgtgaaaataccgccaacagatgcgtaaggagaaaatccggcatcaggccgccattcgccattcaggttgcgcaactgttgggaaaggccgatcggtccgggcctcttcgctattacgccagctggcgaaaagggggatgtgctgcaaaggcgattaagttggcaccagccatgaactacgtggggcagctggcggagacggtgtttgggacggtgaaggagctgtaccggggcctgaacccagccacactgagcggcggcattgacgtgctggtggtgaagcaggtggacggctcgttccggtgctcacccttccacgtgcgttttggcaagctgggcgtcctgcggtcgcggaaaaaggtggtagacattgagctcaatggggagcctgtggacttgcacatgaagcttggggacagcggggaggccttctttgttcaggagctggagagcgatgatgaacatgtgcctcccggcctgtgcacctcacccatcccttgggggggtctgtctggcttcccctcggactcccagctgggcactgccagtgagcctgagggcctcgtcatggcaggcacggcctccactgggcggaggaagaggcgtcgcaggaggaaacccaagcagaaagaggatgcagtggcaactgattctagtccagaggaactggaggcaggcgctgagagtgagctatccctgccggaaaagctgaggccagagcccccaggcagtgtccagttggaagagaagtcttcactgcagcccaaagacatctacccctactcggatggcgagtggcccccccaggccagtgactctgggctgggggccagaagatggagtgaacccagcagtcagaagtccctgagggaccccaaccctgaacatgaacctgaacccactctggacacagtggatacaatagcactgtccctctgtggtggactggctgacagccgggacatctccctagagaaattcaaccagcacagcgtctcttaccaggacctcaccaaaaaccccggacttttggatgacccaaacctagtggtgaaaatcaatggaaagcattataactgggctgtggctgcccccatgatcctctccctgcaagccttccagaaaaacttgcccaagggcaagagggttaaagaaggagtaggaagagggggagctgatgagaggagcaatggtcagagtggagggggtggagagagaatacagtcacagatttccccaccccatcaactttccaagcagctcagagcggcagcagagccgcgagtgagggctgcgcaccacatatccggagctgtgtgccacgtggcagaagctgtcccgttgagtcatgggatgtactgctgcactgctctagagtttggtgtgtag

SEQ ID NO: 131086 - DNA, 403 bp, Homo sapiens
  misc_feature (1)...(403): n = a,t,c or g
naaccgtctccagcagggcgtcgtggtctgtgcggggtctttcttttcactacctggctgcccccgtaccagctgctgggaaagactacttcctccgagttgtgccggcctccgcgttctcctcacctcccctctcctacggacctccgccccctcgcggagaggccttgccgctttaagagccgggctagcgattgacaagcaataaacgctgagcgcccggctgcgctggagccgcccggagctaggggcttcccggggcgcagccatgcagcaagtcctggacaacttgggatccctccccagtgccacgggggctgcagagctggacctgatcttccttcgaggcattatggaaagtcccatagtaagatccctggccaaggcccatgagaggctggac

SEQ ID NO: 131087 - DNA, 1994 bp, Homo sapiens
gtctcccaaaccactacctgtttgctcccgtaccagctgctgggaaagactacttcctccgagttgtgccggcctccgcgttctcctcacctcccctctcctccggacctccgccccctcgcggagaggccttgccgctttaagagccgggctagcgattgacaagcaataaacgctgagcgcccggctgcgctggagccgcccggagctaggggcttcccggggcgcaggagagacgtttcagagcccttgcctccttcaccatgccggttgccgccaccaactctgaaactgccatgcagcaagtcctggacaacttgggatccctccccagtgccacgggggctgcagagctggacctgatcttccttcgaggcattatggaaagtcccatagtaagatccctggccaaggtgataatggtattgtggtttatgcagcagaatgtctttgttcctatgaaatacatgctgaaatactttggggcccatgagaggctggaggagacgaagctggaggccgtgagagacaacaacctggagctggtgcaggagatcctgcgggacctggcgcagctggctgagcagagcagcacagccgccgagctggcccacatcctccaggagccccacttccagtccctcctggagacgcacgactctgtggcctcaaagacctatgagacaccaccccccagccctggcctggaccctacgttcagcaaccagcctgtacctcccgatgctgtgcgcatggtgggcatccgcaagacagccggagaacatctgggtgtaacgttccgcgtggagggcggcgagctggtgatcgcgcgcattctgcatgggggcatggtggctcagcaaggcctgctgcatgtgggtgacatcatcaaggaggtgaacgggcagccagtgggcagtgacccccgcgcactgcaggagctcctgcgcaatgccagtggcagtgtcatcctcaagatcctgcccaactaccaggagccccatctgccccgccaggtatttgtgaaatgtcactttgactatgacccggcccgagacagcctcatcccctgcaaggaagcaggcctgcgcttcaacgccggggacttgctccagatcgtaaaccaggatgatgccaactggtggcaggcatgccatgtcgaagggggcagtgctgggctcattcccagccagctgctggaggagaagcggaaagcatttgtcaagagggacctggagctgacaccaaactcagggaccctatgcggcagcctttcaggaaagaaaaagaagcgaatgatgtatttgaccaccaagaatgcagagtttgaccgtcatgagctgctcatttatgaggaggtggcccgcatgcccccgttccgccggaaaaccctggtactgattggggctcagggcgtgggacggcgcagcctgaagaacaagctcatcatgtgggatccagatcgctatggcaccacggtgccctacacctcccggcggccgaaagactcagagcgggaaggtcagggttacagctttgtgtcccgtggggagatggaggctgacgtccgtgctgggcgctacctggagcatggcgaatacgagggcaacctgtatggcacacgtattgactccatccggggcgtggtcgctgctgggaaggtgtgcgtgctggatgtcaacccccaggcggtgaaggtgctacgaacggccgagtttgtcccttacgtggtgttcatcgaggccccagacttcgagaccctgcgggccatgaacagggctgcgctggagagtggaatatccaccaagcagctcacggaggcggacctgagacggacagtggaggagagcagccgcatccagcggggctacgggcactactttgacctctgcctggtcaatagcaacctggagaggaccttccgcgagctccagacagccatggagaagctacggacagagccccagtgggtgcctgtcagctgggtgtactga

SEQ ID NO: 131088 - DNA, 381 bp, Homo sapiens
gagagacgtttcagagcccttgcctccttcaccatgccggttgccgccaccaactctgaaactgccatgcagcaagtcctggacaacttgggatccctccccagtgccacgggggctgcagagctggacctgatcttccttcgaggcattatggaaagtcccatagtaagatccctggccaagggtgggggtgactccatccagagaggaagagaaaggagcgggggctttggtccagggcacgtgctggcctggggctgtggaagtcggatgcagggaattgtgaagggagctggtgagagaggctcagagaaaagaggcccaggctggaaagaggcagaacagggagaaaatggaggtgaaggctcggtggctctctga

SEQ ID NO: 131089 - DNA, 1181 bp, Homo sapiens
tttcgtcacagcctgaccctctgtgaccttcctcaaaggctccccaaagaggctttcccttgaagtgcaagtcatagtggcgcccctgccacgtccctatatgaacggggtgtgtgcccgcctgccctccgacgtccgccggctgtgctggtctgcagagctgccgccagctgcaccctcctcgccatgagtgacctgcaggaagaaggcaagaatgccatcaactcaccgatgtcccccgccctggtggatgttcaccctgaagacacccagcttgaggagaacgaggagcgcacgatgattgaccccacttccaaggaagaccccaagttcaaggaactgggcaaggtcctcctcgactggattaatgacgtgctggcggaggagaggatcattgtgaagcaagctggaggaagacctgtatgacggccaggtgctgcagaagctctttggaaaaacttggcagggttgcaaagcttgaatgtggctgaggtgacacagtccgaaatagggcagaaacagaagctgcagaaggtgctggaacagttacatgaacttgctgcggccccgaagttgggcgctccggttggcttgggaattcaattcacgggaaaaaccttgttggcaatcctcaactgctggtctctctggccatgcacttcagggcccccatccgccttcctgagcatgtaacggtgcaggtggtggtcgtgcggaaacgggaaggcctgctgcattccagccacatctcggaggagctgaccacaactacagagatgatgatgggccggttcgagcgggatgccttcgacacgctgttcgaccacgccccggataagctcagcgtggtgaagaagtctctcatcacttttgtgaacaagcacctgaacaagctgaatttggaggtgacggaactggagacccagtttgcagatggcgtgtacctggttctgctcatgggccttctggaagactactttgttcctctccaccacttctacctgactccggaaagcttcgatcagaaggtccacaatgtgtccttcgcctttgagctgatgctgggacggaggccttcaagaaacccaaggctcgtcctgaagacgtggttaacttgggacctcaaatcccccctgagggttctttacaacctgttcaccaagtacaagaacgtggagtga

SEQ ID NO: 131090 - DNA, 780 bp, Homo sapiens
tggcctgctgctccaaagccatcatgccacacccccttgctgttccatcatctgccgctgtggaggctggatgtccagagctagaggtgttcaaggttcaaggtgattctggtgttaaaagaggaaataccattttacttctgaacctgtttcatggagaaagaggtacagctccgggcacagaaggcaagaatgccatcaactcaccgatgtcccccgccctggtggatgttcaccctgaagacacccagcttggtacgggggttcctccaagctaccccacggggacaggtaaagaccggagatgcacgatgattgaccccacttccaaggaagaccccaagttcaaggaactggtcaaggtaaggagctccgtcttcatggtccccaaagatgaccatgtgataatccctggagccattgactatcatcttacatggcaaagggacatggtgggtgtagttagtgctgatagagtgcaacccaaagccccctccctgaatgacatagttactccctggctggcccgagggccccaggtaagcagaggtacttttaatgacgtgctggtggaggagaggatcattgtgaagcagctggaggaagacctgtatgacggccaggtgctgcagaagctcttgggtgagttcacagcaggcgccttcgacaggtggggacgttggggcccacagtctcctggtgaacagccgggcagcctggccccaagcatagctcttgagcccggccgcggggcctttctctgacctgtctacggagcag

SEQ ID NO: 131091 - DNA, 1233 bp, Homo sapiens
atgttctttctatcagtcaaggttactgcaggtacccggaaaagaaatccagtgataggtatacagggtcaagctaatcatgctttggaggggaaaacacaacacaacacaactcaacacaacacaacacaacacagtactcttatccttttaaacttggataaatcagaaaaatattgtagtatcaagtcagatgataaaaacgaaaataaaaacgacccagagaagaaaaagaagaaaaaggacaaagagaagaaaaagaaagaggagaaaagcaaagataagaaagaagaggacctcggtgacaacgctgtgaacatctatggattccgcattcaagtactttgtcacaactgtctccacaagttggtcttgagagctgatgacaataacatgggcaatggctgctctcagaagctggcgactgctaacctcctccggttcctattgctggtcctgattccatgtatctgtgctctcgttctcttgctggtgatcctgctttcctatgttggtggtggttctttctcagcttttggattgtttcctctcacacacatacagaccagtactcagccaaagacccaagaagttctttctggagttcttcagagctttttctgtactgctgccttctctgcacaaattctagccacactggcctctctgaactacgaattttgcctactcaactttatgagacagccagattctgcttatgatcttcctccttgtgctatagccagaagtcttcatgttgttgccctggaaactgtccaccttgtgatcaaaactgtggacggactttatgatgtagaaaccataagtgtccatctgtctgtcacagagtttttagattcccgagagagaaaacctaatagactcaccatggatccaagggctccttttggcacaggcagccacagtcagggaactagaacaggtagcatagccatggctgtggctactgggggaattatggtgaaccaggcagccatcccaatgtatgtcttctacaaattttaccagtatgtggcagggtcaaatgaagggtttagagaaaaaaagatacatttattgaaggcagaagacctagccagagaaaagacagactttgaagtcgtcaatgaaattgtgaagatgagtatgaggtcttttaggaggcagaaagatataacatcaagaccagtgatttttaacttttcatcaacccccagcgcaacagaatactga

SEQ ID NO: 131092 - DNA, 424 bp, Homo sapiens
  misc_feature (1)...(424): n = a,t,c or g
aaatatgcccgagctgagagagagctgaaaccagctcgaatatatggattgggatctttagctctgtatgaaaaagctgatatcaaggggcctgaagacaagaagaaacacctccttattggtgtgtcctcagatcgaggactgtgtggtgctattcattcctccattgctaaacagatgaaaagcgaggttgctacactaacagcagctgggaaagaagttatgcttgttggaattggtgacaaaatcagaggcatactttataggtctgtcatctcctataaggacagaagaaaagcccatcttttcccttaataccgttggcaagtgctgacagcatggagtatcttatggacgatatttgatggcttgacgtggctggcaaaatttacccagggattacaattntggggccaaccttcat

SEQ ID NO: 131093 - DNA, 503 bp, Homo sapiens
ataagaaaaacaatgattttattttaagttgtttattttaagataatttacaaatatcttgctgtcttcagtaattcaaataatggaggaacagtttcttcggacaaaggcagcagtaagctaaaaacaaaatcaactggctgaattttccttctttacctgaaaaacaaagtacagaacaagtaagaaatcaaacagcattttttggggaaaataatgtcaagagataataatacatatttaacgtggggtacagagaactgaatttacacaaataaagtgttacccttataccagtgattctaaaattttgggtctgggggaacctttcatgggggttcatgagggtcaaaactatttttcatggataatgttattttgcctgttatattctcattcttcgagtatacagtagagttttccagaggccacatgatccatgacatcacaacaaaatgaatagagacagatgaaaatctagctggcttctgctacatgaatca

SEQ ID NO: 131094 - DNA, 1113 bp, Homo sapiens
ctgaccgaccttcagcagggctgtggctaccatgttctctcgcgcgggtgtcgctgggctgtcggcctggaccttgcagccgcaatggattcaagttcgaaatatggcaactttgaaagatatcaccaggagactaaagtccatcaaaaacatccagaaaattaccaagtctatgaaaatggtagcggcagcaaaatatgcccgagctgagagagagctgaaaccagctcgaatatatggattgggatctttagctctgtatgaaaaagctgatatcaaggggcctgaagacaagaagaaacacctccttattggtgtgtcctcagatcgaggactgtgtggtgctattcattcctccattgctaaacagatgaaaagcgaggttgctacactaacagcagctgggaaagaagttatgcttgttggaattggtgacaaaatcagaggcatactttataggactcattctgaccagtttctggtggcattcaaagaagtgggaagaaagccccccacttttggagatgcgtcagtcattgcccttgaattactaaattctggatatgaatttgatgaaggctccatcatctttaataaattcaggtctgtcatctcctataggacagaagaaaagccgatgcttttcccttaatacccgttgcaagtgctgaccagcatggagtatctatgacggatattgatgctgacgttgctgcaaaaattacccaagaatacaaatctgggccaacatcatcttacttactctctggaaggagtccaccactagtggaggcaggagtgccaggggttgacagccatgggacaatggccaggcaaggattgctttctggaggatggatttggacaatttggacatttggacatttcaaccgttacccgccaagctgtcatcacaaaagagttgattgaaattatctctggtgctgcgagctctgtaaagaaggaaaattcagccagttgattttgtttttagcttactgctgcctttgtccgaagaaaccgttcctccattatttgaattactgaagacagcaagatatttgtaaattatcttaaaataaaacaacttaaaataaaatcattgtttttctt

SEQ ID NO: 131095 - DNA, 1790 bp, Homo sapiens
aataaggcacagaactgggctgaggctgtggctgcagccctttccctctacgttgtccccatagaggctagacattttaaggtcagtggagcactaccaaatcaaaagagcctcttaaattgtcttctactaaaaaattttaatagtagcatattaatatttttaaatgttttagtatcatctcatttcaaaaactatatctattgttcttatatataagaaaaacaatgattttattttaagttgtttattttaagataatttacaaatatcttgctgtcttcagtaattcaaataatggaggaacagtttccttcggacaaaggcagcagtaaagctaaaaaacaaaatcaaactggctgaaatttcccttctttaccctcttgtctgaggatggaaacttggattttccattaatcccagaagctgcaagcaccagaagataatttcaaatccaactccttttgtgatgaacagcttggcggggtacgggttgaatgtcaatgtcaaatttgtcaatcatctcaggaaggcattcttgcttggcattggtcatggggcttgtcatcctgggcactctgcttcactagtgggtgggacttccttcaggggaggtaggtaggatggatgttgggcccaggattgtattcttggggtaatttttgccagcacgtcagcctccaatatccgtcatagatactccatggtggtcaggcaccttgcaacgggtattaaagggaaaagatggggcttttccttcctgtccttaataggagatgaacaagaccctgaaatttatttaaagatgaatggagcccttcatcaaaattcatatcccagaatttagtaattccaagggcaatgactgacgcatctcccaaaaagtgggggggctttcttcccccacttcttttgaatgcccacccagaaaactgggtcaagaaatgaagtcctaataaagtaatgccctctggatttttggtcaacccaattcccaaacaagcattaacttcttttccccagctgctggttaggtgtaggcaaccctcgctttttcatcttgtttagcaaatggaggaatgaaataggcaccaacacaagtcctcgaatctgagggacacacccaattaaggaaaggtgtttttcttttcttggttcttcaggccccttgatatccagctttttccatacagagctaaagatccccaaatccataatattgaggcgggtttcagctctctctccagctacgggcatatttttgctgccgctaccattttcatagacttggtaattttctggatgtttttgatggactttagtctcctggtgatatctttcaaagttgccatatttcgaacttgaatccattgcggctgcaaggtccaggccgacagcccagcgacacccgcgcgagagaaagctgaaaccagctcgaatatatggattgggatctttagctctgtatgaaaaagctgatatcaaggggcctgaagacaagaagaaacacctccttattggtgtgtcctcagatcgaggactgtgtggtgctattcattcctccattgctaaacagatgaaaagcgaggttgctacactaacagcagctgggaaagaagttatgcttgttggaattggtgacaaaatcagaggcatactttataggactcattctgaccagtttctggtggcattcaaagaagtgggaagaaagccccccacttttggagatgcgttcagtcattgccccttgaaattactaaattctggatatgaatttgatgaaggct

SEQ ID NO: 131096 - DNA, 930 bp, Homo sapiens
atgagcaataaaatccaggctgaggtggtctcagatggaaatgaagaacttgttcagaaatggaggaagggtgactcttgttatgctttagcaaagagagtggtggcattttgccgctgccctagagatctgcagaactttgtacttgagagagatgatttagggtatctggcagaagaaatttctaagcagcaaagcattcaagaggtgacttgggtgctgttaaaggcatttagttttataagggaagcaaagaataaaagtttggaaaatttgcagcctgataatgtgatagaaaagaaaatcctattttctgaggagaaattcaagccagttgcagaaatttgcataagtaatgagaagctgaatgctaacccccaagacaatagggaaaatatctccaggacatgtcagaggtcttcatggcaatccctcccatcacaggcccagaggtttagaagcaaaaaatggttttgtgggccaggcccagggtccctctgctgtatgcagtctagggacttggtgtcctgtgtcccagccactccagctgtgattaaaggggccaatgcagagcttgagatgtggcttcagagggcacaagccccaagccttggcagctttcaagtggtgttgagcctacagggctcaatgactttgacagcagtgataacagagtgccggaaggtagattcagatgactttctgcttggccctcctgtttatgtccttggtttttataaaatcgtttactggcccttattcgtcctgattttccacgccatctcccccatcccccatttcattgccaaaagagtcacctatgactcagatgcaaccagtagtgcctgtcgggaactggcatatttcttcactactggaattgttgtttctgcctttggatttcctgttattcttgctcgtgtggctgtg

SEQ ID NO: 131097 - DNA, 1134 bp, Homo sapiens
  misc_feature (1)...(1134): n = a,t,c or g
gtctggcttgggcaggctgcccgggccgtggcaggaagccggaagcagccgcggccccagttcgggagacatggcgggcgttaaagctctcgtggcattatccttcagtggggctattggactgacttttctnatatgctgggatgtgccttagaggattatggcgtttactggcccttattcgtcctgatttttccacgccatttcctccatcccccatttcattgccaaaagagtcacctatgactcagatgcaaccaagtagtgcctgtcgggaactggcatatttcttcactactggaattgttgtttcctgcctttggatttccccggtaatccttgcccgtgtggctttgatcaaaatggggagcctgcggcctttgtgttggcaaggcaatgcagtcattttcccttacaattcaaggggtttttccctatatttgggaagaggagatgattttagctggggagcagtggtagcactttattctgattacagtgcattgaatttcttaggaactcatactatctgtatacatgtgcacatgcgggcattttactatgaaattttaataatgctgggggtttttaatacctttatatatcatgttcactttaagaaaagacttcataagtaggagatgagttttattcacagcaaatagacctgtcaaatttagattatgttactcaaattatgttacttgtttggctgttcatgtagtcacggtgctctcagaaaatatattaacgcagtcttgtaggcagctgccaccttatgcagtgcatcgaaaccttttgcttggggatgtgcttggagaggcagataacgctgaagcaggcctctcatgacccaggaaggccggggtggatccctctttgtgttgtagtccatgctattaaaagtgtggcccacagaccaagagcctcaacatttcctagagccttattagaaatgcagaatctgaagccccactctggacccaggacattttgatgagatccaaaggagttgtatgcacatgaaagtttgagaagcatcatcatagagaagtaaacatcacacccaacttccttatctttccagtggctaaaccacttaacctctctgggtgttacctgctcatttgttta

SEQ ID NO: 131098 - DNA, 434 bp, Homo sapiens
ccgtgcaaaaaactcccaaagccgtcttgggtttggctcccacagctcttgaccaatgtggccaaagctggacacctccttgggacactgggattattcataaatgcagcccgccctgactctccctgaatagcatctgaagtctttgtgaaggtcatggatcctgaacaaagtgtcaagggcaccaagaaggctgagggaagtccccggaagcggctgaccaaaggagaggccattcagaccagtgtttcttccagcgtcccatacccaggcagcggcacagctgccacccaagagagccccgcccaagagctcttagccccgcagcccttcccgggcccctcatcagttcttagggaaggctctcaggagaaaacgggccagcagcagaagcccaccaaaaggccccccatcgaagcatccgtccatgtatt

SEQ ID NO: 131099 - DNA, 1368 bp, Homo sapiens
atggccggggctcacccactgcatctgggccccagaggaatggctctggctctggctctcttcgcccccgccccacccccaccatatctggtacacagggttggactttgtccacactacaaggcccacagcaccctgcatcccaaggtgagtggggaagggaagcagaagtgggtgggcagtgccttcctgagccaggcagaggccagctctcacactggctccaccatgaagcactcccagcagctgccaggccgtctgcacagtgtgtgcctgcagcaaagacactgtgtcccttctactggggctgcaaacagaacttcccaaaacccggtggggccaggtgtcgatggggaaatgactggttttgcacaggtgaaggagcagaagggctcaagctgcaagagccatgctgctggagtctcctgggcctccttctggggagctctaaactcagtggggtccttcctgacggcctttctccaagggacccaggatcctgggctcagtttggacccctgggagagcttcacgggtgtacaggaaagggttaccggacccatggcagccaaggtgactccaggcctcctgatctgcccttgctggaagaaacccacagaccaacccccagagaaagttgaagaaagcaagccagggaggcagccggctgcctgtggtgaggagacccaggtgctcagccccctggctctcaccagggcactgactggacaaggaaaggctgcaaagccagaggaaccttccagaatgatcctcctggcaattgcttggatcaagcaaatggtcacagctgtgtcagattcatctgaagtctttgtgaaggtcatggatcctgaacaaagtgtcaagggcaccaagaaggctgagggaagtccccggaagcggctgaccaaaggagaggccattcagaccagtgtttcttccagcgtcccatacccaggcagcggcacagctgccacccaagagagccccgcccaagagctcttagccccgcagcccttcccgggcccctcatcagttcttagggaaggctctcaggagaaaacgggccagcagcagaagccccccaaaaggccccccatcgaagcatccgtccacatctcacagcttccgcagcaccctctgacaccagcattcatgtcgcctggcaaacctgagcatctcctggaggggatactgtggctctgtgacgatgtttctgtttgcatcctctctttcctctacatcctcgtcaccttcatcatcttcctcttcctcatgctgctcctcttctacttcatcggaatattgaccttcctggggacaagactctcatcaggagagatgggcacaaaggaatcttctctgtga

SEQ ID NO: 131100 - DNA, 839 bp, Homo sapiens
ttgagcatatagtgatctttattcaacttcccaagatccagtcctcagctaatttacaaaactacaatagtgttacatactctcctaggtctacacggcaaagtacagtttgactgttgcaactagtgctgccttacaaaaaaaggctttatcccatgccacccatcctaaacccagctgttcagagcagtgtacctggaaatcagcctcaaagtacggactgcaagacaaggcacaaggaaaccctaacacgaagtcctatgttctgggcaaagggatggggatggcaggtgggacgcacccaggtcagggcgagggcgcggcaagttttctattaaatctcagtagattacaactcatatccaatgtctgatatattttcgagggaaaatggtgcttgaaagatgtttctacgagaaataagcttcatctcggtcaatctgttcgacccaacttctggcagcaggtgtgggggcggcgccaaggtctgcgcggtaatccaaacaggcagtcccacccagggccaccccaaagccagatgctccgacgcaactcgagcaggccacactgtctttcggacaaagcgacgcggtcctcacaggcgggaaggagagtgcgtcccggtcgggaaggacgccgtcggagagcggcctaaccacgtgacgcccgcggcgaccttgggggtcaccctgcggacgcaccgccctctccctcacatccgccgccgcgcccgccccccgctcgcccaccgccaatgagccgtcgctccgcgcccgcgcgacctcggagcccgcccgtacccgccaatctccgcccgccggcaggccccgcggctccat

SEQ ID NO: 131101 - DNA, 195 bp, Homo sapiens
ggcaaaggctttactatgttctcaatccttactaaacataaggtaattcataatggagagaaaccctacaaatgtgaagaatgtgataaggcaactcatgctggagagaaaccctacaaatgtgaagaatgtggcaaagctttcaactggtcctcaaaccttatggaacatagagaattcatactgagagaacct

SEQ ID NO: 131102 - DNA, 1320 bp, Homo sapiens
atgactcttaacgagcatgctgccttcaagcatctgtttaacaaagcacatcttgcaccgcccttaatccatttaaccctgagtggacacagcacatgtttcagagagcacagggttggggttatatgttctcattttgctcaagacctttggccagagcagggcagagaagattctttccaaaaagtgatattgagaagatatgaaaaatgtggacatgagaatttacagttaaaaattggttgtaccaatgtggatgagtcccttacttataagagaattcatactggagagaaaccctgcaaatgtgaagaatgtgacaaagcctttagtaagttctcaatccttactaagcataaggtaattcatactggagagaaacattacaaatgtgaagaatgtggcaaagccttcacccggtcctcaagccttattgaacataagagaagtcatgctggagagaaaccctacaaatgtgaagaatgtggcaaagcctttagtaaggcctcaacccttactgcacataagacaattcatgctggagagaaaccctacaaatgtgaagaatgtggcaaagctttcaaccggtcctcaaaccttatggaacataagagaattcatactggagagaagccctgcaaatgtgaagaatgtggcaaagcctttggtaacttctcaacccttactaaacataaggtaattcatactggagagaaaccctacaaatgtgaagaatgtggcaaagccttcagctggccctcaagccttactgaacacaagagaattcatgctggagacaaaccttacaaatgtgaagaatgtggcaaaacctttaagtggtcctcaacacttactaaacataagataattcatactggagagaaaccctacaaatgtgaagaatgtggcaaagcctttactacattttcgagccttactaaacataaagtaattcatactggagagaaacactacaaatgtgaagaatgtggcaaagtcttcagctggtcctcaagccttactacacataaggcaattcatgctggagagaaactctacaaatgtgaagaatgtggcaaagcctttaagtggtcctcaagacttagtgaacataagagaattcatactggagagaaaccctacaaatgtgaagaatgtggcaaagcctttagctgggtctcagtccttaacaaacataagaaaattcatgctggaaagaaattctacaaatgtgaagaatgtggtaaagacttcaaccaatcctcacaccttactactcataagagaattcatactggaggaaaaaccctacaaatgtga

SEQ ID NO: 131103 - DNA, 2185 bp, Homo sapiens
acctgaaactgattcagtgaccatggggcccaatcagagtaaaatatgtgcattgagcagacctgtagacatgagaatccacttctccctccctcctcatgctaaaatgcccacaaatgttcagggatcgttgacatttcgggatgtggccatacaattctctctggaggagtggcaatgcctggacactgcacagcagaatttatataggaatgtgatgttagagaactacagaaacctggtcttcctgggtattgctgcctttaagccagacctgatcatttttctggaggaaggaaaagagtcctggaatatgaagagacatgagatggtggaagaacccccagttatatgttctcatttttcccaagagttttggccagagcaaggcatagaagattctttccaaaaaatgatattgagaagatatgacaaatgtggacatgagaatttacacttaaaaattagttgtaccaatgtggatgagtgtaacgtgcacaaaaaaggttataataaacttaaccagagtttgacaactacacaaagcaaagtatttcaatgtggcaaatatgcaaacatctttcataaatgttcaaattcaaaaagacataagataaggcatactggaaagaaacttttgaaatgtaaagaatatgtcagatcattttgcatgctttcacacctatctcaacataaaagaatttatactagagagaattcctacaaaagtgaagaacatggcaaagcctttaactggtcctcagcccttacttataagagaattcatactggagagaaaccctgcaaatgtgaagaatgtggcaaagcctttagtaagttctcaatccttactaagcataaggtaattcatactggagagaaacattacaaatgtgaagaatgtggcaaagccttcacccggtcctcaagccttattgaacataagagaagtcatgctggagagaaaccctacaaatgtgaagaatgtggcaaagcctttagtaaggcctcaacccttactgcacataagacaattcatgctggagagaaaccctacaaatgtgaagaatgtggcaaagctttcaaccggtcctcaaaccttatggaacataagagaattcatactggagagaagccctgcaaatgtgaagaatgtggcaaagcctttggtaacttctcaacccttactaaacataaggtaattcatactggagagaaaccctacaaatgtgaagaatgtggcaaagccttcagctggccctcaagccttactgaacacaagagaattcatgctggagacaaaccttacaaatgtgaagaatgtggcaaaacctttaagtggtcctcaacacttactaaacataagataattcatactggagagaaaccctacaaatgtgaagaatgtggcaaagcctttactacattttcgagccttactaaacataaagtaattcatactggagagaaacactacaaatgtgaagaatgtggcaaagtcttcagctggtcctcaagccttactacacataaggcaattcatgctggagagaaactctacaaatgtgaagaatgtggcaaagcctttaagtggtcctcaaaccttatggaacataagagaattcatactggagagaaaccctacaaatgtgaagaatgtggcaaagccttcagtaaggttgcaaaccttactaaacataaggtaattcatactggagagaaacaatacaaatgtgaagaatgtggcaaagccttcatctggtcctcaagacttagtgaacataagagaattcatactggagagaaaccctacaaatgtgaagaatgtggcaaagcctttagctgggtctcagtccttaacaaacataagaaaattcatgctggaaagaaattctacaaatgtgaagaatgtggagggaaaccctacaaatgtgaagaatgtggcaaattttttaactgttcctcaatccttactaaacataaggtaattcatactggagggaattcctacaattgtgtggaatgtggcaaagcctttaatcagtccttaaggcttactacgtacaagacaactcatactggagagaaaccatacacgtgtgaagaatgtgggaaagcctctaacagatcctcaattcttaacagacataagctaattcatactagagagaaactgcaaacctga

SEQ ID NO: 131104 - DNA, 1443 bp, Homo sapiens
agataaaggtcctcctgggggagaacagagtcccgaacaccatggccgtctggcttgcccagtggctgggtaagggggccagcctgacttccttccctccatgtcccacagcctcccttcttaggcgcctgggtgagcacattcagcagtttcaggagagctctgcccagggcctgggcctgagcctggggccaggtgctgcagccctcccaaaagtggggtggctggagcaactgctggaccccttcaacgtgtccgacagacgatcccacctctcagcgttactgggtgaatgaccaacattgggttggccaggatggacccatattcctgcatctgcatctcacctccccaccccccacccatacactcttcacaggccatcccgcagccttggccccagcctggggcgccctggtgataagcctggaacacagattttatggcctgagtatacctgctggaggccgcctggcactttcccgcctctttaacatctcctcctccagcccctggatctgcttcggaggctcctatgccggctccttaccctcccaccacgcccctaccttcctcccgcgcccaaagaatttcttgacacttccggataccttcctctgcggtccgcccacaggtggtatcccgaagcctaatgagcaccgcgatcggcgggtccctggaggtaggaggtggggcctagtccgagggggactgggagggaaaagaggcctcggatgccagggaagaggaggcccagcctaagtcttggcggacatcgcctcttgcttcccacagtgccgggcggcggtgtccgtcgccttcgctgaagtggagcggcggctgcgctcgggtggggcggctcaagcagcattgcggacggagctgagcgcttgcgggcccctgggccgcgctgaaaaccaggcggagctgttgggggcgctgcaggcactggtgggaggtgtagtgcagtatgatgggcagacgggagcgccgctaagcgtgcgacagctctgcggacttctcctcgggggcgggggcaaccgcagaggaggaatttatgtcttatgtatgtacattgttccctagattgtcttgcacagcctgggccagaagtgtttaagcttttcccgagcagagacagtggcacagctgaggagcacagaacctcaactgtctggtgtgggtgaagcacccatctacctagccccatcctatcctttctttccaggggacacagacccctggcatgtgctaagtgtaacacaggctttaggatcctcagaatcaactcttcttatccgcactggctcccactgcttggacatggcacctgagaggccctcagactcccccagcctccgcctagggcgccagaacatcttccagcagctacagacctggctcaagctggcaaaggagagccagattaagggtgaagtctga

SEQ ID NO: 131105 - DNA, 2727 bp, Homo sapiens
tcccgggtcgacgatttcgtagaacagagtcccgaacaccatggccgtctggcttgcccagtggctgggccctctgctcttggtttccctctggggactcttggctccagcctcccttcttaggcgcctgggtgagcacattcagcagtttcaggagagctctgcccagggcctgggcctgagcctggggccaggtgctgcagccctcccaaaagtggggtggctggagcaactgctggaccccttcaacgtgtccgacagacgatccttcctacagcgttactgggtgaatgaccaacattgggttggccaggatggacccatattcctgcatctagggggtgagggcagccttgggcctggctcagtgatgagaggccatcccgcagccttggccccagcctggggcgccctggtgataagcctggaacacagattttatggcctgagtatacctgctggaggcctggaaatggcccagctccgcttcttgtccagccgccttgcgctggctgatgtggtctctgcccgcctggcactttcccgcctctttaacatctcctcctccagcccctggatctgcttcggaggctcctatgccggctccttggccgcctgggcccggctgaagttcccccatctcattttcgcgtcggtcgcctcctccgccccggtgcgggccgtgctggatttctccgagtataatgacgtggtatcccgaagcctaatgagcaccgcgatcggcgggtccctggagtgccgggcggcggtgtccgtcgccttcgctgaagtggagcggcggctgcgctcgggtggggcggctcaagcagcattgcggacggagctgagcgcttgcgggcccctgggccgcgctgaaaaccaggcggagctgttgggggcgctgcaggcactggtgggaggtgtagtgcagtatgatgggcagacgggagcgccgctaagcgtgcgacagctctgcggacttctcctcgggggcgggggcaaccgcagccactccacgccctactgcgggcttcgtcgggcggtgcagattgtcttgcacagcctgggccagaagtgtttaagcttttcccgagcagagacagtggcacagctgaggagcacagaacctcaactgtctggtgtgggtgaccggcagtggttgtatcagacatgtaccgagttcggcttctatgtcacctgtgagaatcccagatgtcctttctcccagctcccagcactgccctcccagctagacctrtgtgagcaggtgtttgggctctcagccttgtcagtagcccaggctgtggctcagacgaactcctactacggtggccagacccctggggctaacaaagtgctgtttgttaatggggacacagacccctggcatgtgctaagtgtaacacaggctttaggatcctcagaatcaactcttcttatccgcactggctcccactgcttggacatggcacctgagaggccctcagactcccccagcctccgcctagggcgccagaacatcttccagcagctacagacctggctcaagctggcaaaggagagccagattaagggtgaagtctgaatctcataccctttccactccctgcatggtcacctcagtcctggacatacttgttcactgaacaaaagaaagcagcttgttttgaaagaagaaactcccaggaattggaattcagcacctgttccgcacgtaattggcatgtgtctgcaaacatccttattcccaacttaaagtgctttattgcagagagttatggaaatataagtggatgattattctcattgtaaatattggtattttgaatgttaaatgtcaaacaaatgtgacttatgctggtgccctcgccctgctgatcagattctggttcaaattctgccactccagctcctgggttaggggctttgctgtaagtttctttttctggactttagatcctgaacctgtccttgcttctcagtttctctcactgtacccctttccctcagtctcttcctctctctttcccctgtcactatttgtctttctaatctccttctgtttctctgaatatcttcatttctatctctgtgtttctgtctatttctctgtttatctttctgtccttcaatctgtgtttttgtttctggctctccgtcagtgtctttttctctcctctctctcttgctctgccatggctatttccactgctctatttctgactctcatttttggtctctgtgtgtctcctagtcactttctttctcactctgtctctgtctctatttctgtctctcctctgctgtgtcctcaatctctctgtctccctgaggctctatttctgtctctcctctgctgtgtcctcaatctctctgtctccctgaggctctatttctgtctctgatgctcttcttctgtgtctctatttctcttcctgtcacttaatcttttccttctctatctctcttatttagtcttccttccacacccttcactcaccatcttttcccacaatcaaatatcactcccctggtacttccagcttccaactctagggattcatgattctggtggagattccttcttccagggcctgggaggatagggctaatcccaagggtgcctgcttaggctatgttagctgtgacaggaacctgccatagatttgcactgttctttcctaaagatcaattattttcagcaataaatacttctcagctttttgt

SEQ ID NO: 131106 - DNA, 1255 bp, Homo sapiens
tcatctaaatccagaaatgttcttcttcttgtatttctggatatgtacatgttgtcctgcccttaaattgccattaatgtcccatttctgcatcccctccatggcattgctaagccagtagccatgttctgggcaatgcttgctgctgtacccttgtgtcagggacacctgccacatgaaaacatagccatggatgtccacatgtttctcatctttcccagtgcttcttacttcttcagttttagagacctgtttgtagtcttgtcctctttggccaaaatttccagtggagaagacataggaaaccctaatacagaccatctctaagttctctactaagatctgctggcgtatttcctcctctggtcccaggtccagctgtgcagacccagacagccccaaaatatctgcctccctgtttagttgtaagttctgtcctctgaccagatgatggctggcatggtggggggcagctggccgggcaccccaggcttgttcaaatggcagctgggcagaggtataaggaccatctgcgggcatgcaaggcttcttgaggactaagctgagaacttccaccatatttgagtaaacgctgtctttacaccatccggttgctccatcactttgagcttcacttccttccagctgtatctcgttggaaagatcccagggtggtccccggttctggcgaagaaggagagttgccattgagttaaggaagtaaaagctgtccaggtgggtcatgtcggtagaattccactgcccccttgtatgattgtagagtctggccagttcagattctgcacggtatgccagcagggctgccaggaaaggaaagaaacctgagcctctgctgaaaggtgatggatttaaggcccggctgctgaggataagataaaggtcctcctgggggagaacagagtcccgaacaccatggccgtctggcttgcccagtggctgggccctctgctcttggtttccctctggggactcttggctccaggtaagaggaggctttgctgctaaaaatactgcttggttctctaaaagaagcttggagtttgatgcaggtggaaggagatgctgccagatgccaatttttggagccagaaagtgcttgtgggtctcatcccctgccactttatgtgacagagagaaatctgaaggaactgctgtgctctccctgtccgatacatatccaggtgacacaggatgcccatctggtccttggcttgcttttctcactagtacatac

SEQ ID NO: 131107 - DNA, 1605 bp, Homo sapiens
atggactctctgtggggcccaggagctgggagtcacccctttggggtccacaacagccggctgtccccagacttgtgtccagggaagatagtgttgagggccctcaaggagagcggggcagggatgcctgagcaggacaaggaccctagagtccaagagaatcctggtgatcagagaagggtccccgaggtcaccggggatgcaccgtctgcatttcggcccctgcgggacaatggaggcctctctccctttgtgcccgggcccgggcctctgcagacagacctccatgcccagaggtcagaaatcagatatgaccagtcatcccagacctcctggacgagctcgtgcaccaaccgaaatgccatctccagctcctacagctccacgggaggcttgccggggctaaagcggaggagggggccagcctcatcccactgccagctgaccctcagttcctcaaagacagtgagtgaggacaggcctcaggctgtctcttcgggtcacacccagtgtgaaaaggtggcagagaaagcaccagggcagacactcgccctcaggaatgactcctccagatccgaggcctctaggcccagtacacgcaagtttcccctgctgccacacaggcgaggggagcctttgatgctgccacctcccgtagagctggggtaccgggtcactgctgaagacctggactgggagaaggaggcggcattccagtgcatcaagagtgcactgcaggttgaggacaaggccatctcagactgcagaccctcacggccttcccacactttgtcctcacttgcaacaggggcttctggactcagcccaggtcacctcgctgattcctgcccccttcccagctgcaagcatggatgcgggcatgagaagaacaaggcctggcacttctgctcctgcagctgccgcagcagcccctcccccctccacattgaaccgcacattggggtcactattggagtggatggaggcccttcacatttctgggcctcagccacagctgcagcaggtgcccagaggtcagaaccagagatcccagacctcccggaccagctcgtgccccaaacgaaatgccatctcgagctcctgcagctctacgggagacctcccgggacgaaagcggaagaggcgccagcctcatcccactgccagctgaccctcagttcctcaaacacagtgagtgaggacggacctgaggctgtctcttcgggtcacacccagtgtgaaaagacggcagatacagcaccagggcagacactcggccccaggggtggctcccccagatcccagtcctctaggccccgtagacacaagtttcccctgctgccacgcaggcgaggggagcctttgatgctgccacctcccttagagctggggtactgggtcactgctgaagacctggaccgggagaaggaggcggcattccagcgcatcaacagtgcactgcaggttgaggacaaggccatctcggactgcagaccctcacggccttcccacactttgtcctcacttgctacaggggcttctggtctgcctgccatttctaaagcacccagtatggatgcacagcaggagagacacaagtcctaa

SEQ ID NO: 131108 - DNA, 1158 bp, Homo sapiens; identical to SEQ ID NO: 125202

SEQ ID NO: 131109 - DNA, 1238 bp, Homo sapiens
atggactctctgtggggcccaggagccgggagtcacccctttggggtccacaacacccggctgtccccagacttgtgtccagggaagatagtgttgagggccctcaaggagagcggggcagggatgcctgagcaggacaaggaccctagagtccaagagaatcctggtgatcagagaagggtccccgaggtcaccggggatgcaccgtctgcatttcggcccctgcgggacaatagaggcctctctccctttgtgcccgggcccgggcctctgcagacagacctccatgcccagaggtcagaaatcagatataaccagacatcccagatctcctggacgagctcctgcaccaaccgaaatgccatctccagctcctacagctccatgggaggcttgccggggctaaagcggaggagggggccagcctcatcccactgccagctgaccctcagttcctcaaagacagtgagtgaggacaggcctcaggctgtctcttcaggtcacacccagtgtgaaaaggcagcagatatagcaccagggcagacactcgccctcaggaatgactcctccacatccgaggcctctaggcccagtacacacaagtttcccctgctgccacgcaggcgaggggagcctttgatgcttgccaccttccttagaagtgggggtaccggggtcacttgtgaaggaactggaccgggagaaggaggcggcatttccagcgcatcaacagtgcactgcaggttgaggacaaggccatctcggactgcagaccctcatggccttcccacactttgtcctcacttgcaacagggacttctggtctgcctgccatttctaaagcacccagtatggatgcacagcaggagacacacaagtcccaagactgcctgggcctactggcccccttagcatctgctgcaggggtcccctctacagctcccatgtctgggaagaagcacagaccaccaggccccctgttctcctcctcagatccccttcctgccacctcttcccattcccaggactcagcccaggtcacctcgctgattcctgcccccttcccagctgcaagcatggatgtgggcatgagaagaacaaggcgaggggagcctttgatgctgccacctcccttagagctggggtaccgggtcactgctgaagacctggaccaggagaaggaggcggctttccagcgcatcaagagtgcactgcaggttgaggacaaggccatttag

SEQ ID NO: 131110 - DNA, 836 bp, Homo sapiens
tgccctcacttcctttttgggcccaagcccaaggccctgcgagtagaactcattggcataaagccccttcagcccatcgaccagttcactttgctagtgggatctctccgttgctcctgcccctggactgagtggcaggccatcctacaaacacccgcacactcgacatcagtggtgtcaagacaactctaagaaggttttccgtgatcctgcaagacctgtgttccatcctggtgattctgtcttcaatttcactgcacaggtaccacagtaagccagtgctgtgtgctctgagttccacggcatcccccagctcagccactacactgagcacaaggactctgtggggcccaggagcaggtagtcacccctttggggtccacaacacccggctgtccccagacttgtgtccagcgaagatagtgttgagggccctcaaggagagcggggcagggatgcctgagcagcacaaggaccccagagtccaagaaaatcctgatgatcagagaacggtccccgaggtcaccggggatgcacggtctgcattttggcccctgcgggacaatggaggcccctctccctttgtgcccaggcccgggcctctgcagacagacctccacgcccagagctcagaaatcagatataagcacacatcccagacatcctggacgagctcgagcaccaaacgaaatggcatctgcagctcctacagctccacgggaggcttgccggggctaaagcagaggatggggccagcctcatcccgacggggcaaccaccggcccaccggggagcgcgacacgaggcccctcaaccgctacccatcgggaggttga

SEQ ID NO: 131111 - DNA, 2948 bp, Homo sapiens
  misc_feature (1)...(2948): n = a,t,c or g
atgcctgagcaggacaaggaccctagagtccaagagaatcctgatgatcagagaagggtccccaaggtcaccggggatgcacggtctgcatttcggcccctgcgggacaatggagtcctctctccctttgtgcccaggcccgggcctctgcagacatacctccatgcccagaggtcagaaatcagatataaccagacatcccagaatacctggacgagctcgtgcaccaaccaaaatgccatctccagctcctatagctccgtgggaggcttgctggggctaaagtggaggaggggaccagcagggcaggagagcggggcagggatgcctgagcaggacaagggaccccagagtcccaanaaaatcctgatgatcacagaacggtccccgaggtcaccggggatgcacggtctgcattttggcccctgcgggacaatggaggcctctctccctttgtgcccaggcccgggcctctgcagacagacctccatgcccagagctcagaaatcagatataaccagacatcccagacatcctggacgagctcgagcaccaaacgaaatgctatctccagctcctacagctccacgggaggcttgccggggctaaagcagaggaggggaccagcctcatcccgctgccagctgaccctcagttactcaaagacagtgagtgaggacaggcctcaggctgtctcttcgggtcacacacggtgtgaaaaggcggcagatacagcaccagggcagacactcgcccccaggggtggctcccccagatcccaggcctctaggccccgtagacgcaagattcccctgctgccaagcaggcgaggggagcctttgatgctgccacctcccttagagctggggtaccgggtcacggctgaagacctgcacctggaaaaagagacggcattccagcgcatcaacagtgcactgcacgttgaggacaaggccatcccggactgcagaccctcacggccttcccacactttgtcctcacttgcaacaggggcttcgggtgggcctcccgtttctaaagcacccactatggatgcacagccggacaaactcaagtcccaagactgcctgggcctagtggccgccctagcatctgctacagaggtctcctctacagctcccatgtctgggaagaagcacagaccaccaggacccctgttctcctcctcagatccccttcctgccacctcttcccactcccaggactcagcccaggtcacctcgatgattcctgcccccttcacagctgcaagcagggatgccagcatgagaagaacaaggcctggcacctcggctcctgcawwtgccgcagcagcccctcccccctccacattgaaccccacgtcggggtcactactcaatgcagtggatgaaggcccctcacatttcttggcctcagccacagctgcagcaggtgcccagaggtcagaagtgagatataaccagagatcccagacctcccggaccagatcgtgcaccaaacgaaatgccagctcgagctcctacagctctacggaaggcctcccggaactaaagcggaggaggggaccagcctcatcccactgccagctggccctcagttcctcaaacacagtgagtgaggacggacctcaggctgtctcttcgggtcacagccactgtgaaaacaacgcagatacagcaccagggcagacactcgcccccaggggtggctcccccagatcccaggcctctaggccctgcatcaacagtgcactgcaggttgaggacaaggccatctcgcactgcagacactcacggccttcccacactttgtcctcacttgcaacaggggcttctggtgggtctagcgtttctaaagcacccactatggatgcacagcaggacagacccaagtcccaagactgcctgggcctagtggcccccctagcatctgctgcacaggtcccctctacagctcccgtgtctgggaagaagcacagaccaccaggacccctgttctcctcctcagatccccttcctgccacatcttcccactcccgggactcagcccaggtcacctcgctgattcctgcccccttcacagctgcaagcatggatgccggcatgagaagaacaaggcctggcacgtcggctcctgcagctgccgcagcagcccctcccccctccacattgaaccccatgttggggttactactcaatgcaatggatgcaggcccctcatatttctgggcctcagccacagctgcagcaggtgcccagaggtcagaagtgagatataaccagagatcccagacctcccggaccagatcgtgcaccaaacgaaatgccagctcgagctcctacagctctacggaaggcctcccggaactaaagcggaggagggggccagcctcatcccactgccagctggccctcagttcttcaaacacagtgagtgaggacggacctcaggctgtctcttcgggtcacagccactgtgaaaacaacgcagatacagcaccagggcagacacttgcccccaggggtggctcccccagatcccaggcctctaggccccgcatcaacagtgcactgcaggttgaggacaaggccatctggcactgcagacactcacggccttcccacactttgtcctcacttgcaacaggggcttctggtgggtctagcgtttctaaagcacccactatggatgcacagcaggacagacccaagtcccaagactgcctgggcctagtggcccccctagcatctgctgcacaggtcccctccacagctcccgtgtctgggaagaagcacagaccaccaggacccctgttctcctcctcagatccccttcctgccacatattcccactcccgggactcagcccaggtcacctcgctgattcctgcccccttcacagctgcaagcatggatgccggcatgagaatgaatgccggcatgtga

SEQ ID NO: 131112 - DNA, 624 bp, Homo sapiens
ggagttccctatgatcagttgacagaggaagagaagactagggcctggttcacagatggttctgcacgatatgcaggcaccatccgaaggtggacagctgcagcactacagcccctttctaggacatccctgaaggagagcggtgaagggaaatcttcccagtgggcagaagttcgagcagtgcaccttgttgtgcattttacatggaaggagaaatggccagatctgatggtttggctggatgatcaaggacttggaagaagcatgattggaaaattggtgacaaataaatttggggaagagatgtgtggatggacctctctgagtgagtggccaaaaactgtgaaaatattggtatcccgtgtgagtgctcaccaacgggtgacctcagcagaggagaattttaataatcaggtggatgagataagccattctgtggacaccactcagcctctttccccagccacccctgtcattgcccaatgggcccatgaacaaagtggccatggtggcagagatagaggttacgaatgggctcagcaacatgtacttccactcaccaaggctgacctggctacagccactgctgatgcccaatttgccagcagcagagaccaacaatga

SEQ ID NO: 131113 - DNA, 1011 bp, Homo sapiens; identical to SEQ ID NO: 119645

SEQ ID NO: 131114 - DNA, 597 bp, Homo sapiens
cctgcactaatggcctcatggggagttccctattatcagttgacagaggaagagaagactagggcctggtttatagatggttctgcacgatatgcaggcaccacccgaaagtggatagctgcagcactacagcccctttctaggacatccctgaaggatagcagtgaagggaaatcttctcagtgggtgggacttcaagcagtgcacctggttgtgcactttacatggaaagaaaaatggccagatgtgcagttatatactgattcatgggctgtagccaatggtttggctgggtggtcagtgacttggaagaagcatgattggaaaattgtgacaaagaaatttggggaagaggtggccttggcagaggaggattttaataatcaagtgaataggatgactcgttctgtggacaacactcagcctctttccccagccatccctgtcattgcccaatgggcccatgaacaaagtggccatggtggcagggatgggggttacacatggactcagcaacatggatttccactcagcaaggctgacctggccacggcactgctgagtgtccaatttgccagcagcagagaccgacactga

SEQ ID NO: 131115 - DNA, 555 bp, Homo sapiens; identical to SEQ ID NO: 119578

SEQ ID NO: 131116 - DNA, 474 bp, Homo sapiens; identical to SEQ ID NO: 121818

SEQ ID NO: 131117 - DNA, 2715 bp, Homo sapiens; identical to SEQ ID NO: 120789

SEQ ID NO: 131118 - DNA, 738 bp, Homo sapiens
atgtcgcaggggacgactccctgggggccgaccccggcgggaaccacgcccgaatcggaggtacaccgcccctttcccttcccggtaccggtgccggtaccagagacctccgagcgctcattcccagtccgcggagtctgcggccaagccaaatccggtctccgaagaggcgccgcacgtctggccccggctgcttatctcttcacccggcagcagacaagggagttaatacacagcgcgtgtgtgtccatttccgttaacacaatgcacgggctatcagtcgctattaattccaggaggtgtacctattatagaaaatatgttattgatttttccaaatctgagatcattggaataccaatatccaagaatatagatctaacagtgggaaccacagtcactcaactacaaaatttaaatacagtgggaataattggatcccgaggtggcagaggccaagtggcagcactcaactgtgacaggcaaggacacctctggctttttaccagggtaactgtgcactggagaatgggaaatgatcggacattttggggactactggacactgtctctgagctgatgtttattccagggaacccaaaacatcattgtggccctccagttaaagtaggggcttatggagatcaggttgcactgatggcctcatggagagttccctatgatcagttgacagaggaacagaagactagggcctggttcacagatggttctgcatga

SEQ ID NO: 131119 - DNA, 773 bp, Homo sapiens
atgacccagcagatccaatggtgcttgaggtgtcagaggcagatagggatgcaggtacccataagtgaatcacagcagaggcctctaggattttggagcaaggccctgccatcttctgcaaataactactctttttttaagagacagctcttggcctgttactgggttttggtggaaattgaacatttgactatgggtcatcaagtcaccatgcgacctgaactgcctatcataaactgcgtgctttctgacccatgtagccataaagtgggtcatgcacagcagcattccatcatcaaatggaggtggtatatacattatcaggctcaagcaggtcctgaaggcacaagtaatttacacgaggaagtggctcaaatgcccacggtctccacttctgccaccttgccttctcttcccgagcccacacagatggccttatagggaagttccctatgattcagttcacagaggaagagaagactggggcctggttcacagatggttctgcacattacacaggcaccacctgaaagtggacagttgcagcactacagcccctttctaggacaacactgaaggacagctgtgaaggaaaatctccccaccaccccgtcatcgcccaatgggcccatgaacaaagtggccatggtggcagggatggaggttacttgtgggctcagcaacatggatttccactcaccaaggctgacctggctatggccactgctgagtgcccaatttgccagcagcagaaacgaacattgaacccttga

SEQ ID NO: 131120 - DNA, 909 bp, Homo sapiens
atgtttgcgtttgaacctcttggcgggtgccggccatggcggctctcgctcccgggacttgggagccggcttttccgcacatatggggctgcggacggcaggagacagcggcggccgggccgggaagccgcgcagtggttcccgccgcaggaccggaggcgtttcttcaacagcagcggcagcagcgacgccaggatgggcgacccctcgcagtccgacgatcctgacgatcccgacgaccccgacttccccggcagcccggtgaggcggcggcggaggtgtcccggcggccgagtgcccaaggaccggcccagcctgaccgtgaccccaaagcgctggaagctgcgagctcgcccaagcctaaccgtgaccccaagacgcctggggctgcgagctcggcccccgcagaagtgcagcacaccctgtggcccgctccgacttccgcccttccccagccgcgactccggccgcctcagcccggacctcagcgtgtgcggccagcccagggacggcgacgagctgggcatcagtgcctccctgttcagctctctggcctcgccctgccccgggtccccaacgccaagggacagtgtcatctcgatcggcacctccgcctgtctggttgcagcctcagccgtcccgagcggcctccacctcccagaagtctccctggaccgagcatctctcccctgctcccaggaggaagcgacaggaggagccaaggacaccaggatgggcagtgtccgagtcctgcgtgaccctgtgggggtcaacctctatgagcattcggtcagcaaatgccacgtcggccagccggacactgatcccagagagaaggtgaaggctgctccggaagagctgtgtctgcacgcgctccagcacccccgctctgagcaggctgactgctga

SEQ ID NO: 131121 - DNA, 2055 bp, Homo sapiens
tcattggttataaacatagacgggaatcactgtgattctccagtgtccacggtgggaagtgtgtggcgagaaggattctccagtatccacagcgggatgtgtgtgagtagaaggattctccagtgtccacggcgcgacgtgtgtgtgagtagaaggattctccagagtccacggcgggacgtgtgtggtgagaaggattctccagtgtccacggcgggatgtgtgtggcgagaaggattctccggtgtccacggcaggacgtgtgtggcaagaaggattctccagtgtccacggcgggacgtgtgtggagatggattctccagtgtccacagcaggacatgtatggcgagaaggattctccggtgtccacggtgggacgtgtgtggcgagaaggattctccagtgtccacggcgggacgtgtgtggcgagaaggattctccagtgtctacggctggggacatgtgtggggaggattctccagtgtccacggcgggacgtgtgtggggagaaggattctccagtgtccacggcgggatgtgtgtgggcagaatgattctccagtgtccacagtgggacacgtgtggcaagaaggattctccagtgtccacagcaggacgtgtgtgggcagaaggattctccagtgtccacagtgggacgtgtgtgtggaaaaggattctccagtgtccacggcaggacgtgtgtgtggagaaggattctccagtgtccacggcaggacgtgtgtgtggagaaggattctccagtgtccacagagggacgtgtgtggcgagaaggattctccagtgtccatggcaggacttgtgtgggcagaaggattctccagtgtccacagcaggacgtgtatggcgagaaggattctccagtgtccatggcgggacgtgtgtggagaaggattctccagtgtccacggcaggacttgtgtgggcagaaggattctccagtgtccacagcaggacgtgtatggcgagaaggattctccagtgtccatggcgggacgtgtgtgggcagaaggattctccagtgtccacagtgggacacgtgtggcaagagggattctccagtgtccacggcgggacgtgtgtgggaagaaggattctctggtgtcgttttcgctggctcctcactcccagctcaccatgctggggtggcctggcttgctgtctcttgagtaccgtgggaactgaggcgggctggccttgtctccccagcgcctgctcacagaaggtgccccatgatgtctgtcgtgcagatgaatgtgtccacgcgtgctgggctagtacagaagatcgtgtaggcaggggtcttcgtgggcctagggcctgaggaggaccgatagccttggggactgcatgggttttgagagtctgttccggagagggcccctgagccaggctgtctgctgtggatggctctgccatggcgctatctccttcatccttatctatctcttcattgttagtggagggtgttgggcatctgttatttgctttattcgagtctaggccacgagctgccccccactggaaaggctgaacctctctggctacattgttgtagaaaagctcccaggcggggctctgctcaggctctctgcatttctgggagacatccttgctgtccctgctccgcccgtgacagccaccatgactgagcccacactggcctcctggactcccaccttccgcattgatatacgcctttcttgggcgctcttcaaggaataaacggagactgatgaagacgatgaaggtggaagcctgtgaggacctgtccgctcctaaatatctgaggatccagctccccacgggatccccaagaagaagatctgaagctcctgaagtttgcattttccaggggtcctcctctctctctagtgcacccaccacctttgctgagctatccctctgccaggagatagccccagactcctcctcgcccccctccacggcacccaagtctgcacccgctgcatcctccaagcgcccaaccttaattctagctttgaattgttgagtggaaatggccaagaaaaacat

SEQ ID NO: 131122 - DNA, 1077 bp, Homo sapiens
atgaaggcactcagccctgggcacaggaggcagctcttcctgcaggcaacaaagacccagggatacctgggtcccagagaccaccatcctcacagcctggtcatctcactgcagcagcttggtccctggctgcaggtgacggtggccggccaagtaaacaccttggcaggaatccagaaaacgatccacgcagaacattgcaatgtcacagaaatggccgcccactggccacgaagccctggccccaccctgcgagcagggcccaccccaggtgctagactcaaatgctgtggctccgaccgcagactgtggctaccaattatcaactgccatcaacagaaaccaggagctctgcggcaggaagccggccgtgtcaccgagcagagaataagtccggggtctccgatcctgagaccagctgtacacccagggcactactgtttacagcaacgtctatcagggcagaaaagcaacagaagaaccacccagaagagtttccagaagcttcacgtggataaaaggaaaccagagaatttcagcaaggaaagtgaccatttattaatatacagccgcgagggaaatccggatgttgcctccctggccactccccctggtatctggatgatgtctgccacagaccttttctatggggacccctttgcctttccaggagggggaccattcactctgtccctggagaggggtcctagcgtgatcctcggcacagatgcctcagaagagcttctcttcacaaaggcatctttagctgtcagcacctcggtcttccagttcagcacagggaagatctacactgagtgggtgtggcaaaaaaacaagagtttcctctctccccacttcccaacaaagcctatggcatctccagtgaaaggcaagcacagcacgtccctgttgcagaggttaaattacagggaccgctggcagtgcctgcaggaaggggcagggctggctctgctcagtgcccacatgaaggtgcccacaggctccaaagaaccccagcaagcaggcaagttgcccagcaagcccagaaaacaaaccacaccaactttcaaggactaa

SEQ ID NO: 131123 - DNA, 699 bp, Homo sapiens
atgctctgcttgccctgtaagccatccctggctgctgccctggcagtcgggatctgccttcagcttgccctagagagccctgcaaaggccaccacagcatggccacagactctcaaaacccatgcagtccccaaggctatcggtcctcctcaggccctggccacgaagacccctgcctaccgatcttctgtactagcccagcacgcgtggacacattcatctgcacgacagacatcatggggcaccttctgtgagcaggcgctggggagacaaggccagcccgcctcagttcccacggtactcaagagacagcaagccaggccaccccagcatggtgaggtgggcactgtgttcaccaacaataaaggcggacaaagtcagcaacgtcaacatgggaagtccaatctgctgaatgccagaaggcccccgaggcaggccccacccctcccagcacagctggagatgctgaaggagccaatgcgctcagacaagagtcagagggaaactggggatcagaggctaaaagcccacatgtggctgaggcgggctcttggcgcccgcagcagggcagctgtcatcatctccatcctcctgacaagacaaaagatgcagccaggaaaactcattccccaggagataatggatgtcagcccagacctccacgtccatgcaaaaccctttggtctctcagcagaataa

SEQ ID NO: 131124 - DNA, 1614 bp, Homo sapiens
aatacactatgcattgtatcaggcaaactactctacgccatcatgcgtgagcttaaagaacatgttttctctgaccctgctggggatgagcccaggtcttcctcttatggggttaccagaggcagtagtgtggcatggaagagtgcttgcttcttagtaatatccaggggcatacattttggtgttgccaaaaggattcgttgatatataacttggacataaagatcagagtccccgaggagtcccctttgcttccctagagttctccagttccaggcgtctgccctgaacgtgcgcagctcaatgatgtggtcaaagaggctggggctcggggagcaagatcaaaaacacgcagcccttcagagtcctggagccatcttcccagaatgcagcagcccccaggggcctcaacactcaaggtttccacctccacctccactcagggaccgctggcagtgcctgcaggaaggggcagggctggctctgctcagtgcccacatgaaggtgcccacaggctccaaagaaccccagcaagcaggcaagttgcccagcaagcccagaaagaaagcagcatcaatcatgaagcgcaacaggagctccacgtcgcccactgacagatgtgctttccatgtgtattggaggtctgtgggtgatgaggaccatatccacctggcagtatcaacagaggcagatgcacagactctcaaaacccatgcagtccccaaggctatcggtcctcctcaggccctggccacgaagacccctgcctaccgatcttctgtactagcccagcacgcgtggacacattcatctgcacgacagacatcatggggcaccttctgtgagcaggcgctggggagacaaggccagcccgcctcagttcccacggtactcaagagacagcaagccaggccaccccagcatggtgaggtgggcactgtgttcaccaacaataaaggcggacaaagctctgccagttgtggagctgcccggaagagacccagcatgaagaaattcgcagaaattcataaaaagagaaagcaagcctgtcagcaacgtcaacatgggaagtccaatctgctgaatgccagaaggcccccgaggcaggccccacccctcccagcacagctggagatgctgaaggagccaatgcgctcagacaagagtcagagggaaactggggatcagaggctaaaagcccacatgtggctgaggcgggctcttggcgcccgcagcagggcagctgtcatcatctccatcctcctgacaagacagactggtccttcctacacagcagatggatatttagaggccaaagagtgcaaattcacctgcaccagtggtaaatgcttgtatcttggttcgctggtctgtaaccaacagaacgactgtggggacaacagtgacgaagagaactgtctcctggtgaccgagcacccgcctccgggcatcttcaactggcacgacgcactgagtgggcacactgcctctgtggtgttcttcccagtaatgcagaatcttattctaatcgtgataagacaccgcacagacccaaatcgaaggacgttctgcaaaacactggaccagcagttttcaaaagtgtcaaggctctga

SEQ ID NO: 131125 - DNA, 311 bp, Homo sapiens
ctggaacatgacaaggatgcccacttacaccacttctattaaacatggtacttgaaatcctagccggagcaatcagacaagagaaagaaagaaaggacatccatactggtaaagaggaattcaaactgtcacggtttgctgattatataattgcatgtcaagaaaaccctaacgactcatccaagaagctcctagaactggtcatagtggctgcctgtgttcctcgacttatgaccccttccttcatcttcaaaactcctcactccaatatctgctgctgtcatcacattgcccattgccttttcctctga

SEQ ID NO: 131126 - DNA, 430 bp, Homo sapiens
cggaggtcgtaagccccggagcagcggtagttgcaagctgtgcggttgttcacactacccaccacctcctcggggctctgaaagctccggacggtgcccacatggccctcgccgccgtcctgcttcccccacttccagtccgggccgcgcactacccgagcgccaaccccttccaccatcacccggttattccgggagttactcatcggggcccccttctctctgcccccgcaccagccgccgcgctccgccccgccacagagtcccagccgggcgagagcgactccacatccgggtaccgccgtacccaaggccggagcggcaccttctcagagtgtctaggagggggatcctcggcaataatagagtgggaaggcttccagagagccgcgcaatcgcgggaagaaaggaggagaaaactgatacgaaa

SEQ ID NO: 131127 - DNA, 477 bp, Homo sapiens
atgccggccactagggttctgccctttcatttccccccgggcccttggggtggggccgttgcccctcataagctaccgccgcgcgctcctctgcggcatcggggctgtacgcggccatcggcggcttacaactggcgccaaaaaaaaagcaacgaaaggaaacgcttgcgggctgaccccaggttgactctagagatcccccgcattatggataaagatggtgatagagcagttcaccatgcagcttttggagatgaaggcgctgatatagaagtactacatcgaggtagtgctgatttgaatgctcgaaacaagcgccgacagacaccacttcatattgctgtcaataaaggtcatcttcaagttgtgaagactttattggactttggctgtcatcccagtctccagcggtgtcctccccgttttggggaattcatcgaccttaccgcatgtggagaagggcctaaagatgcataa

SEQ ID NO: 131128 - DNA, 1224 bp, Homo sapiens
tcaatggcttattagataggcctctccagaccccttcccaagaggaggagtcgggttgggggacctgtgtctgttctcttcccggtgctttgtgtcttccaggcttgaaagcatcccggtgatggtgctgccatcatttcccttgggggtagagggtcttttctgaaagtgtttgttcacccgttcggaacctagaattcctttggcgctttgcctttccgctcgctccagccgggcgctgcccaccaggtgtcccactgcagacctctccccgcgacaccgacgcccaccgcagctcgccccttccccccgcgcgcgcaagccctggccaggtggccgcggcttaccggtgggcgcgctgtccaggatgcggaggtcgtaagccccggagcagcggtagttggcagctgtgccgttgtcccacactaccaccacctcctcggggctctcgaagctccggacggtgcccacatggccctcgccgccgtcctgcttcccccacttccagtccgggccgcgcactacccgagcgccaaccccttccaccatcacccggttattccgggagttactcatcggggcccgggcggtaggggctctcgccgctgcacgccgccgctcgccgccgctgccgccggggggcccgtgagggagttgggcccgggccggacttggaagcatcgcttcagcccattctccatgtcctctttgtagaagtttaattcgttccaggtcataacaaacttgtacaagatcacccacttgaaactgcgaggtgcctccttctgcaccctgagcagcatctccacttcggacaatgttcgctttagtgagaacagcaggattgaaggtccacctattgccacttggatactgtactacaatgtcatgatcttcatcaatgccacaaacagttccagttgtagttaaagtctcaaacattccatcagtccatcctccatgaccatgctgcaaagactgtacaatttcgaggtcgagatctatatttaccaggtcaccaatctgcaatccaccaggattcctgttgccattctgctcacctagcacagggcagtgatctctgtagaaagaacctcccttggcatcctggacacatttcagatcagacgtgcttttgttgttctctgtctcaatgaatggctctaccctttcacttggttgcccaagccagaaagctgtaattgcactggtccaggtcaccat

SEQ ID NO: 131129 - DNA, 1246 bp, Homo sapiens
atgtggagtcgctctcgcccggctgggactctgtggcggggcggagcgcggcggctggtgcgggggcagagagaagggggcctgagggcccgggcgctcgccggacgccgggaggtaccaccgctgacaacgggggacgaggcgctgctggcacttggatatccgcccccgaactgggggccgattgagagagtggacgcacagtctgatctgaaatgtgtcccaggatgccaagggaggttctttctacagagatcactgccctgtgctaggtgagcagaatggcaacaggaatcctggtggattgcagattggtgacctggtaaatatagatctcgacctcgaaattgtacagtctttgcagcatggtcatggaggatggactgatggaatgtttgagactttaactacaactggaactgtttgtggcattgatgaagatcatgacattgtagtacagtatccaagtggcaataggtggaccttcaatcctgctgttctcactaaagcgaacattgtccgaagtggagatgctgctcagggtgcagaaggaggcacctcgcagtttcaagtgggtgatcttgtacaagtttgttatgacctggaacgaattaaacttctacaaagaggacatggagaatgggctgaagcgatgcttccaactttaggtaaagttggccgagtacaacagatttattcagacagtgatttaaaggtggaagtttgtggaacatcttggacatacaatccagcagcagtttccaaggtggcatctgcaggatcagccattagcaatgcatctggtgaaagactctcacaactcctgaagaaattatttgaaacccaagaatctggtgacctcaatgaagaattagttaaggctgctgccaatggagatgttgctaaagtggaagatttgcttaaaagaccagatgtggatgtaaatgggcaatgtgctggccacacagctatgcaagctgctagtcagaatggacatgttgacattttgaagttacttttgaagcaaaacgtggatgtcgaagcagaggataaagatggtgatagagcagttcaccatgcagcttttggagatgaaggcgctgttatagaagtactacatcgaggtagtgctgatttgaatgctcgaaacaagcgccgacagacaccacttcatattgctgtcaataaaggtcatcttcaagttgtgaagactttattggactttggctgtcatcccagtctccag

SEQ ID NO: 131130 - DNA, 675 bp, Homo sapiens
tcagatctgcctgccgcctccctgtgcctcctctggctctgcaccatcctcctctggactgtctgagttgcttctgacgatttgccggccacctccatccatccagatattcttggcaatattgttctcctggtccatgttcctgggaagcaagccccgcccccccaaccccagcgcgtccacctggggctgccttgctgggatgtggcacccatgcctgtcgtgctctgggagcccctctacgtatggaggatctggcttgtgtctgccccgctgctgggcagcaatgaacacagcacagtctgcacacaggaagagctcaggaacccggttactagaggacccccgaaggctcactgaggccggctgcagactgcctttggcttccgggagccactgagggcagcagccaatcgtctggtggggggcaacgctgcagctcctggggctgacagagatcacaggagggatgctgtcactgagcgcgcggtgcccagcgcgcgccagggctcccatcaagtcctctcggagcccgcagcaggctcccacttctgtttttctctgacagccatgcaggcagcaggccttcagccaggctccccgccgcgcttccacgcacgcacactcacagtcacgctcgtgcacactcgcacgcacacgcacgctcacgctcat

SEQ ID NO: 131131 - DNA, 599 bp, Homo sapiens
ccctcggctggcacatctgtgaagcaggcagaatgccaatcgagccgccaatcctacagagcagggcgaagtcttttgaaaacaattaaacctataatcgtgtgttgcttggtgaagggcatcattcggcctcttgagctgcagcagcccgaggcagtcactgtccctaccctccttccttagcgctgccttggtgatgcctctcagatctgcctgccgcctccctgtgcctcctctggctatgcaccatcctcctctggactgtatgagttgcttctgacgatttgccggccacctccatccatccagatattcttggcaatattgttctccgcgcggtgcccagcgcgcgccagggctcccatcaagtcctactcggagcccgcagcaggctcccacttctgtttttctctgacagccatgcaggcagcaggccttcagccaggctccccgccgcgcttccacgcacgcacactcacagtcacgctcgtgcacactcgcacgcacacgcacgctcacgatcatgcacactcacattcgtgtacatgtacacattcacaccctcatgcacactcaacgaaatagtcgacccgggaatt

SEQ ID NO: 131132 - DNA, 1170 bp, Homo sapiens
atggatgagaagtacagggataaaggaaatggtaacataagcttcgtcagtgtttactggacactcatgaggcctgaaaacgcggtgctggggggaccttcctctacattcaaggaacttccacactgttttctgaaggttgcttctctttcttcttcactgatgcacactctacacacccaagtaaacaaccagcctaatgcagaacttgtctctttcaacaaatgtgctgtttcctactttccctggggcaagaagggcactgtgtccctgacctgcccactcacgattgtcatcacccttcttcttgcatttgccaactcaattcatgtgagcatcgggccatctgtctacctgcctaccacacatgagaatgtaggtgaaagccctgcaaagcttgtaggaatcactgtcaacaatccgtggcatccagtcacctttcccaacacactgcacaatatgggcacctggatagtcagcccaacaaaggccacaggtggccaaatgtaccagacaacaaaagctgatgaagacgctgctgccgtgcacaagggtacctctgggaccatcttctcctctagcatgcaacctgtgcatgaaagaccagagagcaaagaagagaagaagtggcctgtgggcctccgaggcacagacggcagcctcctgctacaggaaccggccccgcagtgtggccagtctgacctagtctgccacccttaccccagtcctactttcaaggaaggagtagcctcagtacccctccctgagcttggtgtccgggaccccagcctgactgcatggtactggtaccaaaacagagatatagaccaacggaacagaacagagccctcagaaataatgccgcgtatctacaactatctgatctttgacaaacctgacaaaaacaagaaatggggaaaggattccctatttaataaatggtgctgggaaaactggctagccaaatgtagaaagctgaaactggatcccttccttacaccttacacaaaaattaattcaggatggattaaagacttaaatgtcagacctaaaaccataaaaaccctagaagaaaacctaggcaataccattcaggacataggcatgggcaaggacttcatgtctaaaacaccaaaagcaatggcaacaaaagccaaaattgacaaatag

SEQ ID NO: 131133 - DNA, 2267 bp, Homo sapiens
cttttgccagggaagaatgctgagaaggttccagaaaaatagaatccaaaagccttccgaagttggttgcaacggctcttcatgatttctatgcacaagcagttatcatttattacccagagtctgactaactttgtggaacctataaataaaagaatatctcttttgtcaaagcgataaacctcttcttgcagaatagcacaaagcaaaggtagcccgaggccaagtattataacaagtaggatcgtggagcgtgcgtgggctccacagccatttttgcaagctgtgcccaccagccctgtaaagtgtcctaggcccttccttttgaggctggaacaagggaactggagtcgcagggcgtgggaaatccagcggaggcataacagaatccatacctcttgagggcctaataagttgcatgtgattacaatctaacttttctttttccaagagcattttaagactttaaacactttgttgactgcttggatggctgtgtctttccatgaggtttaggccctactgtaatagcaacagcccacaggttgcgatgccccagagctggccctcactggcagccggcagcagcacccttgttcccctgggtattcgggggggggggggagacgacgagggagccccgcccccaccggcaccacagacccgccaaaggggacaggcacagtcacggcaaatccaggcaccatcgggcaaactgcagaggtcactccaggctgtggctccacatcccgaggaacaaaagcgggcctgctcagctgtctgcaaggacggccgttccagaccaagtggcctgctactccgaggacccagctcgctccaggctgtgactccacatcccgaggtcgctgcctggcgaccgggcagcgaggaccggccaccccagactgcctgtgccgccgccccgagctcggacagagccgcgaccgcgaggacagcgacgcctgcacagctctggcgagatggcggcagggtccactacgctgcgcgcagtggggaagctgcaggtgcgtctgggcactaagacggagccgaaaaagctagagaaatatttgcagaaactctccgccttgcccatgaccgcagacatcctggcggagactggaatcagaaagacggtgaagcgcctgcggaagcaccagcacgtgggcgactttgccagagacttagcggcccggtggaagaagctggaaaaacgccccttgtgtgcccagggagattggcactcccctactttgatcagggagaaatcattcggggcctgcttaagagaggaaaccccaaggatgccctcctgggcaagtgccagggacaggcagccttcggacttcaagacagacaaggaaggggggcaagctggcagcggccagcgtgtccctgccttggaggaggctccagacagtcaccagaagaggcctcagcacagtcactcgaacaagaagaggcccagtctagacggccgggacccaggaaatgggacacacggcctgtcgcccgaggagaaagagcagctttccaacgaccgagagactcaagaggagaagccaccgactgctcatttggacagaacgtccgtgagctccctctctgaggtggaggagatatggaaattgatctcagagaggctgagatctgctcagggtcagcaagctctcaaaactgttactagtactttttcttcaaaatatgtgtgtcgagcgtttttggctgagcctggatggattgccattttgtatatcgatacagcaaatgctttggagcaagaaactaaactggggttacgacggtttgaagtttgtgacaacattgatcttgaaactattttgatggaatatgagagttattattttgtaaaatttcagaaataccccaaaattgtcaaaaagtcatcagacacagatagagctcccgtggaagaggaaggcacggcccgtagtggctctaatcgggagagaagagggaaaggagggacgtcgctgcccgagggagtagttaatggaggaagcaagaggtgccagccgccccagccatgtctgaaagcggccaacgtagagctcagggtgtggcttcagagggggaaagccccaagccctggcagcttccacatggcgttgagtctgcaaggacacagaagtcaagaattgaggggaaattcccttctggagatagcttgtttgaatgagctggactacagtgcaaatgctggggcctatgttgactgtatggtcaccacggtggctgtgttctga

SEQ ID NO: 131134 - DNA, 1891 bp, Homo sapiens
attaaattttttacaaaattatatgatgaaccatattctcatccttacttccttttcagattagatacacaacactctgaagacatgaatgccaccagatctgaagagcagttccatgttataaaccacgcagagcaaactcttcgtaaaatggagaactacttgaaaatgcttttcagtgaaattattgactcatttaaattcctacaaatatttcctatttccaggttggttctcagcgcagtgtctgattattttgctgcaatgtttactaatgatgtgcttgaagccaaacaagaagaggttgacgtagtttttactttatggaacttataatcattctttgctttttcaaaccatctaggagtcctgcaattgaaagaagataccattgaaagtttgctggctgcagcttgtcttctgcagctgactcaggtcattgatgtttgctccaattttctcataaagcagctccatccttcaaactgcttagggattcgatttattccattaagaaatttctaaagtgcaaagttttagtagatgacctttcttttctaggaacacttcattgaggtaataaaaaaccaagaattcctcctgcttccagctaatgaaatttcaaaacttctgtgcagtgatgacattaatgtgcctgatgaagagaccatttttcatgctctaatgcagtgggtggggcatgatgtgcagaataaatacgttctttctaatggtgaactctccattcatataccatgcatcactacttttcagttactggcagatcttgaaaccagttccatgtttactggtgatcttgagtgtcagaagctcctgatggaagctatgaagtatcatcttttgcctgagagaagatccatgatgcaaagccctcggacaaataccaattcaaaatttcaatagaagtagattttaccgttgttcaatatccctttgtcaggtactactactattgaaaaatatgacctcaggaccaacagttggctacatattggcaccatgaatggccgtaggcttcaatttggagtcgcagttattgataataagctctatgtcgtgggaggaagagacggtttaaaaactttgaatacagtggaatgttttaaaacaatattcagtgtgtggcatacctaggtgaacccacatattattttaatttttttaggtgtagccactcttgaaggaccaatgtatgctgtaggtggtcatgatggatggagctatctaaatactgtagaaagatgggaccctgagggacgacagtggaattttgtgtgtatatgtatacacacacatatacatacacacaattctgtctttttatctagattatatgctattggtggacgtgatggaagttcctgcctcaaatcaatggaatactttgacccacacactaacaagtggagtttgtgtgctccaatgtccaaaagacgtggaggtgtgggagttgccacatacaatggattcttatatgttgtaagatgcagaaaaagcatttgacgaaatccagcaacctttatgattaaaattctcagcagaatcagcatacaagggacataccttaatgtaataaaaaccatctatgacaaacccacagccaacacaatactgaatgtggaaaagttgaaaacattccctctgagaactggaacaagacaaggctgcccactgtctgcactcctcttcaacatggtactggaagtcatagccagagcaatcagacaagagaaaggaataaagggcatccaaatcagtaaaaaggaagtcaaactctcactgtttgctgatgatatgatcgttcacattgaaaaccctaaagactcctcaagaaagctcctagaactgataaaagaattcagcaaagttt

SEQ ID NO: 131135 - DNA, 842 bp, Homo sapiens
atggcccaacatctgcttggcttcttctacggactcaggaagatttcactcatagcagaaggcaaaggaggagcaggcatgtcacatgaaagagagggagcaagagagagagaaggagtattggaagtcctagccagagcagtcggacaagataaagaaataaagggcatccaaattggtaataaggaagtcaaactgtcactgtttgctgatgacatgattgtatacctagaaaaccctaaagactcatccagaaagctcctagaactggtaaatgaattcagcaaagtttcaggttacaaaattaatgtacacaaatcagaattggaatcatcatggtggacaatcagcatacaagggacataccttaatgtaataaaaaccatctatgacaaacccacagccaacacaatactgaatgtggaaaagttgaaaacattccctctgagaactggaacaagacaaggctgcccactgtctgcactcctcttcaacatggtactggaagtcatagccagagcaatcagacaagagaaaggaataaagggcatccaaatcagtaaaaaggaagtcaaactctcactgtttgctgatgatatgatcgttcacattgaaaaccctaaagactcctcaagaaagctcctagaactgataaaagaattcagcaaagtttctggatataagattaatgtacacaaaccagtagctcttctatacaccaacagcgaccaagcggagaatcaaatcaagaactcaaccccttttacagtagctgcaaaaataataaaatacttagaaatatacctaatcaataacatgaaagacctctacaaggaaaacta

SEQ ID NO: 131136 - DNA, 531 bp, Homo sapiens; identical to SEQ ID NO: 128282

SEQ ID NO: 131137 - DNA, 1776 bp, Homo sapiens; identical to SEQ ID NO: 117486

SEQ ID NO: 131138 - DNA, 1428 bp, Homo sapiens
atggaggagaacaaagcagagaagaggatgagaagatgcagtacgaaggtcgaggatagctctgggtgtcaacagagatcactggagcagttgtcactctcggtccttcatgcagcaaggtggctggaatcatctgaaagctggtcacgggcatgtctggtgcctcagccatctgaggactgtgactccttgggtgtctctctctgtctgtgtggtctctctgcattgcctgggcagcatgacagcttcagggtatccaacttcttacagggagagtcagtgcttcaggggcatgtgctttgggagagagaaagcagtagatgcagcatcgctttcagggagccagttttgggagtcccaaacaccaaaccaggtttaggaaaggagaaacagattctacctctggaaaggatatactgtggtggcaaaggtgttggaaagtaccatctgtatcagtccaccctctggacaaaacaatttgtatccctctgtcatacaaactatactcacccctaccccagactccccaaagcctccttcatcatctcatctggctcaggttcaagggccagatcgcatcgtctaaaccagatccacatgtgctggtgcctccggtataagccactggctgatacattcctgcgtgagaagaaggaacagtcagctgccgagcgatgtcgacttgttctccagcagtgtaaattacaaggctggcagaagacagacagatcttggagaatgacagtggattattgtaagcttaaccaagtggtgactccaattgcagctgctgtaccagatgtggtttcattgcttgaccaaattaacacatctcctgtgacccaaaagactgtcagttttgagtggggtccagaacaggagaaggttctgcaacgggtccaggctgctgtgcaatctgctctgccacttgggccatataacccagcagatccaaagatgcttgaggtatcagtggcagatagggatgctgtttggagcctttggcaggcccccataggtgaatcacagcggaggcctctaggattttggggcaaggccctgccatcttctgcagataacgactctcctttggagagacagctcttgacctattactgggctttagtggaaactgaatgtttgactatgggtcatcaacttatcatgaactgggtgctttctgacccatctagccataaagtgggtcatgcacagcagcttcccatcatcaaatggaagtggtgtatatgtgatgaggctcaagcaggtcctgaaggcacaactacccctatgatcgcccaatgggcccatgaacaaagtggctatggtggcaaggatggaggttatgcatgggctcagaaatatgggcttccactcaccaaggctgacgtggctgtggccactgctgagtgtccaatttgccagtag

SEQ ID NO: 131139 - DNA, 227 bp, Homo sapiens; identical to SEQ ID NO: 118589

SEQ ID NO: 131140 - DNA, 207 bp, Homo sapiens; identical to SEQ ID NO: 128794

SEQ ID NO: 131141 - DNA, 789 bp, Homo sapiens; identical to SEQ ID NO: 120784

SEQ ID NO: 131142 - DNA, 435 bp, Homo sapiens
atgacagtggactattgtaagcttaaccaagtggtgattccaattgcagctgctgtatcagatgtggtttcattgcttgagcaaattaacacatctcctggtacctggtatgcagccattgacttggcaaatgcctttttctccattcctgtccataaggcccagcagaagcaatttgccttcagctggcaaggccagcaatatacctttactgtcctacctcagtggtatatcaactctccagctttgtgtcataatcttattcggagagaccttgattgcttttcgcttccactagatatcacactggtccattacattgatgacattatgctgattggatccaccataaagtgggttgtgcacagcagcattccatcatcaaatggaagtggtatgtacatgattgggctcgagcaggtcctgaaggcacaa

SEQ ID NO: 131143 - DNA, 808 bp, Homo sapiens
ccctcttatttggcttgtgcagaagacagatggatcttgagaatgacagtggactattgtaagcttaaccaagtggtgattccaattgcagctgctgtatcagatgtggtttcattgcttgagcaaattaacacatctcctggtacctggtatgcagccattgacttggcaaatgcctttttctccattcctgtccataaggcccagcagaagcaatttgccttcagctggcaaggccagcaatatacctttactgtcctacctcagtggtatatcaactctccagctttgtgtcataatcttattcggagagaccttgattgcttttcgcttccactagatatcacactggtccattacattgatgacattatgctgattggatccagtgagcaagaagtagcaaacacactggacttattcgtgagacatttgcgtgccagaggatgggaaataaatccaactaaaattcagggaccttctacctcagtaaaatttctagggttccagtggtgtggggcctgtcaagctattccttctaagatgagggataagttgctgcatttagtccctcctacaaccaagaaagaggcacaatgtctaacagctcttggcctgttactggctttggtggaaactgaacatttgactataagtcatcaagtcaccatgcgacctgaactgcctatcatgaactgggtgctttttgacccatctagccataaagtgggttgtgcacagcagcattccatcatcaaatggaagtggtatgtacatgattgggctcgagcaggtcctgaaggcacaa

SEQ ID NO: 131144 - DNA, 544 bp, Homo sapiens
gtataagccactggctgatacattcctgcgtgagaagaaggaacagtcagctgccgagcgatgtcgacttgttctccagcagtgtaaattacaaggctggcagaagacagacagatcttggagaatgacagtggattattgtaagcttaaccaagtggtgactccaattgcagctgctgtaccagatgtggtttcattgcttgaccaaattaacacatctcctgtgacccaaaagactgtcagttttgagtggggtccagaacaggagaaggttctgcaacgggtccaggctgctgtgcaatctgctctgccacttgggccatataacccagcagatccaaagatgcttgaggtatcagtggcagatagggatgctgtttggagcctttggcaggcccccataggtgaatcacagcggaggcctctaggattttggggcaaggccctgccatcttctgcagataacgactctcctttggagagacagctcttgacctattactgggctttagtggaaactgaatgtttgactatgggtcatcaa

SEQ ID NO: 131145 - DNA, 636 bp, Homo sapiens; identical to SEQ ID NO: 120791

SEQ ID NO: 131146 - DNA, 3228 bp, Homo sapiens
atggtgacatcttccctgactgtggctatcacctccctggttgtggttattacctctttggttgtgatcatcacctccttcgttgtggttaccacctccctggttgtggttatcacctccctggttgtggttatcacctccattgctatagctatcgctaccctggttgtggttctcaccttcactgttgtggttctcacctccctggttgtagtcaccacctccctggtcatggttatcactcccccgtttgcagttatcacctccctgggtgtggttatcacctccctggttgtgatcatcacctgccttgttctggttatcactgccctgggtgtagttatcacctccctgggtgtagttgtcacctccctggtcatggttatcactcccctggttgcagttatcactcccctgggtgtagttatcacctccctggttgtggtcatcacctccctggtcatggttatcacttcccttactgtggtcattacctcctccattgtggtcatcactcccctggtcatggttatcacttcccttactgtgatcatcacctccctctttgtggtcatcactcccctggtcatggttatcactttcctgattgtggttaacacctctctggttgtggttcttatcactcttattgtgtcaccacctccctcattgtgctccctggttgtggttatcaccttcctggttgtggctatcacttccctggttgtggttatcacctccctggttgtggttatcacctctctggttgtggtcatccctccttcattgtggttatcactcccctgggtgtggtcctcattcccctggttgtggttctcacctccctggttgtggttcttacctctcttgtttgtggtcaccacctcccttgttgtggttctcacctctctgattgtgagcatcacctccctctttgtggtcatcattcccctggttgtggttatcacttccctgattgtggttatcacctctctggttgtggttcttatcgctgttattgtggtcaccccctccctcattgtggttatcagctccctggttgtggttattgcctccctggttgtggtttttatctctctcattgtggtcatcagctccctcattgtggttatcacttccctggttgtggttatcacctccctggttgtggtcatcacctccctcattgtggttatcacttccctggtcgtggttatcacctccctggttgtggtcatcacctccctcattgtggtcatcattcccctggttgtgctctgggtacgacagccaggggaccctgctgaaatggtgaaggagttccactggggtggggctggggggtcagacaaccaagctgaaaacacagctcagggggaccaaaaaaaagaaaaaaagaagaagaagaagaaaaagaagaaagtattgtcactgttcagccttttcaagatgagtcacccagcagatatgctgactctaggtgacctctaccggcagcatatcccccaacagaaggagactcccaggcttggcattaatacctgccagaccctggaggcagctcctggcctttttgctatcctgcacaaggatttgcagccattttcaggtaaaaagaagaaaccacagatgcaaagaggcttcggaagctgccagcagactgtgcccccagtgttgaggattcgaggtctgcgcattgtcaggaagttctggaagctgccttcaagtccccctggacatgactggacagaacctggatggagtctttcctgccggtggctctgggtgctagaacagcagtctccactgatgccgatttgtgtgcatgagtattgcagaaggtgtggggataacagaccttctgatgccgatttgtatgccttccctgccagtcaagctgcaaattggccctgggctgttggcacagcagcatctgccaaggaaccagagggtttcctggacttctgctcccacagtggagaagtcgtgagatggggacataggaaatgggatggaaatcctaataattattatcaccgccggaacgagatgaccaccactgatgacctggattttaagcaccacaattataaggaaatgcgccagatttgtgagggcagcaactgcatctttgaagctccctggattcatcctgtggtcacttccccagtgccagaatgcataattggcatagacatacttagaagctggcagaacccccacattggctccctggctggtaggaagacagatggatcttggggaatgacagtggattatcataagcttaaccaagtggtgactccaattgcagctgctgtaccagatgtggtttcattccttgagcaaattaacacatctcctggcaactggtatgcagccattgacttggcaaatgcctttttctccattcctgtccataaggcccaccagaagcaatttgtcttcagctggcaaggccagcaatatacctttactgtcctacatcaggggtatattaactctccggctttgtatcataatcttatttggagagatcttgatcgcttttcacttccacaagatatcacattgatccattacattgatgacatgacactgattggatccagtgagcaagacgtagcaaacacactggacttattggtgacctcagcagaggaggattttaataatcaagtggataggatgacccattctgtggacatcactcagcatctttccccagccacccctgtaatcgcccaatgggcccgtgaacaaagtagccatgggggcagggatggaggttacgcatgggctcagcaacatgtactcccactcaccaaggctgacctggctatggccactgctgagtacccaatttgccagcagcagagaccaacactaagccctcaatatggcaccattcctcagggtgatcagccagctaccaggcagcaggttgattatattggacctctttcatcatggaaagggcagaggttcgtcctcctggagtacatgcttattgtggatatgggtttgcctatcctgcacgcaatgcttctgccaagactaccatctgtggactcacggaatgccttatccactgtcacggtattctgcacagcattgcctctgaccaaggcactcactttacagctaaagaagtgtggcagtgggctcctgctcatggaattcactggtcttaccatgttccccatcatcctgaagcagttggattga

SEQ ID NO: 131147 - DNA, 474 bp, Homo sapiens; identical to SEQ ID NO: 121818

SEQ ID NO: 131148 - DNA, 1593 bp, Homo sapiens
atgactggacaatcatatttgagaatgatgtgcatagaattggatatgaccaaattgctccaacgatctcaggttgactttatggaaccaatacttacaaagtacttacaaccaatacttccctctcagaaaccaacctggtatctagctcagagtgtttccatcgttacaggagatgtatggccttttaccagagtgactatgcattggggaaagggaaataatcagacatttcagagactactggacactggctgtgagctgacattgattctggaagactcaaaacatcatcatggtcctccagttaaagtaggggcttatggagatcaggtaattgatggacttttagctcaggtccaacttacagtgggtccagagggtccccagactcatcctgtggtcatttccccagtgccagaatgcataattgtgatagacatacttagaagctggcagaacccctacattggctccctgactggtaggaagacagatggatcttggagaatgacagtggattattgtaagcttaaccaagtggtgactccaattgcagttgctgtaccagatgtggtttcattgcttaagcaaattaacacatctcctggtacctgttatgcagccattgacttggaaaatgcctttttctccattcctgtccataaggcccaccagaatcaatgtgccttcagctggcaaggccagcaatatgcctttactgtcctacctcaggggtatatcaactctccagctttgtgtcataatcttatttggagagaccctgattgctttttgcttccacaagatatcacgctggtcccttacattgatgacattatgctgattggatccagtgagcaagaagtagcaaacagactggacttattggtatcaatggcctcatcgagagttccctatgatcagttgacagaggaagagaaggctaggttcacagatggttctgcacgatatgcaggcaccacccgaaagtggacagctgcagcactgcagcccctttctaggatatccctgaaggacagcggtgaagccaggattcatgggtccaggaatcaaggagtggaagtggcacctctcatcatcacccctagtgagccactagcaaaatttttgcttcctgttcccatgacattacattctgctgtcctagaggtcttagttacagagggaagaatgctgctaccaagagacacaacaataattgcattaaactggaagttaagattgccacctggacactttgagctcctcctacctttaagtcaacaggctaagaagggaactacagttttggctgtggtgattgacccagactatcaagatgaaatcagtcttctactccataatggaggaaaaaatccacgacttgctgagatgcttgctgaaggcaatgggaatacagaatggatagtagaagaaggtagtcatcaataccagctaccactatgtgaccagatgcttcctgccctcaaatatcggacttcaagttcttcagttttgagactcggactgactctccttgctcctcaagcttgtagacagccagtattgtgggatcttgtgattgtgtaa

SEQ ID NO: 131149 - DNA, 1707 bp, Homo sapiens
atgaaactcatggaaacacttaaccagtgcataaacgctggtcatgaaatgacgaaggctatcgccattgcacagtttaatgatgacagcccggaagcgaggaaaataacccggcgctggagaataggtgaagcagcggatttagttggggtttcttctcaggctatcagagatgccgagaaagcagggcgactaccgcacccggatatggaaattcgaggacggcgacgtgctgaagacgtatttccaccggtgatcggggttgctgcccataaaggtggcgtttacaaaacctcagtttctgttcatcttgctcaggatctggctctgaaggggctacgtgttttgctcgtggaagaagacagatggatcttgagaatgacagtggactattgtaagcttaaccaagtggtgattccaattgcagctgctgtatcagatgtggtttcattgcttgagcaaattaacacatctcctggtacctggtatgcagccattgacttggcaaatgcctttttctccattcctgtccataaggcccagcagaagcaatttgccttcagctggcaaggccagcaatatacctttactgtcctacctcagtggtatatcaactctccagctttgtgtcataatcttattcggagagaccttgattgcttttcgcttccactagatatcacactggtccattacattgatgacattatgctgattggatccaagacagctcttggcctgttactggctttggtggaaactgaacatttgactataagtcatcaagtcaccatgcgacctgaactgcctatcatgaactgggtgctttttgacccatctagccataaagtgggttgtgcacagcagcattccatcatcaaatggaagtggtatgtacatgattgggctcgagcaggtcctgaaggcacaaccacccctgtcatttcccaatggccccatgaacaatgtggccatggtggcagggatggaggttatgcatgggctcagcaatgtagacttccactcactaaggctgacctgaatacagccaccgctaagcgcccaatttgccaacagcagagaccaacactgagccctcaatatggcaccattcctcagggtgatcaaccagctacctggtggtgggttgattatatgggatctcttccatcatggaaagggcagaggtttgtcctcactggaatagatacttactctggatatgggtttgcctatcctgcatgcaatgcttctgccaagactgccatttgtggactcacggaatgccttatccaccatcatgatatcccacacagcattgcctctgaccaaggcactcactttatggctaaagaagtgcggcagtgggctcatgatcatggaattcactggtcttaccatgtttcccatcatcctgaagcagctggattgatagaatggtggaatggccttttgaagtcacaattacagtgtcaactaggtgacaatacttggcagggctggggcaaagttctccagaaggtcgtgtatgctctgaatcagcatccaatatatggtactgtttctcccatagccaagattcacaggagggtggccgattccctgaagggaggaagtgggtcctgggtctggggcttttccactttggctgcacttgacaacgacttggggacttttagaaaggtacgagcaccctccaccaattaa

SEQ ID NO: 131150 - DNA, 2061 bp, Homo sapiens; identical to SEQ ID NO: 120793

SEQ ID NO: 131151 - DNA, 1626 bp, Homo sapiens
cctcaccaggtgtctactgttagaatgagggcattgattggaaaagaatgggaccctgcaacttggaatggggacatgtgggaggaccctgatgaagctggggacactgagttaataaactctgatgaacatttttggccagaagtaacagcttccccatccccagtagtggcaacgtcctctcccccacccatgctgctatcagcctttccacctttgtctgaagagataaaccctgcgctgcctgaggcagttgccaggcaaaataatgttgattctcctcagaagccacccccaacacctctgtttgcttctaggcctataactagactaaaggcttggtgggcccctagagtgtcagaatgcataattggtatagacatatttagcagctggcagaacccctgcattggctccctgactggtagggtgagggctactgttgtgggaaaggccaaatggaagccattggagctgccatcacctagaaaaattgcaaatcaaaaagaataccacatccctggagggattgtggagattactgccaccatcaaggacttaaaagatgcaggggtggtgattccgattcccaccacattcccattaaactctcccatttggcctgtgcggaagacagatggatgttggagaatgacagtggattattgtgagcttaaccaagtggtgactccaactgcagctacagtaccagatgtggtttcattgcttgagcaaattaacacatctcctggtacctggtatgcagacattgacttggcaaatgccgttttctccattcctgtccataaggcccaccagaagcaatttgccttcagctggcaaggccagcaatatacctttactgtcctacctcaggagtatatcaactctctaggtttgtgtcataatcttattcagagagaccttgaccacttttcgcttctgcaagatatcacactggttcattacattgaagacattatgctgattggatccactgagcaagaaatagcaaacacactggacttattgtttatggctaaagaagtgtggcagtgggctcatgctcatggaattcactggtcttaccatgtttcccatcatcctgaagcagctggattgatagaatggtggaaaggccttttgaagttacaattacaatgccaactgggtgacaatactttggagggctggggcaaagttctccagaaaaccgtgtatgctctgaatcaacatccaatatatggtactgtttctcccatagccaggatccacaggtccaggaataaaggggtggaagtggcaccattcaccatcacccccagtgatccactaccacaatttttgcttcctgttcctgctacattatgttctgctggcctggaggtcttagctccagagggaggaacgttgccaccaggagacagaacaacgattccattaaactggaagttaagattgccacctgaagactttgggctcctcccatctttaagtcaacaggctaagaagggagttacagtgttggctggcgtgattcacccagactatcaagatgaaatcagtctactactccacaacggatgtaaggaagatcttctgaatggaatacagcagatccattag

SEQ ID NO: 131152 - DNA, 744 bp, Homo sapiens
gttacttggagtgatatagcaggtttagatgatgtcattacggatctgaaagacacagtcatcttacctatcaaaaagaaacatttgtttgagaattccaggcttctgcagcctccaaaaggtgttcttctctatgggcctccaggctgtggtaaaacgttgattgccaaggccacagccaaagaagcaggctgtcgatttattaaccttcagccttcgacactgaccgataagtggtatggagaatctcagaaattggctgctgctgtcttctcccttgccataaagctacaaccatccatcatctttatagatgaaataggtttagaagttatacgttcttttactttagtgaaacgtttagaatatcaacttaaaagtcaagggtcacagagcaaatcagccgtgaagcaggtttcaaatccaggtctgcttgactccaaaatcgatactcatgctactccgatgcatgctacagagagtttttctgggccagtagtgggaagaagtgggtacaatgcaggatcgagtgaacccaggtgccagggtggaagccccgacccctcgttgccccttgctctgagacagttgctaggagttgccaatcggccaggacgcacactaggtatacagcacagcaaattagaaggcatcgaatgtggtattcagagaagctacatcttcagcagcaagaaatgtccaatgacagctggaccacaaaggaagagacaggaaaactactga

SEQ ID NO: 131153 - DNA, 680 bp, Homo sapiens
cgtatttttcaaataaaatgattaattctactaccaaataaatcttaatttctagtctacttctagtttgcaagaggagctttaaatgtatttgtttacttaacatttaaaaatccatttctccttaaaatgaaacactttttttaaggtaggtaatattttaatttgactagaagttagtttttctttcttagtttaagctactttgttagtcttacaattttaataagtatagttattacctagtgacatttctgtttgtttttttaaggttaacattcaagatggtacatgctgaagccttttctcgtcctttgagtcggaatgaagttgttggtttaattttccatttgacaatatttggttcagtaacatactttagtatcaaatggatggtagatgcaattgatccaatcagaaagcaaaaagcagaagctcagaaacaggcagaaaaactaatgaagctaattggctgtggtaaaacgttgattgccaaggccacagccaaagaagcaggctgtcgatttattaaccttgagccttcgacactgaccaataagtggtatggagaatctcaaacactggctgctgctgtcttctcccttgccataaagctacaactgtccatcatcattatagacgaaatagactcctttgtacgaaaccgttcagagttctga

SEQ ID NO: 131154 - DNA, 854 bp, Homo sapiens
cacaggttggagcagagaaagaggaaacatagaggtgccaaaggaacaaagacataatgatgtcatccaagccaacaagccatgctgaagtaaatgaaaccatacccaacccttacccaccaagcagctttatggctcctggatttcaacagcctctgggttcaatcaacttagaaaaccaagctcagggtgctcagcgtgctcagccctacggcatcacatctccgggaatctttgctagcagtcaaccgggtcaaggaaatatacaaatgataaatccaagtgtgggaacagcagtaatgaactttaaagaagaagcaaaggcactaggggtgatccagatcatggttggattgatgcacattggttttggaattgttttgtgtttaatatccttctcttttagagaagtattaggttttgcctctactgctgttattggtggatacccattctggggtggcctttcttttattatctctggctctctctctgtgtcagcatccaaggagctttcccgttgtctggtgaaaggcagcctgggaatgaacattgttagttctatcttggccttcattggagtgattctgctgctggtggatatgtgcatcaatggggtagctggccaagactactgggccgtgctttctggaaaaggcatttcagccacgctgatgatcttctccctcttggagttcttcgtagcttgtgccacagcccattttgccaaccaagcaaacaccacaaccaatatggtcccaactattcagcaactgggtgattggaaatgctgtgtccttcaccataaagctcaacagctcagcaaaagtgaagacaaagatttcatggtctaa

SEQ ID NO: 131155 - DNA, 1250 bp, Homo sapiens
ggccgagagcgagggaggagccccccgacccaggtagacgttacatccaagaggaaataatccaggcaaggaagcacaagctgatcaagatgtgtagttctgtggctgccaagttgtggtttttgacagatcgtcgcatcagggaagactatcctcaaaaagagattttacgagcattgaaggccaaatgttgtgaggaggaactggactttagggctgtggtgatggatgaggtggtgctgacaatcgagcaaggaaacctgggtctgcggatcaatggagagctaatcactgcctacccacaagtggtggtagtcagagtaccaaccccttgggtgcaaagtgatagtgacatcactgttttgcgccatctagagaagatgggatgtcggttaatgaaccgacctcaagccatcctgaactgcgttaataagttctggacatttcaagagttggctggccatggtgttcctctgccggatactttctcttatggtggccacgaaaattttgctaaaatgattgatgaggctgaagttctggagttcccaatggtagtaaagaatacgcggggtcacagaggtaaagctgttttcttggctcgagataagcaccatttggctgatctaagccatcttattcgccatgaagcgccatacctgttccagaagtatgttaaagagtctcatggacgggatgtacgtgtcattgtcgtgggaggccgtgtggttggcaccatgttacgttgttcaacagatgggagaatgcaaagcaactgctcattaggtggtgtggggatgatgtgctcattgagtgaacaagggaagcagctagctatccaggtgtctaatatcctggggatggatgtgtgtggcattgacctgctgatgaaagatgacggctccttctgcgtctgtgaggccaatgcaaatgtaggtttcatcgcctttgataaggcttgtaatctagatgtagctggtatcatagcagactatgccgcctcccttctaccctctggccggctcacccggcgtatgtccctgctctccgtggtgtccactgccagtgagactagtgagccggagctgggtcccccagccagcactgctgttgacaacatgagtgcaagttccagctctgttgacagcgaccctgaaagcacggagcgagagctgctcaccaagctcccagggggcctgttcaacatgaaccagctgctagccaatgaaatcaaactactggtggactga

SEQ ID NO: 131156 - DNA, 772 bp, Homo sapiens
tttcgtccgggtgtgagtgtgtggaagtgtgagtgttttggagtggggtgagggagaagctgacgggacgcgaggctgtgagaaactgggcgagtgtgcgaggacgcccggccagcctgcgggagccgcagtcggcggaggagaaaggaggcggctcccggtatcccgaccccctccccctcctctccttcccccacttccagccgcccggcggcccgcgctttctcgaacgccccagcccggctcagtcggtcgagagcgagggaggagccccccgacccaggtgagcggtagacgttacatccaagaggaaataatccaggcaaggaagcacaagctgatcaagatgtgtagttctgtggctgccaagttgtggtttttgacagatcgtcgcatcagggaagactatcctcaaaaagagattttacgagcattgaaggccaaatgttgtgaggaggaactggactttagggctgtggtgatggatgaggtggtgctgacaatcgagcaaggaaacctggtgcattggcccttcacattcaaatttgagcttgcccttttgggctcctcccctgacagcatcacccccaccaggtaccccaacggccttgctcctgatttggatccagtgaagatggaagcttttcagtttgatttagtcccactttttatttatgcttttattgcctattctttcggtgtcatagccaaaaacatcattgccaaggccaacgtcaagaagctgcccattcccactcccattttcttctag

SEQ ID NO: 131157 - DNA, 469 bp, Homo sapiens
tttcgtgccaggcagagagagagagggacttctgtaaggcggcacgaccacaccaaataacagcatcaaagggaggtgggggagagggaaataaaggggagtcatgcttaaaatgctacagcggtgtgaaacagcagagcaaagaagcgcccccagcttctgagagccctggcccgagtcccctcccccgttagaaacagggctttgggatggtcatggagcactgccagtaactccaaccgcagcacgccggcctgctcgcccatcctccggaagcggtctcgctcgccaaccccgcagaaccaggacggagacaccatggtggagaagggctcagatcactcctcggacaagtccccgtccacaccggagcagggcgtgcagcgcagctgctcctcccagtccggccggagcggcggcaagaattccaagaaaagccagagttggtataatgtgttaagccccacct

SEQ ID NO: 131158 - DNA, 1428 bp, Homo sapiens
atggaagggaaggagaaagggattccgtacacagtgagttctgccgagcagccggaggctttgtgtatggcgctgttccggtttctggatgcaggaacaaatgaggtaatagattgtcatgccatacgcttgtcactggacatcctggtgtgtgccagtgctacagcaatcacaaagaataattataccctgtcccttccgtgggagagcccatggcctgaggataagcaccatggagacaaggactgtgtgtcattcagcaatctctatatccccactgaggaggagggcttggggattgtaggctcctggagcctgtacccaggccatactttcagcacagatattgaagggatgcaacagattccagaagtacaaagagttgtcctttatgacctagataattcactcaatggaaataccagcactgccagtaactccaaccgcagcacgccggcctgctcgcccatcctccggaagcggtctcgctcgccaaccccgcagaaccaggacggagacaccatggtggagaagggctcagatcactcctcggacaagtccccgtccacaccggagcagggcgtgcagcgcagctgctcctcccagtccggccggagcggcggcaagaattccaaggtgagcgggaccccgttgaggcggtacctccttgtcaggggctgcggggagcgatattggggtggtgagccggagaacatctgcgagggtcctcacgtgatgaacagccctgatggctcagagacagtcattatccaaagggccggccccactgtcccccggcaggctggcttggaagtcattgaaggcccattttcactgcacctgatgtcggagaacagaccctcccccactcccgaccctgcacccatgtctgcctgctccctggacactgcctctggctgggagtttattccctccttacatggtgaggatgacaagcacccatcaggttgctatgcggagcggatgacactaagagcaaagcacttgccaccaccatcccctgagaaccagctggttgataacaaaccacctacaacctcaagagctagttcactagaggctttgcaaggccctggtgaagacagacagcagcgttcccaccagagagcaaactgcttgcagcagtttgggatccaaacacagttgcagatgcctgctttcatggtcgccactgcccactgtcaaggtcaggatgaggggggcatgtgggaagaggccagctggcagggtaacgcagaagttaaggagtctgaatggctaagctgccagtggggaattttcttcctgaccccagtgggcaaactgctggccctgaagcaggtgtttagacctggggccaaggctggcccggagagcctggaggtggttgctgggttgctgtgtgtacaagagcttgatgaaacctga

SEQ ID NO: 131159 - DNA, 885 bp, Homo sapiens
atgggtcaggttacttgtagccaagtaaatgcttctcacacctatgacctcacttcagcccctcatatgaacaacagtgcacagccctatgcgcacagccaaggcagcacctgtgtagcgtcattttccaggctgatgtctggaattccccttagtaatatttctgccattttttatgaaaccatcttccttgatggccagttccttgcctcccaggaaactgatgaggaggcaagacgaatgtattgggaaagcccagcggaggaagagctcctgaggaggtctggtggccgagccctgaggggcgctgttgctcccaggtggcagaattcagcatcagagagccacacagctgaaagagatggatggtgtgtattagccaagtactgggggcactgggagccttgtctgctcccagtcggcgttgggaaaccagaacgctcaggaacgatcaagatgaatgccatgctggagactcccgaactcccagccgtgtttgatggagtgaagctggctgcagtggctgctgtgctgtacgtgatcgtccggtgtttgaacctgaagagccccacagccccacctgacctctacttccaggactcggggctctcacgctttctgctcaagtcctgtcctcttctgaccaaagagaattgccgaagcctgaaagatctaaaaaaagggccctactatgtctccaaaaaaggagtatatgtcttccaaaaggaagtatatgctacaactgattccatcacgtggtatcaaattcagtacatgtggacggacttacatggaatcagatctacttttatactccttctcaatgtgtggttgactgaaaattgctccactatccgggagcaggaaatggaccttgttttctag

SEQ ID NO: 131160 - DNA, 1520 bp, Homo sapiens
ccgggcgacgatttcgtggcgggagctgcactggccatgggttccggctgtatatccatgagcgccgctggcagccggggagctgcaggaaccagactgggggcgagctgagcacctgtagtcaatcacacgcagcttttaggtttgtttgaataagagatctgacctgaccggcccaactgtacaactcttcaaggaaaattcgtatttgcagtgggaagaataagtaacattgatcaagatgaatgccatgctggagactccgacactctcacgccgtgtctgatggagtgaagctgtctgcagtggctgctgtgctgtacgtgatcgtccggtgtatgaacctgaagagcgccacagccgcacctgacctctacttacaggactcggggctctcacgctttctgctcaagtcctgtcctcttctgaccaaagaatacattccaccgttgatctgggggaaaagtggacacatccagacagccttgtatgggaagatgggaagggtgaggtcgccacatccttatgggcaccggaagttcatcactatgtctgatggagccacttctacattcgacctcttcgagcccttggctgagcactgtgttggagatgatatcaccatggtcatctgccctggaattgccaatcacagcgagaagcaatacatccgcactttcgttgactacgcccagaaaaatggctatcggtgcgccgtgctgaaccacctgggtgccctgcccaacattgaattgacctcgccacgcatgttcacctatggctgcacgtgggaatttggagccatggtgaactacatcaagaagacatatcccctgacccagctggtcgtcgtgggcttcagcctgggtggtaacattgtgtgcaaatacttgggggagactcaggcaaaccaagagaaggtcctgtgctgcgtcagcgtgtgccaggggtacagtgcactgagggcccaggaaaccttcatgcaatgggatcagtgccggcggttctacaacttcctcatggctgacaacatgaagaagatcatcctctcgcacaggcaagctctttttggagaccatgttaagaaaccccagagcctggaagacacggacttgagccggctctacacagcaacatccctgatgcagattgatgacaatgtgatgaggaagtttcacggctataactccctgaaggaatactatgaggaagaaagttgcatgcggtacctgcacaggatttatgttcctctcatgctggttaatgcagctgacgatccgttggtgcatgaaagtcttctaaccattccaaaatctctttcagagaaacgagagaacgtcatgtttgtgctgcctctgcatgggggccacttgggcttctttgagggctctgtgctgttccccgagcccctgacatggatggataagctggtggtggagtacgccaacgccatttgccaatgggagcgtaacaagttgcagtgctctgacacggagcaggtggaggccgacctggagtga

SEQ ID NO: 131161 - DNA, 1305 bp, Homo sapiens
atgcaggccaaactcgctgatctcgatcatcgtctgttgtcaggcaggagcctggacgagcagatggacagcgtcgccgacgtcgcggcggacctgggcttagaagccctggtgaacgacaacagccccgtcccgctcgaccatgtcggcgagctcatcaccccggcgatcctgcgggtgcgcaacacccccgaagactggaaagacctgtggtgcgccgaaggctactaccagatcgacccggtgcagcatctcgcggtgacctccatttccccgttcgtcctgtcctaccagcccaagggcgacaccatcctccagcgcttcatcgacagccgccatgcgccggtggttggttacctgcaggatgcccaactggcgtgcgtgattaaaaaggaatttgccgaaatcggaaccaccatcaaacaggattttcgcctgctggggcaaaccagcgtggaccgcttgctgcaactctctcagggccaggcggtgaagggcaatcagctgttgcccgtctcactggtgaaaagaaaaaccaccctggcgcccaatacgcaaaccgcctctccccgcgcgttggccgattcattaaagaagctggcacgacaggtttcccgactggaaagcgggcaggattttgccgatttcggaaccaccatcaaacaggattttcgcctgctggggcaaaccagcgtggaccgcttgctgcaactctctcagggccaggcggtgaagggcaatcagctgttgcccgtctcactggtgaaaagaaaaaccaccctggcgcccaatacgcaaaccgcctctccccgcgcgttggccgattcattaatgcagctggcacgacaggtttcccgactggaaagcgggcatttctacacatacattcgcagcgatgtggcgtgttacggtgaaaacctggcctatttccataaagggtttattgagaatatgtttttcgtctcagccaatccctgggtgagtttcaccagttttgatttaaacgtggccaatatggacaacttcttcgcccccgttttctccatgggcaaatattatacgcaagtcgacaaggtgctgatgccgctggcgattcaggttcatcatgccgtttgtgatggcttccatgtcggcagaatgcttaatgaattacaacattcggaggggaaggaaagtctgttcaccgccaatggccgatttacccaaaggcttggcggtgtcgggacaataccctatcgcgagtcggtagaaagctccctcacccccccacctcaaccttccccatctgttaaatgggaagtctga

SEQ ID NO: 131162 - DNA, 423 bp, Homo sapiens
tcagacttcccatttaacagatggggaaggttgaggtgggggggtgagggagctttctaccgactcgcgatagggtcctgtcccgacaccgccaagcctttgggtaaatcggccattggcggtgaacagactttccttcccctccgaactgtagtagcggtcatccttgaagggcgtgaggtcctccttgagctcgcggtacgcttcccgcagccgccggcacaggtgcttgagctcgctgcagagcgggggctcaaaggcagggtactcggcgtccatgccgcgcagcctcccgggtcccggtcccgccgctccaccctttgtgtcgccgcctgcgccccctctcttctcccagcactggggatcgggctgctggcgcgccacacagccagcccccagccctggtctcatgactgtccccat

SEQ ID NO: 131163 - DNA, 1854 bp, Homo sapiens
atggacttttaccgctacgaggtgtcgcccgtggccctgcagcgcctgcgcgtggcgttgcagaagctttccggcacagaggtcactcacacccacactctcaccatagagctgacgcccgcagacgtcactcacaccgacactctcaccataagagctgacacctgcagacgtcactcacacccacactctcacctcgccgtggaaagcacacgggaaaagttcaatgtggaagtagcagatgatccgacagccccatttgattttacacccaatacctgcaagcagggctcgcgcagaggctcaggcagccatgctggtggcacatgggctgtcgcgactgctcccggtggaatcagccccatttctgattttacacccaacacctgcaagcagagctcgcgcagaggctcaggcagccatgctcgtggcacgtgggctgtcgcggctgctcccggtggaatcagccccctttctgattttacacccaacacctgcaagcagggctcgcgcagaggctcaggcagccatgctcgtggcacgtgggctgtcgcggctgctcccagtggaatcacagctacaatcgagctcagggtggagcaagagaaagaacaaagacaaaggccaccggttttggaagccccaggtagaaggagacagggtcttccacccccgtggaaaaacctcctgaagctacaagctggggccaaagctggtgtggcagcagtggtcacccagagctttccaatgccgtccactcatcccagccccagagccaccctggggtccccattcacagtccagtatgccccacaatggctgcaccaagatgtatgggatctgtaccaagacatgggtaaaaagaaggccctggcatgttcacctgattgttactcaaaagccccacagatggaggctccattgagcattgaccctgaggccctaagagttgctgcccgaggagagatgctcaacatcagccggcacttccatctccgctccctctggcaggaacaaactccactgaaacaggcggctctttcccaagcaggggcaggactggctggttgccgtgttcccaggaaacatgtacaggggcaagagagtgcaactcaacaactccatgtgaacacctgccctggcatgcaggcagccgggccagtccacagccagtcacggccccacgggaggagccttctgagtgacagatatcattttcattcaggggggcttgaactctggccatcagaagagctggttactacaaaggtagcagaacaggaagtactgagaagaaagtgcacctttctgaccacccactcccagcccagctcccctcctgtctgctcgcctcctgtccgctcccctcctgtccgctcccctcctgtccgctcccctcctgaccgctcccctcctgtccgctcccctcctgaccgctcccctcctgtccgctcccctcctgtccgctcccctcctgaacgctcccctcctgtccgctcccctcctgaccgctcccctcctgaccgctcccctcctgtccgctcccctcctgtccgctcccctcctgtccgctcccctcctgtgcgctcccctcctgtccgctcccctcctgtccgctcccctcctgaccgctcccctcctgtccgctcccctcctgtccgctcccctcctgactgctcccctcctgatcgctcccctcctgtccgctcccctcctgactgctcccctcctgactgctcccctcctgtccgctcccctcctgtccgctcccctcctgactgctcccctcctgtccactcccctcctgtctgctcccctcttgactgctcccctccctgccagctaccctcctga

SEQ ID NO: 131164 - DNA, 1107 bp, Homo sapiens
atgcatgtcaaaagcccggttcatcttgatccaaatcctgtatacaccacagagagaaaagcacgggctccccagatgggcaagcatgcattcctcattaccccatctcctgccatgaggagtaggaggtggaaagaacctcttccccatcagcagactcagaggatgggcaggacacaaaaaactaaggctcgaaaagatgaagctaataattcaaggcagcgccagcactggattcctgtcattgcgaggatgtatccaccaactttggactcttcctgcccccttattctccttaataacaaagctgtcatggagctacagggtattgacaagacacccatttctcagcatcgtgctgtttgccttggctggagccgtggggttggtaacacattacgtgctccctcagctccgcaagcatcatccttggatgtggatttcacaccccattctcaaaaacaaagagtatcatcaacgggaagtgagagtacaaggcgagtggataattccaacacaagactggcagtccaaattgaaagagatccagagcgtgcaaggcattcccccatcgccaacccaccgccagaatcctcagtacatgaggaagatcatccagaaaatggttctcaaactggagcatgtatcagaatcacttgtaggactcgtcaaaacacagattgccttgcccagggcccaatccgcagaatttctgactcattgggtccaggattgaatctgagaatttacatttgtaacaaattcctacccgatgctggtactgctggctctgctgaacctgaaaggaatgatgacaacaatctcaattccattttttatgaacacttgacaaggaccctccaggagtccctctgtggagacttagttcttggacgttggggcaagtacagctctggcgattgctttattttggcttcagatgacctcaatgcctttgttcacctgattgaaattggaaatggtcttgtcacctttcaacttcgaggactggaattccgagattttggactaggtgtggtacaggaaaggattcccaatccagaccccaaaagagggttcttggatctcgcacaagaaagaatttag

SEQ ID NO: 131165 - DNA, 432 bp, Homo sapiens
tttcgtgctcttaatgtgtagattacaacaaattcgctgcatccacaccgacctgacacgcttgactctgggagtgcgctgctgcagctgcaggacagcgggacgggggagtcactttgttcctgaaggggcgagtcctcggcagacgctgcgccgcctccctctttgctagggaggtctgtgtttctacctcctcttcacgccccgcttgcttcctgcactgtgcccgcgctcgtggggagcagatgcaccagatggcgtccggggtggggtcaatgaagcgcagcccgaggaagatgtggcgccctggagaaaagaaggagccccagggcgttgtctatgaggatgtgcgggacgacacggaggactgcaaggaaccgcttaaggaaaaggtcaattcgactagatggagatgttctctgaagatttcct

SEQ ID NO: 131166 - DNA, 5190 bp, Homo sapiens; identical to SEQ ID NO: 119752

SEQ ID NO: 131167 - DNA, 1314 bp, Homo sapiens
atggagttttacagagctggtagaaaattcagtcaccataccactggacataaacttggaagatttcagcctgaggctgccatagataaagagtgcgctgctgcagctgcaggacagcgggacgggcgagtcactttgtccctgaaggggcgagtccaaggcagacgcggcgccgccgccctctttgcgaaggagctccgcgtttctacctcctctccgcgccccgcctgcttcctgcactacaaaagtagcgcgggcctgagaactccttccagaagttctccagggcttccgcagagcgactttttcgctgcctgtgcccgcgcgcgtggtgagcagctgcaccaggtggcgtccggggtggggtcaatgaagcgcagcctgaggaagatgtggcgccctggagaaaagaaggagccccagggcgttgtctatgaggatgtgccggacgacacggaggatttcaaggaatcgcttaaggtggtttttgaaggaagtgcatatggattacaaaactttaataagcaaaagaaattaaaaagatgtgacgatatggacaccttcttcttgcattatgctgcagcagaaggccaaattgagctaatggagaagatcaccagagattcctctttggaagtgctgcatgaaatggatgattatggaaatacccctctgcattgtgctgtagaaaaaaaccaaattgaaagcgttaagtttcttctcagcagaggagcaaacccaaatctccgaaacttcaacatgatggctcctctccacatagctgtgcagggcatgaataatgaggtgatgaaggtcttgcttgagcatagaactattgatgttaatttggaaggagaaaatggaaacacagctgtgatcattgcgtgcaccacaaataatagcgaagcattgcagattttgcttaaaaaaggagctaagccatgtaaatcaaataaatggggatgtttccctattcaccaagctgcattttcaggttccaaagaatgcatggaaataatactaaggtttgatattgaaatgcagactatagagaaagaacttactgcagcatcagcaaaatataggaaaagtgtaagtcaaacaggaagacataccaatattcacatgataccaaagaagtgcattttattacctgtatttaccaatgattcagtcagaccgaagctcccaggagagtttatagcacttagtgggagagacaaaaatggagaaacaaagaattatgaacagtgtgatgtttccagtagaatcagaggcatagggagaacaaagtactcaaaggatacatcctag

SEQ ID NO: 131168 - DNA, 753 bp, Homo sapiens
atggatctggggggtaccggggcgcgcttgtcagtttctgtaggatgcccagaacggctccgctcctcctccaggtgtaaagcagaggccaactcgagggctgcatccccgaaattgttgccaacctcagatttgatgaggggggaccacatactatttaaccttacgaatcccaggttggcacggacgcgtttcagggcgagggcaccggggactcgagcggcgttgggcaggggaagaggctttcccagtggacggtgcagtttctcccccctttttgagaatcatcctcagggtccctccaaagttaggagcctcctggccggggcaccccggagagagctctattccacccctctcccccagctcaccctcctgctcctcaatcccgcttccccccaaccaaccagctgcgacggcgtgaagagcccgtcagtgcccggcgagctgcggcccgagaggcgcgggtctgggcacggtcctgaccgctctcctcgcccgcccccgcccgcacctcaccactggcagcctccgcctcccgctcgcctctgcctgcctcacttcccagccaagcagaccccggccagccccgctggaggacagctgtctgaggggcggcctttgcagggcgcctgtccattgttcgctaaggccggcccggagtcctctcggcgaggctgggctccccgccaggccagcggtgcaccagaggtggagagcgcagcagcctggcgctccagctgttcgcgttag

SEQ ID NO: 131169 - DNA, 915 bp, Homo sapiens
atgggggctgccatcgctgggaataggggccagaaaggcagctggcagcagactccagggtctgagtgggccaaccttgactaccccggcccatggctcacctacaagaccgccaatgactccttccgctgggccacaggggagcaccaggccttcaccagttttgcctttgggcagcctgacaaccacaggcaaccacactggtgcatcccgtccacgttgcatgacttttttaagttcactggcaaaatcgatatcgcgcgcctgataaccaggggtatcggcattggcgatgtttgctgccagcacttcctgacgctgggcgcgcagattgagcgcctcttgttgaaaaccgcccaactcgcgggggtaagtgatgaggttcgtgtttctattcgtacagcgcccaatctactaccgccatgcgagcagccattgctttcgatgagcaataattcccgcctgtggggcaatgtgaatgtgttggcacgctgcggtaacgacaaacgatatttacaggttaatgtacaggccacaggaaattatgtggttgccgcgatgcccattgcgcggggaggaaagctggaagctggcaatgtcaaactgaaacgcggacggctggataccctgccaccgcgtacggtgctggatatcaatcaacttgttgatgccattagcctgcgcgatctatcacccgatcaacctatccagttaacccagtttcgccaggcatggcgggtaaaagcgggacaacgcgtcaatgtgatcgccagcggtgatgggtttagcgccaacgcagaaggtcaggcgctgaacaatgcagccgtcgcacagaatgcgcgggtgcgcatggtatcgggacaggtagtcagcggcgttgttgatgcagatgggaatattcttataaacctgtaa

SEQ ID NO: 131170 - DNA, 480 bp, Homo sapiens
tcaaccataattctcgtcgtcaatagcacacgtctgattcatgcttcgaattaataaaaggatattcgacgaggtccggtcttgatggtcgtttaaacagtcgtaatatccatccaacacgatccagaagttcctggtctcgaagtcactgtcaatcacctcgttggtggtctccaggcggcccagatagaaggcgaggatgtcctgcactttctggctcttgatctgggccagcaccccgcctttcctctgtaaccccacccggtcatagcattttgtgctcaccacgaaggatggtctctgccttctcttgtcggtgtatgcaatctgaaccttaaagtaatctccaaaagaccaagagcccagcatctcgaagaaggtgtgatgatagacatccttgcccacatcgtccaggtcattatgtttgcccccagcccggatgcacttctgggtattggcagctctgctcagctttgccat

SEQ ID NO: 131171 - DNA, 3925 bp, Homo sapiens
ggcacgaggctcgccgcggactcaagatggcggcgtgtggacgtgtacggaggatgttccgcttgtcggcggcgctgcatctgctgctgctattcgcggccggggccgagaaactccccggccagggcgtcccacagccagggccagggtcccggggccaactttgtgtccttcgtagggcaggccggaggcggcggcccggcgggtcagcagctgccccagctgcctcagtcatcgcagcttcagcagcaacagcagcagcagcaacagcaacagcagcctcagccgccgcagccgcctttcccggcgggtgggcctccggcccggcggggaggagcgggggctggtgggggctggaagctggcggaggaagagtcctgcagggaggacgtgacccgcgtgtgccctaagcacacctggagcaacaacctggcggtgctcgagtgcctgcaggatgtgagggagcctgaaaatgaaatttcttcagactgcaatcatttgttgtggaattataagctgaacctaactacagatcccaaatttgaatctgtggccagagaggtttgcaaatctactataacagagattaaagaatgtgctgatgaaccggttggaaaaggttacatggtttcctgcttagtggatcaccgaggcaacatcactgagtatcagtgtcaccagtacattaccaagatgacggccatcatttttagtgattaccgtttaatctgtggcttcatggatgactgcaaaaatgacatcaacattctgaaatgtggcagtattcggcttggagaaaaggatgcacattcacaaggtgaggtggtatcatgcttggagaaaggcctggtgaaagaagcagaagaaagagaacccaagattcaagtttctgaactctgcaagaaagccattctccgggtggctgagctgtcatcggatgactttcacttagaccggcatttatattttgcttgccgagatgatcgggagcgtttttgtgaaaatacacaagctggtgagggcagagtgtataagtgcctctttaaccataaatttgaagaatccatgagtgaaaagtgtcgagaagcacttacaacccgccaaaagctgattgcccaggattataaagtcagttattcattggccaaatcctgtaaaagtgacttgaagaaataccggtgcaatgtggaaaaccttccgcgatcgcgtgaagccaggctctcctacttgttaatgtgcctggagtcagctgtacacagagggcgacaagtcagcagtgagtgccagggggagatgctggattaccgacgcatgttgatggaagacttttctctgagccctgagatcatcctaagctgtcggggggagattgaacaccattgttccggattacatcgaaaagggcggaccctacactgtctgatgaaagtagttcgaggggagaaggggaaccttggaatgaactgccagcaggcgcttcaaacactgattcaggagactgaccctggtgcagattaccgcattgatcgagctttgaatgaagcttgtgaatctgtaatccagacagcctgcaaacatataagatctggagacccaatgatcttgtcgtgcctgatggaacatttatacacagagaagatggtagaagactgtgaacaccgtctcttagagctgcagtatttcatctcccgggattggaagctggaccctgtcctgtaccgcaagtgccagggagacgcttctcgtctttgccacacccacggttggaatgagaccagtgaatttatgcctcagggagctgtgttctcttgtttatacagacacgcctaccgcactgaggaacagggaaggaggctctcacgggagtgccgagctgaagtccaaaggatcctacaccagcgtgccatggatgtcaagctggatcctgccctccaggataagtgcctgattgatctgggaaaatggtgcagtgagaaaacagagactggacaggagctggagtgccttcaggaccatctggatgacttggtggtggagtgtagagatatagttggcaacctcactgagttagaatcagaggatattcaaatagaagccttgctgatgagagcctgtgagcccataattcagaacttctgccacgatgtggcagataaccagatagactctggggacctgatggagtgtctgatacagaacaaacaccagaaggacatgaacgagaagtgtgccatcggagttacccacttccagctggtgcagatgaaggattttcggttttcttacaagtttaaaatggcctgcaaggaggacgtgttgaagctttgcccaaacataaaaaagaaggtggacgtggtgatctgcctgagcacgaccgtgcgcaatgacactctgcaggaagccaaggagcacagggtgtccctgaagtgccgcaggcagctccgtgtggaggagctggagatgacggaggacatccgcttggagccagatctatacgaagcctgcaagagtgacatcaaaaacttctgttccgctgtgcaatatggcaacgctcagattatcgaatgtctgaaagaaaacaagaagcagctaagcacccgctgccaccaaaaagtatttaagctgcaggagacagagatgatggacccagagctagactacaccctcatgagggtctgcaagcagatgataaagaggttctgtccggaagcagattctaaaaccatgttgcagtgcttgaagcaaaataaaaacagtgaattgatggatcccaaatgcaaacagatgataaccaagcgccagatcacccagaacacagattaccgcttaaaccccatgttaagaaaagcctgtaaagctgacattcctaaattctgtcacggtatcctgactaaggccaaggatgattcagaattagaaggacaagtcatctcttgcctgaagctgagatatgctgaccagcgcctgtcttcagactgtgaagaccagatccgaatcattatccaggagtccgccctggactaccgcctggatcctcagctccagctgcactgctcagacgagatctccagtctatgtgctgaagaagcagcagcccaagagcagacaggtcaggtggaggagtgcctcaaggtcaacctgctcaagatcaaaacagaattgtgtaaaaaggaagtgctaaacatgctgaaggaaagcaaagcagacatctttgttgacccggtacttcatactgcttgtgccctggacattaaacaccactgcgcagccatcacccctggccgcgggcgtcaaatgtcctgtctcatggaagcactggaggataagcgggtgaggttacagcccgagtgcaaaaagcgcctcaatgaccggattgagatgtggagttacgcagcaaaggtggccccagcagatggcttctctgatcttgccatgcaagtaatgacgtctccatctaagaactacattctctctgtgatcagtgggagcatctgtatattgttcctgattggcctgatgtgtggacggatcaccaagcgagtgacacgagagctcaaggacaggtagagccaccttgaccaccaaaggaactacctatccagtgcccagtttgtacagccctcttgtatagcatccccactcacctcgctcttctcagaagtgacaccaaccccgtgttagagcattagcagatgtccactgcgttgtcccatccagcctccactcgtgtccatggtgtcctcctcctcctcaccgtgcagcagcagcagctggtcgctggggttactgcctttgtttggcaaacttgggtttacctgcctgtagacaagtctctctcataccaacagaacttccggtacttccagaaccaactcacctgacctgcaactcaaaggcttttttaagaaaaccaccaaaaaaaaaa

SEQ ID NO: 131172 - DNA, 602 bp, Homo sapiens
ccagatagaaggcgaggatgtcctgcactttctggctcttgatctgggccagcaccccgcctttcctctgtaaccccaccctgacatttcatcctggctctgtaataggtgtctgcctctgaagacaccatgaagcagtctccgtcgatcctcaggtcacaggtgtggaagggaaaatgcaccttggtggcacactgggctcccccgtagccgatgtcacagacgcacgagcactcctcctcccggaaccggccgtgcacacactgcaggctgcacctcacttggcagtatctgcccgtgtagccagggggacagtggcagtggcaggtgctgatgttgagacgtccatggttctggcagctcatgcgacaaggattcctggggacctcacagagcccccctgcatggtcccaggctttgaagcagcctgagacactggctgtgcagagcgaacaccaggcacccttcttataggggacgattgtcttcccgttgacctcccagttgcctctgggggagtaggcacagacaaaggcttctatcaatgcctggcctgcagagccgaacgcgtgggtcgggccgggtattccaaccaggtgccg

SEQ ID NO: 131173 - DNA, 1482 bp, Homo sapiens
atgagaagtgataccatctcaactctccggaacaaaggcaggactgataatggagcatctcagaaggtagagaaagccatcgtggagaacaagtgcatgtcagtgcgcaccgggaagcagccgatgctgccgagaccccagcacacacaaacatcccaacaaaaagcagcagttggggcagacaaataccaagagactgaggtaactggaactacaggccattttaaacttgtaagaaaaccgaaaatccttcatctgcacctgaaagatgtagggcaccatggacttttacagactgagggacatactctggatgagaatagtttaccctatcaaggaaaagtaagttccccagatgaaacgccacagataacaggcatattaggcaactgggaggtcaacgggaagacaatcatcccctataagaagggtgcctggtgttcgctctgcacagccagtgtctcaggctgcttcaaagcctgggaccatgcaggggggctctgtgtgaggtgcagcctgcagtgtgtgcacggtcggttccgggaggaggagtgctcgtgcgtctgtgacatcggctacgggggagcccagtgtgccacatggaacacttttgtaaaacagctactttattttgagcagattaaagaatgtgctgatgaaccggttggaaaaggttacatggtttcctgcttggtggatcaccgaggcaacatcactgagtatcagtgtcaccagtacattaccaagatgacggccatcatttttagtgattaccgtttaatctgtggcttcatggatgactgcaaaaatgacatcaacattctgaaatgtggcagtattcggcttggagaaaaggtcagtcaactggctgagaaatggtcaagaaaagaaacaatgacccttctggggatggtggggttacagaggaaaggcggggtgctggcccagatcaagagccagaaagtgcaggacatcctcgccttctatctgggccgcctggagaccaccaacgaggtgattgacagtgacttcgagaccaggaacttctggatcggtagggagcacatgggggctgccagcgctgggaagaggggccagaaaggcagctggcagcagactccagggtctgagtgggccaaccttgactaccccggcccagggctcacctacaagaccgccaaggactccttccgctgggccacaggggagcaccaggccttcaccagttttgcctttgggcagcctgacaaccacggcccagcaatgcccagggccagggtggaggtggtccggctgcgaggccaccaagggctccagcgatttcagccagccctccttgccaacagccggcctgtgcccctggccttttgcctggaggaagtctgggccttgtgttgggagtacaggggtgagcttccgcgctacggcacttacaatttggtattggcggggagtgaaaagaaatattacagccctgcctaa

SEQ ID NO: 131174 - DNA, 8906 bp, Homo sapiens
gaggcggccaaggacctggccgacatcgcggccttcttccgatccgggtttcgaaaaaacgatgaaatgaaagctatggatgttttaccaattttgaaggaaaaagttgcatacctttcaggtgggagagataaacgtggaggtcccattttaacgtttccggcccgcagcaatcatgacagaatacgacaggaggatctcaggagactcatttcctatctagcctgtattcccagcgaggaggtctgcaagcgtggcttcacggtgatcgtggacatgcgtgggtccaagtgggactccatcaagccccttctgaagatcctgcaggagtccttcccctgctgcatccatgtggccctgatcatcaagccagacaacttctggcagaaacagaggactaattttggcagttctaaatttgaatttgagacaaatatggtctctttagaaggccttaccaaagtagttgatccttctcagctaactcctgagtttgatggctgcctggaatacaaccacgaagaatggattgaaatcagagttgcttttgaagactacattagcaatgccacccacatgctgtctcggctggaggaacttcaggacatcctagctaagaaggagctgcctcaggatttagagggggctcggaatatgatcgaggaacattctcagctgaagaagaaggtgattaaggcccccatcgaggacctggatttggagggacagaagctgcttcagaggatacagagcagtgaaagctttcccaaaaagaactcaggctcaggcaatgcggacctgcagaacctcttgcccaaggtgtccaccatgctggaccggctgcactcgacacggcagcatctgcaccagatgtggcatgtgaggaagctgaagctggaccagtgcttccagctgaggctgtttgaacaggatgctgagaagatgtttgactggatcacacacaacaaaggcctgtttctaaacagctacacagagattgggaccagccaccctcatgccatggagcttcagacgcagcacaatcactttgccatgaactgtatgaacgtgtatgtaaatataaaccgcatcatgtcggtggccaatcgtctggtggagtctggccactatgcctcgcagcagatcaggcagatcgcgagtcagctggagcaggagtggaaggcgtttgcggcagccctggatgagcggagcaccttgctggacatgtcctccattttccaccagaaggccgaaaagtatatgagcaacgtggattcatggtgtaaagcttgcggtgaggtagaccttccctcagagctgcaggacctagaagatgccattcatcaccaccagggaatatatgaacatatcactcttgcttattctgaggtcagccaagatgggaagtcgctccttgacaagctccagcggcccttgactcccggcagctccgattccctgacagcctctgccaactactccaaggccgtgcaccatgtcctggatgtcatccacgaggtgctgcaccaccagcggcacgtgagaacaatctggcaacaccgcaaggtccggctgcatcagaggctgcagctgtgtgttttccagcaggaagttcagcaggtgctagactggatcgagaaccacggagaagcatttctgagcaaacatacaggtgtggggaaatctcttcatcgggccagagcattgcagaaacgtcatgaagattttgaagaagtggcacagaacacatacaccaatgcggataaattactggaagcagcagaacagctggctcagactggggaatgtgaccccgaagagatttatcaggctgcccatcagctggaagaccggattcaagatttcgttcggcgtgttgagcagcgaaagatcctactggacatgtcagtgtcctttcacacccatgtgaaagagctgtggacgtggctggaggagctgcagaaggagctgctggacgacgtgtatgccgagtcggtggaggccgtgcaggacctcatcaagcgctttggccagcagcagcagaccaccctgcaggtgactgtcaacgtgatcaaggaaggggaggacctcatccagcagctcagggactctgccatctccagtaacaagaccccccacaacagctccatcaaccacattgagacggtgctgcagcagctggacgaggcgcagtcgcagatggaggagctcttccaggagcgcaagatcaagctggagctcttcctgcacgtgcgcatcttcgagagggacgccatcgacattatctcagacctcgagtcttggaatgatgagctttctcagcaaatgaatgacttcgacacagaagatctcacgattgcagagcagcgcctccagcaccatgcagacaaagccttgaccatgaacaacttgacttttgacgtcatccaccaagggcaagatcttctgcagtatgtcaatgaggtccaggcctctggtgtggagctgctgtgtgatagagatgtagacatggcaactcgggtccaggacctgctggagtttcttcatgaaaaacagcaggaattggatttagccgcagagcagcatcggaaacacctggagcagtgcgtgcagctgcgccacctgcaggcagaagtgaaacaggtgctgggttggatccgcaacggagagtccatgttaaatgccggacttatcacagccagctcgttacaagaggcagagcagctccagcgagagcacgagcagttccagcatgccattgagaaaacacatcagagcgcgctgcaggtgcagcagaaggcagaagccatgctacaggccaaccactacgacatggacatgatccgggactgcgccgagaaggtggcgtctcactggcaacagctcatgctcaagatggaagatcgcctcaagctcgtcaacgcctctgtcgctttctacaaaacctcagagcaggtctgcagcgtcctcgagagcctggaacaggagtacaagagagaagaagactggtgtggcggggcggataagctgggcccaaactctgagacggaccacgtgacgcccatgatcagcaagcacctggagcagaaggaggcattcctgaaggcttgcacccttgctcggaggaatgcagacgtcttcctgaaatacctgcacaggaacagcgtgaacatgccaggaatggtgacgcacatcaaagctcctgaacagcaagtgaaaaatatcttgaatgaactcttccaacgggagaacagggtattgcattactggaccatgaggaagagacggctggaccagtgtcagcagtacgtggtctttgagaggagtgccaagcaggctttggaatggatccatgacaatggcgagttctacctttccacacacacctccacgggctccagtatacagcacacccaggagctcctgaaagagcacgaggagttccagataactgcaaagcaaaccaaagagagagtgaagctattgatacagctggctgatggcttttgtgaaaaagggcatgcccatgcggcagagataaaaaaatgtgttactgctgtggataagaggtacagagatttctctctgcggatggagaagtacaggacctctttggaaaaagccctggggatttcttcagattccaacaaatcgagtaaaagtctccagctagatatcattccagccagtatccctggctcagaggtgaaacttcgagatgctgctcatgaacttaatgaagagaagcggaaatctgcccgcaggaaagagttcataatggctgagctcattcaaactgaaaaggcttatgtaagagacctccgggaatgtatggatacgtacctgtgggaaatgaccagtggcgtggaagagattccacctggcattgtaaacaaagaactcatcatcttcggaaacatgcaagaaatctacgaatttcataataacatattcctaaaggagctggaaaaatatgaacagttgccagaggatgttggacattgttttgttacttgggcagacaagtttcagatgtatgtcacatattgcaaaaataagcctgattctactcagctgatattggaacatgcagggtcctattttgacgagatacagcagcgacatggattagccaattccatttcttcctaccttattaaaccagttcagcgaataacgaaatatcagctccttttaaaagagctgctgacgtgctgtgaggaaggaaagggagagattaaagatggcctggaggtgatgctcagcgtgccgaagcgagccaatgacgccatgcacctcagcatgctggaagggtttgatgaaaacattgagtctcagggagaactcatcctacaggaatccttccaagtgtgggacccaaaaaccttaattcgaaagggtcgagaacggcatctcttcctttttgaaatgtccttagtatttagtaaagaagtgaaagattccagtgggagaagcaagtacctttataaaagcaaattgtttacctcagagttgggtgtcacagaacatgttgaaggagacccttgcaaatttgcactgtgggtggggagaacaccaacttcagataataaaattgtccttaaggcttccagcatagagaacaagcaggactggataaagcatatccgcgaagtcatccaggagcggacgatccacctgaagggagccctgaaggagcccattcacatccctaagaccgctcccgccacaagacagaagggaaggagggatggagaggatctggacagccaaggagacggcagcagccagcctgatacgatttccatcgcctcacggacgtctcagaacacgctggacagcgataagctctctggtggctgtgagctgacagtggtgatccatgacttcaccgcttgcaacagcaacgagctgaccatccgacggggccagaccgtggaagttctggagcggccgcatgacaagcctgactggtgtctggtgcggaccactgaccgctccccagcggcagaaggcctggtcccctgtggttcactgtgcatcgcccactccagaagtagcatggaaatggagggcatcttcaaccacaaagactcgctctccgtctccagcaatgacgccagtccacccgcatccgtggcttccctccagccccacatgatcggggcccagagctcgccgggccccaagcggccgggcaacaccctgcgcaagtggctcaccagccccgtgcggcggctcagcagcggcaaggccgacgggcacgtgaagaagctggcgcacaagcacaagaagagccgcgaggtccgcaagagcgccgacgccggctcgcagaaggactccgacgacagtgcggccaccccgcaggacgagacggtcgaggagagaggccggaacgagggcctgagcagcggtactctctccaaatcctcctcctcggggatgcagagctgtggagaagaggaaggcgaggagggggccgacgccgtgcccctgccgccacccatggccatccagcagcacagcctcctccagccagactcacaggatgacaaggcctcttctcggttattagtccgccccaccagctccgaaacaccgagtgcagccgagctcgtcagtgcaattgaggaactcgtgaaaagcaagatggcactggaggatcgccccagctcactccttgttgaccagggagatagtagcagcccttccttcaacccttcggataattcccttctctcttcctcctcgcccattgatgagatggaagaaaggaaatccagctctttaaagagaagacactacgttttgcaagaactagtggagacagagcgtgactatgtgcgggaccttggctatgtggttgagggctacatggcacttatgaaagaagatggtgttcctgatgacatgaaaggaaaagacaaaattgtgttcggcaacatccatcagatttacgactggcacagagacttttttttaggagagttagagaagtgccttgaagatccagaaaaactaggatccctttttgttaaacacgagagaaggttgcacatgtacatagcttattgtcaaaataaaccaaagtctgagcacattgtctcagaatacattgataccttttttgaggacttaaagcagcgtcttggccacaggttacagctcacagatctgttgatcaaaccagtgcagagaatcatgaagtatcagctgttactgaaggacttcctcaagtattccaaaaaggccagcctggatacatcagaattagagagagctgtggaagtcatgtgcatagtacccaggcggtgcaacgacatgatgaacgtggggcggctgcaaggattcgacgggaaaatcgttgcccagggtaaactgctcttgcaggacacattcttggtcacagaccaagatgcaggacttctgcctcgctgcagagagaggcgcatcttcctctttgagcagatcgtcatattcagcgaaccacttgataaaaagaagggcttctccatgccgggattcctgtttaagaacagtatcaaggtgagttgcctttgcctggaggaaaatgtggaaaatgatccctgtaaatttgctctgacatcgaggacgggtgacgtggtagagaccttcattttgcattcatctagtccaagtgtccggcaaacttggatccatgaaatcaaccaaattttagaaaaccagcgcaattttttaaatgccttgacatcgccaatcgagtaccagaggaaccacagcgggggcggcggcggcggcggcagcggggcagcggcgggggtgggggcagcggcggcggcggggcccccagtggcggcagcggccacagtggcggccccagcagctgcggcggcgcccccagcacgagcaggagccggccctcccggatcccccagcctgtccgacaccacccccccgtgctggtctcctctgcagcctcgagccaggcagaggcagacaagatgtcagagtgaaagcagcagcagtagcaacatctccaccatgttggtgacacacgattacacggcagtgaaggaggatgagatcaacgtctaccaaggagaggtcgttcaaattctggccagcaaccagcagaacatgtttctggtgttccgagccgccactgaccagtgccccgcagctgagggctggattccaggctttgtcctgggccacaccagtgcagtcatcgtggagaacccggacgggactctcaagaagtcaacatcttggcacacagcactccgtttaaggaaaaaatctgagaaaaaagataaagacggcaaaagggaaggcaagttagagaacggttatcggaagtcacgggaaggactcagcaacaaggtatctgtgaagcttctcaatcccaactacatttatgacgttcccccagaattcgtcattccattgagtgaggtcacgtgtgagacaggggagaccgttgttcttagatgtcgagtctgtggccgccccaaagcctcaattacctggaagggccctgaacacaacaccttgaacaacgatggtcactacagcatctcctacagtgacctgggagaggccacgctgaagattgtgggcgtgaccacggaagatgacggcatctacacgtgcatcgctgtcaatgacatgggttcagcctcatcatcggccagcctgagggtcctaggtccagggatggatgggatcatggtgacctggaaagacaactttgactccttctacagtgaagtggctgagcttggcaggggcagattctctgtcgttaagaaatgtgatcagaaaggaaccaagcgagcagtggccactaagtttgtgaacaagaagttgatgaagcgcgaccaggtcacccatgagcttggcatcctgcagagcctccagcaccccctgcttgtcggcctcctcgacacctttgagacccccaccagctacatcctggtcttagaaatggctgaccagggtcgcctcctggactgcgtggtgcgatggggaagcctcactgaagggaagatcagggcgcacctgggggaggttctggaagctgtccggtacctgcacaactgcaggatagcacacctggacctaaagcctgagaatatcctggtggatgagagtttagccaagccaaccatcaaactggctgactttggagatgctgttcagctcaacacgacctactacatccaccagttactggggaaccctgaattcgcagcccctgaaatcatcctcgggaaccctgtctccctgacctcggatacgtggagtgttggagtgctcacatacgtacttcttagtggcgtgtcccccttcctggatgacagtgtggaagagacctgcctgaacatttgccgcttagactttagcttcccagatgactactttaaaggagtgagccagaaggccaaggagttcgtgtgcttcctcctgcaggaggaccccgccaagcgtccctcggctgcgctggccctccaggagcagtggctgcaggccggcaacggcagaagcacgggcgtcctcgacacgtccagactgacttccttcattgagcggcgcaaacaccagaatgatgttcgacctatccgtagcattaaaaactttctgcagagcaggcttctgcctagagtttgacctatccagaagttctttctcattctctttcacctgccaatcagctgttaatctgaattttcaagagaaaacaagcaaacataactgatcagctgccggtatgttcatcgtgtgaaattgcattccaagtgagctgtgctcagcagtgcttggacacagagctgcaagctgcgctggggtggaggaccgtcacttacactctgccaaggacggaggtcgcattgctgtatcacagtattttttacggatttctg

SEQ ID NO: 131175 - DNA, 9437 bp, Homo sapiens
gaggcggccaaggacctggccgacatcgcggccttcttccgatccgggtttcgaaaaaacgatgaaatgaaagctatggatgttttaccaattttgaaggaaaaagttgcatacctttcaggtgggagagataaacgtggaggtcccattttaacgtttccggcccgcagcaatcatgacagaatacgacaggaggatctcaggagactcatttcctatctagcctgtattcccagcgaggaggtctgcaagcgtggcttcacggtgatcgtggacatgcgtgggtccaagtgggactccatcaagccccttctgaagatcctgcaggagtccttcccctgctgcatccatgtggccctgatcatcaagccagacaacttctggcagaaacagaggactaattttggcagttctaaatttgaatttgagacaaatatggtctctttagaaggccttaccaaagtagttgatccttctcagctaactcctgagtttgatggctgcctggaatacaaccacgaagaatggattgaaatcagagttgcttttgaagactacattagcaatgccacccacatgctgtctcggctggaggaacttcaggacatcctagctaagaaggagctgcctcaggatttagagggggctcggaatatgatcgaggaacattctcagctgaagaagaaggtgattaaggcccccatcgaggacctggatttggagggacagaagctgcttcagaggatacagagcagtgaaagctttcccaaaaagaactcaggctcaggcaatgcggacctgcagaacctcttgcccaaggtgtccaccatgctggaccggctgcactcgacacggcagcatctgcaccagatgtggcatgtgaggaagctgaagctggaccagtgcttccagctgaggctgtttgaacaggatgctgagaagatgtttgactggatcacacacaacaaaggcctgtttctaaacagctacacagagattgggaccagccaccctcatgccatggagcttcagacgcagcacaatcactttgccatgaactgtatgaacgtgtatgtaaatataaaccgcatcatgtcggtggccaatcgtctggtggagtctggccactatgcctcgcagcagatcaggcagatcgcgagtcagctggagcaggagtggaaggcgtttgcggcagccctggatgagcggagcaccttgctggacatgtcctccattttccaccagaaggccgaaaagtatatgagcaacgtggattcatggtgtaaagcttgcggtgaggtagaccttccctcagagctgcaggacctagaagatgccattcatcaccaccagggaatatatgaacatatcactcttgcttattctgaggtcagccaagatgggaagtcgctccttgacaagctccagcggcccttgactcccggcagctccgattccctgacagcctctgccaactactccaaggccgtgcaccatgtcctggatgtcatccacgaggtgctgcaccaccagcggcacgtgagaacaatctggcaacaccgcaaggtccggctgcatcagaggctgcagctgtgtgttttccagcaggaagttcagcaggtgctagactggatcgagaaccacggagaagcatttctgagcaaacatacaggtgtggggaaatctcttcatcgggccagagcattgcagaaacgtcatgaagattttgaagaagtggcacagaacacatacaccaatgcggataaattactggaagcagcagaacagctggctcagactggggaatgtgaccccgaagagatttatcaggctgcccatcagctggaagaccggattcaagatttcgttcggcgtgttgagcagcgaaagatcctactggacatgtcagtgtcctttcacacccatgtgaaagagctgtggacgtggctggaggagctgcagaaggagctgctggacgacgtgtatgccgagtcggtggaggccgtgcaggacctcatcaagcgctttggccagcagcagcagaccaccctgcaggtgactgtcaacgtgatcaaggaaggggaggacctcatccagcagctcagggactctgccatctccagtaacaagaccccccacaacagctccatcaaccacattgagacggtgctgcagcagctggacgaggcgcagtcgcagatggaggagctcttccaggagcgcaagatcaagctggagctcttcctgcacgtgcgcatcttcgagagggacgccatcgacattatctcagacctcgagtcttggaatgatgagctttctcagcaaatgaatgacttcgacacagaagatctcacgattgcagagcagcgcctccagcaccatgcagacaaagccttgaccatgaacaacttgacttttgacgtcatccaccaagggcaagatcttctgcagtatgtcaatgaggtccaggcctctggtgtggagctgctgtgtgatagagatgtagacatggcaactcgggtccaggacctgctggagtttcttcatgaaaaacagcaggaattggatttagccgcagagcagcatcggaaacacctggagcagtgcgtgcagctgcgccacctgcaggcagaagtgaaacaggtgctgggttggatccgcaacggagagtccatgttaaatgccggacttatcacagccagctcgttacaagaggcagagcagctccagcgagagcacgagcagttccagcatgccattgagaaaacacatcagagcgcgctgcaggtgcagcagaaggcagaagccatgctacaggccaaccactacgacatggacatgatccgggactgcgccgagaaggtggcgtctcactggcaacagctcatgctcaagatggaagatcgcctcaagctcgtcaacgcctctgtcgctttctacaaaacctcagagcaggtctgcagcgtcctcgagagcctggaacaggagtacaagagagaagaagactggtgtggcggggcggataagctgggcccaaactctgagacggaccacgtgacgcccatgatcagcaagcacctggagcagaaggaggcattcctgaaggcttgcacccttgctcggaggaatgcagacgtcttcctgaaatacctgcacaggaacagcgtgaacatgccaggaatggtgacgcacatcaaagctcctgaacagcaagtgaaaaatatcttgaatgaactcttccaacgggagaacagggtattgcattactggaccatgaggaagagacggctggaccagtgtcagcagtacgtggtctttgagaggagtgccaagcaggctttggaatggatccatgacaatggcgagttctacctttccacacacacctccacgggctccagtatacagcacacccaggagctcctgaaagagcacgaggagttccagataactgcaaagcaaaccaaagagagagtgaagctattgatacagctggctgatggcttttgtgaaaaagggcatgcccatgcggcagagataaaaaaatgtgttactgctgtggataagaggtacagagatttctctctgcggatggagaagtacaggacctctttggaaaaagccctggggatttcttcagattccaacaaatcgagtaaaagtctccagctagatatcattccagccagtatccctggctcagaggtgaaacttcgagatgctgctcatgaacttaatgaagagaagcggaaatctgcccgcaggaaagagttcataatggctgagctcattcaaactgaaaaggcttatgtaagagacctccgggaatgtatggatacgtacctgtgggaaatgaccagtggcgtggaagagattccacctggcattgtaaacaaagaactcatcatcttcggaaacatgcaagaaatctacgaatttcataataacatattcctaaaggagctggaaaaatatgaacagttgccagaggatgttggacattgttttgttacttgggcagacaagtttcagatgtatgtcacatattgcaaaaataagcctgattctactcagctgatattggaacatgcagggtcctattttgacgagatacagcagcgacatggattagccaattccatttcttcctaccttattaaaccagttcagcgaataacgaaatatcagctccttttaaaagagctgctgacgtgctgtgaggaaggaaagggagagattaaagatggcctggaggtgatgctcagcgtgccgaagcgagccaatgacgccatgcacctcagcatgctggaagggtttgatgaaaacattgagtctcagggagaactcatcctacaggaatccttccaagtgtgggacccaaaaaccttaattcgaaagggtcgagaacggcatctcttcctttttgaaatgtccttagtatttagtaaagaagtgaaagattccagtgggagaagcaagtacctttataaaagcaaattgtttacctcagagttgggtgtcacagaacatgttgaaggagacccttgcaaatttgcactgtgggtggggagaacaccaacttcagataataaaattgtccttaaggcttccagcatagagaacaagcaggactggataaagcatatccgcgaagtcatccaggagcggacgatccacctgaagggagccctgaaggagcccattcacatccctaagaccgctcccgccacaagacagaagggaaggagggatggagaggatctggacagccaaggagacggcagcagccagcctgatacgatttccatcgcctcacggacgtctcagaacacgctggacagcgataagctctctggtggctgtgagctgacagtggtgatccatgacttcaccgcttgcaacagcaacgagctgaccatccgacggggccagaccgtggaagttctggagcggccgcatgacaagcctgactggtgtctggtgcggaccactgaccgctccccagcggcagaaggcctggtcccctgtggttcactgtgcatcgcccactccagaagtagcatggaaatggagggcatcttcaaccacaaagactcgctctccgtctccagcaatgacgccagtccacccgcatccgtggcttccctccagccccacatgatcggggcccagagctcgccgggccccaagcggccgggcaacaccctgcgcaagtggctcaccagccccgtgcggcggctcagcagcggcaaggccgacgggcacgtgaagaagctggcgcacaagcacaagaagagccgcgaggtccgcaagagcgccgacgccggctcgcagaaggactccgacgacagtgcggccaccccgcaggacgagacggtcgaggagagaggccggaacgagggcctgagcagcggtactctctccaaatcctcctcctcggggatgcagagctgtggagaagaggaaggcgaggagggggccgacgccgtgcccctgccgccacccatggccatccagcagcacagcctcctccagccagactcacaggatgacaaggcctcttctcggttattagtccgccccaccagctccgaaacaccgagtgcagccgagctcgtcagtgcaattgaggaactcgtgaaaagcaagatggcactggaggatcgccccagctcactccttgttgaccagggagatagtagcagcccttccttcaacccttcggataattcccttctctcttcctcctcgcccattgatgagatggaagaaaggaaatccagctctttaaagagaagacactacgttttgcaagaactagtggagacagagcgtgactatgtgcgggaccttggctatgtggttgagggctacatggcacttatgaaagaagatggtgttcctgatgacatgaaaggaaaagacaaaattgtgttcggcaacatccatcagatttacgactggcacagagacttttttttaggagagttagagaagtgccttgaagatccagaaaaactaggatccctttttgttaaacacgagagaaggttgcacatgtacatagcttattgtcaaaataaaccaaagtctgagcacattgtctcagaatacattgataccttttttgaggacttaaagcagcgtcttggccacaggttacagctcacagatctgttgatcaaaccagtgcagagaatcatgaagtatcagctgttactgaaggacttcctcaagtattccaaaaaggccagcctggatacatcagaattagagagagctgtggaagtcatgtgcatagtacccaggcggtgcaacgacatgatgaacgtggggcggctgcaaggattcgacgggaaaatcgttgcccagggtaaactgctcttgcaggacacattcttggtcacagaccaagatgcaggacttctgcctcgctgcagagagaggcgcatcttcctctttgagcagatcgtcatattcagcgaaccacttgataaaaagaagggcttctccatgccgggattcctgtttaagaacagtatcaaggtgagttgcctttgcctggaggaaaatgtggaaaatgatccctgtaaatttgctctgacatcgaggacgggtgacgtggtagagaccttcattttgcattcatctagtccaagtgtccggcaaacttggatccatgaaatcaaccaaattttagaaaaccagcgcaattttttaaatgccttgacatcgccaatcgagtaccagaggaaccacagcgggggcggcggcggcggcggcagcgggggcagcggcgggggtgggggcagcggcggcggcggggcccccagtggcggcagcggccacagtggcggccccagcagctgcggcggcgcccccagcacgagcaggagccggccctcccggatcccccagcctgtccgacaccacccccccgtgctggtctcctctgcagcctcgagccaggcagaggcagacaagatgtcaggtacgtccacccccgggccctccctgcctccccctggcgcggcccccgaggccggccccagcgcgcccagcaggcggccccccggcgcggacgccgaggggtccgagcgagaagcggagccgatccccaagatgaaggtgctggagagccccaggaaaggcgccgcgaacgcctcggggtcgagcccagacgcccccgccaaggacgcgcgcgctagcctgggcaccctgccgcttgggaagccccgggccggggccgcttcgccgctgaactcgccgctctccagcgcggtcccttctctcggcaaggagcccttcccccccagcagccccctgcagaaggggggctccttctggagctccatccccgcctcccccgccagccgacccggctccttcaccttcccgggggacagcgactccctccagcggcagacaccccgccacgcggcccctggcaaggatactgaccgcatgagcacgtgctcctcggccagcgagcagtccgtgcagtccacccagagcaacgggagtgaaagcagcagcagtagcaacatctccaccatgttggtgacacacgattacacggcagtgaaggaggatgagatcaacgtctaccaaggagaggtcgttcaaattctggccagcaaccagcagaacatgtttctggtgttccgagccgccactgaccagtgccccgcagctgagggctggattccaggctttgtcctgggccacaccagtgcagtcatcgtggagaacccggacgggactctcaagaagtcaacatcttggcacacagcactccgtttaaggaaaaaatctgagaaaaaagataaagacggcaaaagggaaggcaagttagagaacggttatcggaagtcacgggaaggactcagcaacaaggtatctgtgaagcttctcaatcccaactacatttatgacgttcccccagaattcgtcattccattgagtgaggtcacgtgtgagacaggggagaccgttgttcttagatgtcgagtctgtggccgccccaaagcctcaattacctggaagggccctgaacacaacaccttgaacaacgatggtcactacagcatctcctacagtgacctgggagaggccacgctgaagattgtgggcgtgaccacggaagatgacggcatctacacgtgcatcgctgtcaatgacatgggttcagcctcatcatcggccagcctgagggtcctaggtccagggatggatgggatcatggtgacctggaaagacaactttgactccttctacagtgaagtggctgagcttggcaggggcagattctctgtcgttaagaaatgtgatcagaaaggaaccaagcgagcagtggccactaagtttgtgaacaagaagttgatgaagcgcgaccaggtcacccatgagcttggcatcctgcagagcctccagcaccccctgcttgtcggcctcctcgacacctttgagacccccaccagctacatcctggtcttagaaatggctgaccagggtcgcctcctggactgcgtggtgcgatggggaagcctcactgaagggaagatcagggcgcacctgggggaggttctggaagctgtccggtacctgcacaactgcaggatagcacacctggacctaaagcctgagaatatcctggtggatgagagtttagccaagccaaccatcaaactggctgactttggagatgctgttcagctcaacacgacctactacatccaccagttactggggaaccctgaattcgcagcccctgaaatcatcctcgggaaccctgtctccctgacctcggatacgtggagtgttggagtgctcacatacgtacttcttagtggcgtgtcccccttcctggatgacagtgtggaagagacctgcctgaacatttgccgcttagactttagcttcccagatgactactttaaaggagtgagccagaaggccaaggagttcgtgtgcttcctcctgcaggaggaccccgccaagcgtccctcggctgcgctggccctccaggagcagtggctgcaggccggcaacggcagaagcacgggcgtcctcgacacgtccagactgacttccttcattgagcggcgcaaacaccagaatgatgttcgacctatccgtagcattaaaaactttctgcagagcaggcttctgcctagagtttgacctatccagaagttctttctcattctctttcacctgccaatcagctgttaatctgaattttcaagagaaaacaagcaaacataactgatcagctgccggtatgttcatcgtgtgaaattgcattccaagtgagctgtgctcagcagtgcttggacacagagctgcaagctgcgctggggtggaggaccgtcacttacactctgccaaggacggaggtcgcattgctgtatcacagtattttttacggatttctg

SEQ ID NO: 131176 - DNA, 1443 bp, Homo sapiens
atggggatttcgaccgtggtgattggtctgctgccgggctatgccacgattatcacggcaatagcagcaaaggcgcggcgcagtatctgctgcaacagggctacgatgtggtctatagcattgacggcggctttgaagcctggcaacgcctcttctcggttattagtccgccccaccagctccgaaacaccgagtgcagccgagctcgtcagtgcaattgaggaactcgtgaaaagcaagatggtgaggcctcccagagaaagtctgacttttggaagctgctctgtgttgctacttgcagatggatttgcccttgtctttgtattgctctgggctgcagaatgtggctgtggcttatggcacatctcaggagtccccatgaccaacctcgggttcactgatttgaaggactcagagaactcaggaaagccattatacccacatttggcagtgtatacccatgaacggacacagatcaaaataggccacggaagaactgcatcaggcagggcccaaattcacctgctagagttatcccagtggttacaatgtgaatctgcaacaatacaagaggctgaagataaaccaccaatatgtacaaagaaaataatctctaccaggcctctagctgtcaaagctgtgacctttatcagagaaattcgcgcaacggtgctacaacgtacccatcttactgttggtgtggggatcgcccagaccaaaacgctggctaagcttgccaatcatgcggcaaaaaaatggcagcggcagacgggtggggtggtggatttatcaaatctggaacgccagcgtaaattaatgtctgctctccccgtggatgacgtctgggggattggacggcggatcagcaaaaaactggacgcgatgccacgacagaaattcaccaaaccacaattattcaagaggttctcccccaagcatttgtcccggaaaatgtgtaagggacccccttctccaagtgatcttactagatcttcatataactcgctcagtttctccatcagcactgccggcttcacgtggacttggatgtatggaggagctctgatggagatgtacaaggagattaatgttgttttcatgtctgctaacacaacatgcattctgcagcccatggatcaaggagtaattttgactttcaagtcgtattatatcagaaatacattctgtaaggctgtagctgccatagatagtgattcctctgatggatctgggcaaagtaaattgaaagccttccagaaaggattcactattctagatgccatcaagaacatttgtgattcacaggaggagaaattgccacagccacctcaacctttggccactaccctgatcagtcagcagctatcaacatcaagaccagccttccaccaggaaaacgattacaactcactgaaggctcagatgattgctagcaatttttag

SEQ ID NO: 131177 - DNA, 422 bp, Homo sapiens
tttcgttggaaggagctgctggacaggcctttggagccttcgcccgagaccgcgcagccgccgccgccatggctacaaaagaccccacagctgtagagagagcaaacttgttaaacatggctaaactgagtatcaaaggactcattgaatctgctctgagctttggccgcactttggattctgactatccccccttgcagcaattctttgttgttatggaacattgcctgaaacacggtcttaaagtaagaaaatcatttttgagttacaacaaaaccatctggggccctttggaactggtggagaagctgtaccccgaagcagaggaaataggagctagtgtccgggatctacctggtctgaatgagttttatgagtatcacgcactaatgatggaagaagaaggagcagtaattgttggg

SEQ ID NO: 131178 - DNA, 587 bp, Homo sapiens
atggatgggcagctgtgggctgcaccgggcctggctgcaaatgcggtggtggccggagagcgcctggaaggagctgctggacaggccgagggagcctccgcccgagaccgcgcagccgccgccgccatggctacaaaagaccccacagctgtagagagagcaaacttgttaaacatggctaaactgagtatcaaaggactcattgaatctgctctgagctttggccgcactttggattctgactatccccccttgcagcaattctttgttgttatggaacattgcctgaaacacggtcttaaagtaagaaaatcatttttgagttacaacaaaaccatctggggccctttggaactggtggagaagctgtaccccgaagcagaggaaataggagctagtgtccgggatctacctggtctgaagacccctctgggtcgagcaagagcgtggcttcgattagccctcatgcaaaaaaaaatggccgattacttacgttgcttaattattcagagggatctcttgagtgagttttatgagtatcacgcactaatgatggaagaagaaggagcagtaattgttgggctgct

SEQ ID NO: 131179 - DNA, 493 bp, Homo sapiens
gtccggcattcccgggtcgacgatttcgtcgcccgggttctgaggcatagtggccgagggctcgttgtgccactgcgtccaggagcgaggacagggccaggcagggtgtcactcccgggtcggggagcaggcggggaggggcgatgacttttcaggtttgggggtggcggagggaagacgcatctcaggttttggcctgggtgcctgacgccgagggcgggagacggggaatgctgacgcgcaggatcctggtcatgcaatacagaactactgtcagattgaagaagccagacagatagagggtagactgaaagaattggacggcttcttctgtgttcctttctacaaaagaccccacagctgtagagagagcaaacttgttaaacatggctaaactgagtatcaaaggactcattgaatctgctctgagctttgtccgtactttggattctgactatcccctcttgcagcaatttctttgtgttatgaacat

SEQ ID NO: 131180 - DNA, 419 bp, Homo sapiens
agttttcgaaacactacaacatccacaaggatactgcagtagattacaacgtgtttttgaagaatctcagcataaataacgacttgaaccttagatattgtatgggaaatcaagaggtctcattggagaatcaacaagccaaaaattccaaaaaggaacgtttgctaggttctgcatcatctgaagatatctggagaaactactccttggatgaaattgagaggaacttttgtctacaagtaagatgttttcctaagccacaattacctacagagtaaacacagcaaagtagacaatatggaaaactattaggtttacacattatttctaaaatttgtttcgatcctacctatgtcttctccaatactgagaccccctctacctcccaataacagcaatacattgatcatggataaaaa

SEQ ID NO: 131181 - DNA, 420 bp, Homo sapiens
  misc_feature (1)...(420): n = a,t,c or g
naaggcacataactgctctgggctggagcgacccccactggacaatcccagtgtatcaaatcgcctctttgcctccttcctctccccaagggacctgaagggcagaatgatgtagtgactagtcacaggtgctgaaatgaggcttcaaatcccagctccgcacctgttattcaggtaacctggggaaagcagcctgattcctctaacttcagcttccttgcctgtgaaatgagaatgaataaggatataggtgtgtggtgtgtgcttaagatgaaaggagctcatgtgtgcaggtgcttcacacacggaacacgttcaataaatggtggtgaaatgagaattgctgcctgggatcaaaggctaagaatagagatccaaataaccacacacccatgtcagggaatattaagcggcacgaaa

SEQ ID NO: 131182 - DNA, 2051 bp, Homo sapiens
atgagagcatcagcccagaggcagggaggcgaggcttttgtgaaaggaatatcttcagcagatctggtggctctctggtcacatttaggtctaaacaggtccagtgcaggcgagttcagtttaaacctcaagtgtggggctggttcagcacgcccttctcagctcctccaagcccgagggccctggactcccactcctggtggtccagctcacttcctttggctgcttgggtccccttccctgatgagcagtcccttgggaacaggacagctcaagatttctacctgtcatggtgtcctcttaacccatggaaaattcacaagtcccgtccataccaaaataggtgttcaggctgctttcatctgctgcttctgccttgctctgctgtgtctgtctgagtctcagttcctcttcccaggcaaggaagctgaagttagaggaatcaggctgctttccccaggttacctgaataacaggtcccttgtggagaggaaggaggcaaagaggcgatttgatacactgggattgtccagtgggggtcgctccagcccagagcagttatgtgcctttcagtgggcaaaccaccctgcctgggagagggttcattttccccactctccggctttcatcttaaagcccttgccaaacttcagtctgacaaatgataagagccttggagacgtcgctctggtgggtgtgagctcgctgccaggttgctgcttcccggtgctcacgctagagatccatatgggttgctctggggttttaaaaaagcgcatcgtgctcatgtcctccattttaccaaaggaggtaaatctggctttggcagcagacaaagtgcagagatttttatccggccatgagagcaggcgctgtcagtggctggggctccctctttcaggcagagcggtggagtggaggacagaggcactggagccggctttgcttctgccggttttcaaaaacattaagactgttatgaaagcctttgagctcattgatgttaacaagactggactggttcgaccgcaggagctaagaagggttctggagaccttctgtatgaagttaagagacgaggaatacgaaaagttttcgaaacactacaacatccacaaggatactgcagtagattacaacgtgtttttgaagaatctcagcataaataacgacttgaaccttagatattgtatgggaaatcaagtaaaaagcttcttgaaagaaaacctaggcaataccattcaggacataggcgtgggcaaagacttcatgactaaaacaccaaatgcaattgcagtgaaagccaaaattgacaaatgcgatctaattaaactaaagagcttctgtgcagcaaaacaaactatgatcagaacccaaagccataggaaggcagaatggtttttggcaattaccctaaaaagcctgctcgatgggcttgctgcccagggccatctccggactctgcccccacattccggtgcagggctccttggtcccagctgtggcttaggtgcccctctgaaaagtacaagctgtaaagcttggtggcagcacactggggctcacgtgggcccagatgtggcttatgccataactctggaaggtgcaagcaaggaaattttgagaaaatcagaaggttgcaggcattatcaagctgccctggagaatgaaagctggtataattgtggtgagagaggcgtcactgaatacaccgtaccgagtgctgtcagccagcctgtgagagcagccacagggcgtgtgcacagacctgtgggccaggtctcgttggagaatcaacaagccaaaaattccaaaaaggaacgtttgctaggttctgcatcatctgaagatatctggagaaactactccttggatgaaattgagaggaacttttgtctacaactttcgaagtcttatgaaaaggttgaaaaggccctcagtgcaggggacccctgtaaaggtggctacgtgtcttttaattatctaaagattgtcctcgacacttttgtataccaaataccaagaagaatttttatccagttaatgaaaag

SEQ ID NO: 131183 - DNA, 501 bp, Homo sapiens
atggagcttacatttggagggagcaaacaaatgatgaaacacgtgcatttatacacagctaccgaatacagtgagagattgatgaatgatgaagaagaaggccaacaggaatgcggttactttagaacaccaggaccagagcgggtgggaagggagtggaaagtttatctgacatggtacctcttttgtgaagtggcagctgaggagactctggcagtcaccatggccaacaaaaagcccaaggaagaagtcaaaactgagaacaacgatcatattaacttgaaggtggcagggcagaatggttctgtggcagaactctcatctgattgtgggtcaaaagaccctcattccagagaggttctgtctcatatcctggaggaaggaatgctgcacaggggtcaagaacaatctaaacaggccttactgggtttagatcataccctttacattcaatcacattttgacacagttgcgcatacttcaatcatacctatccaatga

SEQ ID NO: 131184 - DNA, 426 bp, Homo sapiens
  misc_feature (1)...(426): n = a,t,c or g
gacctggtacctcttttgtgaagcggcagctgatgagactccggcgctcgccatggccgacgaaaagcccaaggaaggagtcaagactgagaacaacgatcatattaatttgaaggtggcggggcaggatggttctgtggtgcagtttaagattaagaggcatacaccacttagtaaactaatgaaagcctattgtgaacgacagggattgtcaatgaggcagatcacattccgatttgacgggcaaccaatcaatgaaacagacacacctgcacagttggaaatggaggatgaagatacaattgatgtgttccaacagcagacgggaggtgtctactgaaaagggaacctgcttctttactccagaactcttgttctttaaagaccaagattacattctcaattagaanactggcatttgggtcc

SEQ ID NO: 131185 - DNA, 396 bp, Homo sapiens
  misc_feature (1)...(396): n = a,t,c or g
cccacgcgtccgccggaaacggcggcggcggcgacaggaccgaggggccttagttggtgggcaagtcggggatcccagaaagagaagcgtgacccggaagcggaaacgggtgtccgtcccagctccggcctgccagtgagcttctaccatcatggacctattgttcgggcgccggaagacgccagaggagctggaccgcgagcgacagaaactagagacccaggagaagaaaatcattgcagacattaagaagatggccaagcaaggccagatggatgctgttcgcatcatggcaaaagacttggtgcgcacccggcgctatgtgcgcaagtttgtattgatgcgggccaacatccaggctgtgtccctcaagatccagacacttcagtccaacan

SEQ ID NO: 131186 - DNA, 912 bp, Homo sapiens
  misc_feature (1)...(912): n = a,t,c or g
ctcaggcagaagtcaaggtctcacgaatattttgggctttcaagtggaggttgggtggaaagcgcccaccccggtactggcttgggtcactcgggcgggactcaaaacatgaaacactcggacgcgcagaggaaacgggagctgttgcgcatgcgctcggacgctggcccgttccggggcacgggcgcacgcgcgctcctggagtttcccaaccttccgggtgcgggcggggcatgttacctcacgtcgtttaatccggaaacggcgggggcggcgacaggaccgaggggccttagttggtgggcaaggcggggatcccagaaagagaagcgcgacccggaagcggaaacgggtgtccgtcccagctccggagagaggcccctgctggaccgtggatcccgggcggcagtgcgggcggcagcgtacgaggccttctacttctccccggagtccggtgcctcgcttctccctgggaccctgtcatcaacatcgaggtctccaacaccacctttngctttggtgccgggcccactgactgtcctcggtgtatagtgcgacccgaaatctccatcatcccgtcctcagtgtacaggatgccccagcgcccccaaccgtctccctcagcattcagggtccccaaatcctaatgccttgtcctgagcttcacagccccacattcacctgttcttggcctgccagtgagcttctaccatcatggacctattgttcgggcgccggaagacgccagaggagctactgcggcagaaccagagggccctgaaccgtgccatgcgggacatggaccgcgagcgacagaaactagagacccaggagaagaaaatcattgcagacattaagaagattgccaagcaagggcagattgatgctggtcgcatcatggcaaaagacttg

SEQ ID NO: 131187 - DNA, 912 bp, Homo sapiens
ggcccctgctggaccgtggatcccgggcgggcgtgcgggcggcacgtacgaggcccttctactcgcccgggtttccggtgcctcgcttctccctgggaccctgtcgtcaacatcgaggcctgccaattaagcttttaccatcatggacccatttttttcgggcgcccgaagacgccagagagagctactgcggcagaaccatgagggccctgaaccgtgccatgcgggagctgtactgcgagcgacagaaactaaagacccaggagaagaaaatcattgcatacattaagaagatggccaagcaaggccagatggatgctgttcgcattcatgggcaaaagatttggtgcgcacccggcgctatgtgcgcaaagttttgtatttgatgcgggccaacatccagggttgttgtcccttcaagattccagacactcaagtccaacaactcgatggcacaagccatgtaagggtgttaccaagggcatgggcaccatgaacagacagctgaagttgccccagatccagaagatcatgatggagtttgagcggcaggcagagatcatggatatgaaggaggagatgatgaatgatgccattgatgatgccatgggtgatgaggaagatgaagaggagaggtatggggaaactggatgggagggtggagatgtttgcctggccctcacggagtgcatagccctcactgagttctctctcttccctagtgatgctgtggtgtcccaggttctggatgagctgggacttagcctaacagatgagctgtcgaacctcccctcaactgggggctcgcttagtgtggctgctggtgggaaaaaagcagaggccgcagcctcagccctagctgatgctgatgcagacctggaggaacggcttaagaacctgcggagggactga

SEQ ID NO: 131188 - DNA, 1595 bp, Homo sapiens
  misc_feature (1)...(1595): n = a,t,c or g
cacaaggagaaccaccaggagctcgccctgcaccatggattcgcctgcacattttgtctttctcagttaactcacatcatgccagacacaggacaagggacttccgtgtggatccttcagtgccagccttggactgtggatctggaatctcttgatgcctgtatccagaggacgctctctgccttgtacccaccgtttgaagccacggcagccacggtgctctggcagctgttcagcgtggccgagaggtgccacggtggggacgggctgcactgcctcaccagcttcctcctcccagccaagagggccctgcagcacctgcagcaggaagcctgtctgataagcaacttcagcaaagtctcaggatacaaaatcgacgtgcaaaaatcacaagcattcttatacaccaataacagagaaacagagagccaaatcatgagtgaactcccattcagaattgcttcaaagagaataaaatacctaggaatccaacttacaagggacgtgaaggacctcttcaaggagaaccacaaaccactgctcaatgaaataaaagaggatacaaagaaatggaagaacattccatgctcatgggtaggaagaatcaatatcgtgaaaatggccatactgcccaagctcctcgctacacccccagttaactggggctttaagacattgcccagtgcatcctccatccggcacctgttcgtgtggcggctgccacttctgcctcccatcgaggcttccccgaccaccctgcctcccatcgaggcttccccgaccaccctgcctcccatcgaggcttccccgaccaccctgcctctcatcgaggcttccctgaccaccctgcctctcatcgagccttccctgaccacccggcctctcatcgatgcttccccgaccaccctgcctcccatcgaggcttccccgaccacccggcctctcatcgagccttccctgaccagccggcctcccatcgagccttccccgaccaccctgcatcccatcgaggcttcccagaccacccggcatcccatcgaggcttccccgaccacccggcctctcatcgaggcttccccgaccacccggcatctcatcgagccttccccgaccacccggcctctcatcaaggcttccccgaccacccggcctctcatcgagccttccccgaccacccggcctcccatcgaggcttccccgaccacccggcctctcatcgaggcttccccgaccaccatgcctcccatcgaggcttccctgaccacccggcctctcatcgagccttccctgaccacccggcctctcatcaaggcttccccgaccacccggcctcccatcgaggcttccccgaccaccctattcccatcgatgaagatactaccnnnnnnnnnnnnnnnnnnnncagtagttcatcatgagggagtggacagtgagtgggacccggcctgctgtgttccagggcctccggggagaggacaggcctctggggagtggacagtgagtgggacccggcctgctgtgttccagggcctctggggagtggacagtgagtgggacccggcctgctgtgttccagggcctctggggagtggaca

SEQ ID NO: 131189 - DNA, 431 bp, Homo sapiens
actgagcatgcctgcaggctccatgtctactacaggctatcctggggtctgcagtaccacatcatacagaactcactgttatatcccagtgacctcttctgttactcttagctccagtgatttaagccctacctttggacactgcttacccagtagctaccaaggaaatctctggctcctggattactgccaagaatcctacggtgaagcaccaacctgcaaatctcccagctgtgagcccaagacctgcagtaccactggttgtgacccgtcaaactcctctgtgccctgcaactccccatcagcaggccaagtcttcagtgtctgtgaaactaccaacgtcagccccagccccagctgcagcccaagcacccagaccaatgggtatgtatgcaattgccacatacccactcgaaatgcatacacagccc

SEQ ID NO: 131190 - DNA, 1157 bp, Homo sapiens
tgttggaagttctggccagggcaatcaggcaagagaaagaaataaagggtattcaattaggaaaagaggaagtcaaattgtccctgtttgcagatgacatgattgtatatctagaaaaccccatcgtctcagcccaaaatctccttaaactgataagcaacttcagcaaagtctcaggatacaaaatcaatgtgcaaaaatcacaagcattcctatacaccaataacagacaaacagagagccaaatcatgagtgaactcccattcacaattgcttcaaagagaataaaatacctaggaatccaacttacaagggatgcaaaggacgtcttcaaggagaactacaaaccactgctcaatgaaataaaagaggacacaaacaaatggaagaacattccatgctcatggataggaagaatcaatatcgtgaaaatggccatactgcccaggaattggaaaaaactacttcaaagttcatatggaaccaaaaaagcccgcatcaccaagacaatcctaagcaaaaagaacaaagctggaggcatcacgctacctaacttcaaactatactacaaggctacagtaaccaaaacagcatggtactggtaccaacacagagatatagaccaatggaacagaacagaggcctcagaagtaacaccacacatctacaaccatctgatctttgacaaacctgacaaaaacaagaaatggggaaaggattccctgtttaataaatggtgctgggaaaactggctagccatatgtagaaagctgaaactggatctcttccttacaccttatacaaaaattaatccaaggtggattaaagacttaaatcttagacctagaaccataaaaaccctagaagaaaacctaggcagtatctttagggacataggcatgagcaagggcttcatgactaaaacaccaaaagcaaaggcaacaaaagccaaaacagacaaatgggatctaattaaactaaagagcttctgcacggcaaaagaaactaccatcagagtgaacaggcaacctacagaatgggagaaaatttttgcaatctatccatctgacaaagggctaatatccagaatctataaagaactcaaacgaatttacaagaaaaaaacaaccccatcaaaaagtgggcaaagggtatga

SEQ ID NO: 131191 - DNA, 891 bp, Homo sapiens
atgcagctgaaagccaaggctcgagaactacgtgaagaatgcagaagcctcaggagccgatggaatcaactggaagaaagggtatcagtgatggaagatgaaatgaatgaaatgaagcgagaagggaagtttagagaaaaaagaataaaaagaaacgaacaaagcctccaagaaatatgggactatgtgaaaagaccaaatctacgtctgattggtgtacctgaaagtgacggtgagaatgcaaccaggttggaaaacactctgcaggatatcatccaggagaacttccccaatctagcaaggcaggccaacattcagattcaggaaatacagagaatgccacaaagatactcctcaagaagagcatctccaagacacataattgtcagattcaccaaagttgaaatgaaggaaaaaatgttaagggcagccagagagaaagtgttggaagttctggccagggcaatcaggcaggagaaggaaataaagggtattcaattaggaaaagaggaagtcaaattgtccctgtttgcagatgacatgattgtatatctagaaaaccccatcatctcagcccaaaatctccttaagctgataagcaacttcagcaaactctcaggatacaaaatcaatgtgcaaaaatcacaagcattcttatacaccaataacagacaaacagagagtcaaatcatgagtgaactcccattcacaattgcttcaaagagaataaaatacctaggaatccaacttacaagggacgtgaaggacctcttcaaggagaactacaaaccactgctcaatgaaataaaagaggatacaaacaaatggaagaacagtccatgctcatgggtaggaagaatcaatatcatgaaaatggccatactgcccaag

SEQ ID NO: 131192 - DNA, 2723 bp, Homo sapiens
cccccctcgagtagcctaactgggaggcaccccccagtaggggcagactgacacatcacacacctgggtactcctctgagacaaaacttccagaggaacgatcaggcagcaacatttgctgctcaccaatatctgctgttctgcagcctctgctgctgatacccaggcaaacagggtctggattggacctccagcaaactccaacatacctgcagctgagggtcctgactcttagaaggaaaactaacaaacagaaaggaatagcatcaacatcaacaaaaaggacatccacaccaaaaccccatctgtacgtcaccatcatcaaagaccaaagttacataaaaccacaaagatggggaaaaaacatagcagaaaagctgaaaattctaaaaatcagagtggctctctccctccaaaggaatgcagctcctcaccagcagtggaacaaagctggacggagaatgagtttgatgagttcacagaagaaggcttcagaagtgattgaaagtcaaatgaatgaaataaagggagaagagaagtttagagaaaaaagagtaaaaagaaacgaacaaagcctacaagaaatatgggactatgtgaaaagaccagatctacgtctgattggtgtacctgatagtgacggggagaatggaaccaggttggaaaacactctgcaggatattatccgggagaatttccccaacctagcaaggcaggccagcattcaaattcaggaaatacagagaacgccacaaagatactcctcaagaagagcaactccaagacacataattgtcagattcaccaaagttgaaatgaaggaaaaaatgttaagggcagccagagagaaagaactcaagattaagaaactcactcaaaactgcttaactacatggaaactgaacaacctgctcctgaatgactactgggtacataatgaaatgaagggagaaataaagatgttctttgaaaccaatgagaacatagacacaacataccagaatctctggcatacatttaaggcagtgtgtagagggaaatttatagcactaaatgcgcacaagagaaagcaggaaagatctaagattgacaccctagcatcacaattaaaagaaatagagaagcaagagcaaacacattcaaaagctagcagaagacaagaaataactaagatcagagtagaactgaaggagatagagacacaaaaaagccttcaaaaaatcaatgaatccaggagctggttttttgaaaagatcaacaaaattgatagaccactaccaagactaataaagaagaaaagagagaagaatcaaatagacacaataaaaaatgataaaggggatatcaccaccaatcccacagaaatacaaactatcagcagagaatactataaacacctctatgcaaataaactagaaaatctagaagaaatggataaattcctggacacatacaccctctcaggactaaacaaggaagaagttgaatctctgaatacatcaataacaggctctgaagttgaggcaataattaatagcataccaaccaaaaaaaagtccaggaccagatggattcacagccgaattctaccagagcttagcagagacacaacaaaaaaagagaattttagaccaatatccctgatgaacatcgatgtgaaaatcctcaataaaatgctggcaaacggaatccagcagcacatcaaaaagcttatccaccatgatcaagtgggcttcatccctgggatgcaaggctggttcaacatacacaaatcaataaatgtaatccagcatataaacagaaccaaggacaaaaaccacatgattatctcaatagatgcagaaaaggcctttgacaaaattcaacagcccttcatgctaaaaactctcaataaattagatattgatgggacatatctcaaaataataagagctatttatgacaaacccacagccaatatcatactgaatgggcaaaaactggaagcattccctttgaaaagcagcacaagacagggatgccctctctcaccacacctattcaacatagtgttggaagttttggccagggcaatcaggcaagagaaagaaataaagggtattcaattaggaaaagaggaagtcaaattgtccctgtttgcagatgacatgattgtatatttagaaaaccccatcatctcagcccaaaatctccttaagctgataagcaacttcagcaaagtctcaggatacaaaatcaatgtgcaaaaatcacaagcattcctatacaccagtaacagacaaacagagagtcaaatcatgagtgaactcccattcacaattgcttcaaagagaataaaatacctagaaatacaacttacaagggatgtgaaggacctcttcaaggagaactacaaaccactgctcaacgaaataaaagaggacacaaacaaatggaagaacattccatgctcatggataggaagaatcaatattgtgaaaatggccatattgcccaaggatgacaaaaaatgtgtcagtgatgatcatgatgctgacaatgacagtgacaatgacggcgataactttctgcaagtctcagcagcaaaatcttacatctctcattactttcctgtgataaggctcctcacagcatactggaggagactctccaacagccttgaaaaggcaaagggccatgatgtggaagggccatgtggcaaggaattagtagttggcctttag

SEQ ID NO: 131193 - DNA, 2937 bp, Homo sapiens
atggataaattcctcgacatatacactctcccaagtctaaaccaggaagaagttgaatctctgaatagaccaataacaggagctgaaattgtggcaataatcaatagtttaccaaccaaaaagagtccaggaccagatggattcacagccgaattctaccagaggtacaaggaggaactggtaccattccttctgaaactattccaatcaatagaaaaagagggaatccttcctaactcattttatgaggccagcatcattctgataccaaagccgggcagagacacaaccaaaaaagagaattttagaccaatatccttgatgaacattgatgcaaaaatcctcaataaaatactggcaaaacgaatccagcagcacatcaaaaagcttatccaccatgatcaagtgggcttcatccctgggatgcaaggctggttcaatatatgcaaatcaataaatgtaatccagcatataaacagagccaaagacaaaaaccacatgattatctcaatagatgcagaaaaagcctttgacaaaattcaacaacccttcatgctaaaaactctcaataaattagtgttggaagttctggccagggcaattaggcaggagaaggaaataaagggtattcaattaggaaaagaggaagtcaaattgtccctgtttgcagacgacatgattgtatatctagaaaaccccattgtctcagcccaaaatctccttaagctgataagcaacttcagcaaagtctcaggatacaaaatcaatgtacaaaaatcacaagcattcttatacaccaataacagacaaacagagagccaaatcatgagtgaactcccattcacaattgcttcaaagagaataaaatacctagggatccaacttacaagggatgtgaaggacctcttcaaggagaactacaaaccactgctcaaggaaataaaagaggatacaaacaaatggaagaacattccatgctcatgtgtaggaagaatcaatatcgtgaaaatggccatactgcccaaggtaatttacagattcaatgccatccccataaagctaccaatgactttcttcacagaattggaaaaaactactttaaggttcatatggaaccaaaaaagagcccgcatcgccaaggcaatcctaagccaaaagaacaaagctgtaggcatcaccctacctgacttcaaactatactacaaggctacagtaaccaaaacagcatggtactggtaccaaaacagagatatagatcaatggaacagaacagagccctcagaaataacgccgcttatctacaactatcagatctttgacaaacctgagaaaaacaagcaatggggaaaggattccctatttaataaatggtgctgggataactggctagccatatgtagaaagctgaaactggatcccttccttacaccttatacaaaaatcaattcaagatggattaaagccttaaaccttagacctaaaaccataaaaaccctagaagaaaacctaggcattaccattcaagacataggcacgggtaaggacttcatgactaaaacaccaaaagcaatggcaacaaaagacaaaattgacaaatgggatctaattaaactaaagagtttctgcacagcaaaagaaactaccatcagagtgaacaggctacctacaaaatgggagaaaatttttgcaacctactcatctgacaaagggctaatatccagaatctacaatgaactcaaacaaatttacaagaaaaaaacaaacaaccccatcaaaaagtgggagaaggacatgaacagacacttctcaaaagatgacattcttgcagccaaaaaacacatgaaaaaatgctcatcactggccatcagagaaatgcaaatcaaaaccacaatgagataccatctcacaccagttagaatggcaatcattaaaaagccgggaaacaacagccagaaagacatccctgattggagaaatggacctaagagaaaagatcggcagataacgacatttagaggtcctacaaagctgcaggtggtagttcctacactgggggcggcgcctggacgcgggtgtccctggccaaggcggcctcgctgtcctggaagggagggtgaagagctgcatcccgcactaggcggcgaaagagggcagcgccaagcggcggggtccggaggcgctcgacggctcgcgcccagcgccggagacgggctgtgtgttgggccagtggaagacaccggagaaacccagacgtggaagaccgggcagcctggacttcgcgagccctggtggggctggcggcccacagagcccccacctgccccgagctcccacagcgaggagtggccgcgccgcccgccagtgcgccgggctccgagaccggcaggggagcacgcgggcgaaggaggggccgccgtcgctgacaccaccgccttcagcccttggcttccgcgcgtcggaggctggcacctccaggttcaccgcggcggccggagctgtgcgggggccagacggttcggcgggagccggggctgggacctgggtgacctgtcgtccgcccctgtagcgagtctccagtgggcatgtttcaggtgggcaggtccagcatccccaaacctgccccccgcagcctggaggacctggactcagtgcagcgtgtcctgttacacaggtcagtgcagggccccgggacgcggggcgagaccgtcctcttgccccggaaatgttggcgagggaggggccgcttttctttctggggtctttctggaagcatctgacttgggattcgccttagtgcggcgctggccgcgaagggccgttgggacctgcaccccaccctttccagaatcgggtgccagcgatccaccctgtcccgctgccgagactggccccgcgcgggtcccggtcacccatctcctccggaaaacgctaccttag

SEQ ID NO: 131194 - DNA, 2301 bp, Homo sapiens
atggacctgaaggccattatccttagtgaaatgactcagaaacaatcagatgtacctagtaccatcattttgtggattgcgcgaactttccccggacgtatgccatatccgatgggccggtcgctgaacccttccggaaagaaatgccggtgcaattttatcaagccagaaatacccaatcaggcagacatttatccctgcgggctatttgttgggtgcacatgggttgaagactcagccagtgtcagggaaaggcagtcttccaaaaaaaaaaaaaatagaaaactgaagcttgtgatcagcagcttccagttaagatctccgaagttggagaagcggcccagaatgaggctcaaaaggcgaatggccggtgaacgggtgcaaacttcttgggacctcttgccaggctgtgcttatgcaattctaacgtgtatgtggaaaaaggacacagggtcccctcctgcctctgaaggggtcatggatggcagtagggagaccctagctgcccgagatgtggtactgcaccagacatctggccatatccacaacaagaatatctccactcacctaactggcaacaacaaacaaggccatggcactgagagtagtggctctggcatctttgccgtgagcacactggatgggatgctgaagctcatggaggaagcagacaagctgttgtggtcagcgcagctggtgaaggattcttctgaacccctaccctacctcctcaagctatctttgatattggcaggatggggaatacacattacagaagtgcaggatttgactctgggcatgaaagatggcagcagccctagggtgaccacaagctatacacctcatggtctttttggtgaaagaagggacaagttgaccctttgcccattttcttatggacctcacccatcacaccagcaagtcaggacccttagctgcaggtctgttggagtttgccggagatccaacgcagaccctgtttgcctgggtatcagcagtggaggctgcagaacagcagatattggtgaacagcagatgttgctgcctgatcgttcctctggaagttttgtctcagaggagtacccggccatatttcagaagatgtatggaaatgcctggatgcccaggaagaagtttgctgcaggggtggggccctcatggagaacctctgcgagggcaatgcagacgggaaatgtggggttggagcccacacacagaatccctagtggggcactgccttgtggagctgtgagaagagggccaccgttttccagaccccagaatggtagatcgactggcagcttgcaccatgtgcatggaaaagctgcagacgctcaagaccagcctgtgaaagcagctgggagggaggctatatcctgcaaatccaaaggagcagagcttcccaagaccaggggaacccacctcttgcatcagcgtgacctggatgtgagacatggagtcaaaggagatcatattggtgctctaagattcgactgcgttgctggatttctgacttccatgggacctgtatccccttgttttggtgaatacatctcacaagacctgatggttttaaaaacaggagtttccgtgcacaaactctttcacttttggcatgctgccattcatgtgagacatgacttgctcctctttgccttcttccatgattgtgaggtctccccagccatgtggaaattgttggaagttctggccagggcaatcaggcaagagaaagaaataaagggtattcacttaggaaaagaagaagtcaaattctccctgtttgcagatgacatgattgtatacttagaaaaccccatcatctcagcccaaaatctccttaagctgataagcaacttcagcaaagtctcaggatacaaagtgaatgtgcaaaaatcacaagtattcctatacaccaataacagacaaacagagagccaaatcatgaatgaattcacattcacaattgcttcaaagagaataaaatacctagggatcatacttacaagggatgggaagcacctcttcaaggagaactacaaaccactgttcaacgaaataaaagaggacacaaacaaatggaagaacattccatactcgtgcataggaagaatcaatattgtgaaaatggccacactgcccaagatgaggttgggtgctcaacagcatgctccttcatggttgaaagaaactgctgatagtacatatgttcctggcttcagtagtggtacaggagggacgtcaactgatgtgtttgcatcggtcgatactgggaaaaatttccagacaagaacattttga

SEQ ID NO: 131195 - DNA, 482 bp, Homo sapiens
tattgccctacgcgtccgccagatcagaggaactcgttccaagcccgccatctcctttgtcttcccctcgatatttcaaaccctgctccgtgggccaggacaaagggtcagggtaccactatggggtcagcgcctgtgagggatgtaagggctttttccgcagaagtattcagaagaatatgatttacacttgtcaccgagataagaactgtgttattaataaagtcaccaggaatcgatgcctatactgtcgactccagaagtgctttgaagtgggaatgtccaaagaatctgtcaggaatgacaggaacaagaaaaagaaggagacttcgaagcaagaatgcacagagagctatgaaatgacagctgagttggacgatctcacagagaagatccgaaaagctcaccaggaaactttcccttcactctgccagctgggtaaatacaccacgaattccagtgctgaccatcgagtccgactg

SEQ ID NO: 131196 - DNA, 1029 bp, Homo sapiens
atgtacaaagaagcaccgccggatattcacagacttggaggggagggctttgatgcaggcttgacagtgtttgctcctctctttgcctctccattccctcccagaggtgcaccgtacctgaaagcagcttgtcaaactcccaggtctggcataggtgctactgccatctcgggggaggctctgaaaggagctgtctcctctggagttgaccccaggtgggcatcccatttgagggtaaagctcttggaaaaatccttctctcttcaagagatccagtccacagaaaaagttctctcacaacaagccaagactctgagcctcctgggtgagcccaagctctccaaacaactgacgggcacatgcatatacagaaagacaaacctagctctctgccggggtcccgcggctgccaaatcccttttccagggagctgtcaggaatgacaggaacaagaaaaagaaggagacttcgaagcaagaatgcacagagagctatgaaatgacagctgagttggacgatctcacagagaagatccgaaaagctcaccaggaaactttcccttcactctgccagctgggtaaatacaccacgcgttccactaggaatggcctttcactgagattggaaataaagagaggcaggaaaaagagaagtgagataaaaagaccagactctgaagagcaaatgagccgggctttgagaagcaacacccagggtggcactctggggtccacctcgcccattggtgtcagccaggagaaacactggcatgtctgccaggccgagggagagtctcggcttaacctcaaccagtcttcactgagtttggggaacactgtcccatcccagagcagggacacaggccaggacaagactggacacttcaacaagtggtcagaggtgagacttgaacctaaacagtctgactccagggcagctcttttaaccagtatactatacacagaatcccttgagagggttgccaaaaagggagaatggaagctggggccattggcggcatctagctag

SEQ ID NO: 131197 - DNA, 623 bp, Homo sapiens
atgcgctttgccaagaagcacaacaagaagggcctaaagaagatgcaggccaacaatgccaaggccatgagtgcacgtgcaaaggctatcaaggccctggtaaagcccaaggaagttaagcccaagatcccaaagggtgtcagccacaagctccatcgacttgcccacattgcccactccaagcttgggaagcatgatcatgcccacattgccaaagggctcaggctgtgtgggccaaaggccaagaccaaggatcaaaccaaggcccagcctgcagctccagcttcaattccagctcaggctcccaaaggcgcccaggccactacaaagggttcaaattgggccctaaattgcattccaaagaccctgctcctggaacagccttctgcaatcaacacaacctcttggaggttttactgcgtctggcactcgcaggttcccctgctctcactctctctctctctgtttccttgctgtgaaaaacgtgttgaccatcaggcatatggcagaataattggatttcaggcaagccaatgtgagaaaccagaaggcaaatctggtcatttgtgggtatacacaggacaaagaaaaaggagtgtagagaaacagaggctgtcctggag

SEQ ID NO: 131198 - DNA, 580 bp, Homo sapiens
ataagaatctctgtgtttttataagaatctcttaagggagcggaccccaagttcctgaggaacatgcgctttgccaataagcacaacaagaaaggcctaaaaaagatgcaggccaacagtgccagggccacgagtgcacgtgccgacgctatcaaggcccttgtaaagcccaaggagggtaagcccgacatcccaaagggtgtcagccgcaagctcgatccacttgcctacattgcccacccccaggcttgggaaatgtgctcattcctgcattgccaaggggctcaagctatgtcggttacaggccaaggacaaagatcaaaccaaggcccaggctgcagctccagcttaggctcccaaaggtgcccggacacctacgaaggcttcagagtagatatctctgtctgccaatgtgaggacagaaggactgtctatcaggtgtttgaaagtgtggctaagaagtatgatgtgatgaatgatatgatgagtcttggtatccatcgtgtttggaaggatttgctgctctggaagatgcacccacttcctgggacccagctgcttgatgttgctggaggcacag

SEQ ID NO: 131199 - DNA, 510 bp, Homo sapiens
atgggccaggacattcctacagaattccaaaaaccgttcacctgtggccagcagcagaagaaggtatgcaaagagaagagaaagaaggatgcaatgtccacacatgctaaaggaagaaatggtatcaagaaacctcagtcacaaagatcggtgtctctaaagggggtggatcccaaattcctgaggaacatgccctttgccaagaagcacagcaagaagggcctaaagaagatgcaggccaacagtgccaaggccatgagtgcacgtgccaaggctatcaaggccctcgtaaagcccaaggagacacaggcctctactcgggagccttcacggctgcctgagcacctttgggagcctgagctggagccagaactgaggctggagctgaagccgtggtctgagccttgtttggagccttggcctttgggtcaagtgactggtattgcgggcagctcagacgctgcaggagcagatggccaagtagaagattatgaaatgtgcaaaaattga

SEQ ID NO: 131200 - DNA, 811 bp, Homo sapiens
gtaccgattttccggtccaacaattcgttcaattcagaaccacaccacacacaaccagggccgaaaatggcacaaaaaagggatcaagaaaccccgagcacaaagatacgaatctcttaaggggcctgaagtgtaaccctctggtcagggtgtaacctgcctcctgagggcagattggctatctcccttgcttggcagcggcacttatggtgggccccaagttcctgaggaacacgcgctttgccaagaagcacaacaaaaagggcctaaagaagatgcaggccaacaatgccaaggccatgagtgcacgttgccgaggcttatcaaggccctcgtaaagcccaaggaggttaagcccaagatcccaaagggtggtcagccgcaagctccgatcgactttgcctgacattgtccacccccaagcttgggaaaagtgctcgtgccccgtatttgccaaggggcttcaggctgtgcctgccaaatgccaatgccaagtccatatccagccaaggccaaggccaaggccaaggccaaggatcaaaccaaggcccagggttcaagccccagcttcaagttccagcttcaggggtcccaaacgtacccagggcccttacaaaagggtttcagagtagatattctcttgcccaacatgaaggacaagaaaggacttgggtgcgaccccccaccccccgcccctggggttaccattttgcatggggctggggttctcctgttgctatttgtacaaataaacctgaggcaggaaaaagaaggaacgaaaaagaaaaattgtgccaaggggatggatata

SEQ ID NO: 131201 - DNA, 636 bp, Homo sapiens
atgatagaccatctgcaagctggagaaagagaaaatccaatagcggctcagtccaaggccaaaagcctcaaaaccagggaagacgacagtgcagccttcagcctgcagccaaaaggcctagagccccaggaagctgttggtcctgtaccaaaattccagaaagaagaaagaaagaaagagagagagagaggaaggaaggaaggaaggaaggaaggaaggaaggaaggaaggaaggaaggaaggaagggaggaaggaaaagaaagaaagacaaagaaagaggcaagcaagcaggagctcgacataaagcacactcttcatatactttaggcaagataaatgaaataaacacagaaattaaccagttgattgaaaagaaaatgatgagaaatgagcccattgaaggcaaactctcactgtataggcaacaggttgagacagctcagaatcatcaatggatgcttaaaatagcaaggcaacttcgagttgaaaaagagagagaagaatatcttgcacaacagaaacaggaacaaaagaatcagataaatgaaataaacacagaaattaaccagttgattgaaaagaaaatgatgagaaatgagcccattgaaggcaaactctcactgtataggcaacag

SEQ ID NO: 131202 - DNA, 410 bp, Homo sapiens
  misc_feature (1)...(410): n = a,t,c or g
tttcgtgagagaaaaaaatgcaacctcccaaaatatagagcaaagattgtattaggagcgaacagcgctgcagaaatagatggcagcttcgtgtcattgactgnnnnnnnnnnnnnnnnnnnngccactggatgtctgccttcttggggggtgagccagacagactgacaaacaaacagccccaactgtgttcgggggagggtttcgcctcccgttttgcccggcagcagcagcatggacgtgttggctagttatagtatattccaggagctacaacttgtccacgacaccggctacttctcagctttaccatccctggaggagacctggcagcagacatgccttgaattggaacgctacctacagacggagccctggaggatctcagagacctttggtgaggacttgga

SEQ ID NO: 131203 - DNA, 1362 bp, Homo sapiens
tccgagaagcgatcgcgagagaaaaaaatgcaacctcccaaaataaagagcaaagattgcattaggagcgaacagcgctgcagaaatagatggcagcttcgtgtcagtgagtttgcatcccccttcctgatccacgagctggagtgattagagccctggaagggaattgttactcccgtggagaagtccccttttcctggcagtcgtctgcactgtacacgctggatgcctctctccatccaccccactcactcgctcctctctcacctcctctctccctctcctgcattgatttttttttttcctttttagttgactgaaacaaaacaaaacaaaagggccactggatgtctgccttcttggggggtgagccagacagactgacaaacaaacagccccaactgtgttcgggggagggtttcgcctcccgttttgcccggcagcagcagcatggacgtgttggctagttatagtatattccaggagctacaacttgtccacgacaccggctacttctcagctttaccatccctggaggagacctggcagcagacatgccttgaattggaacgctacctacagacggagccccggaggatctcagagaccttttggtgaagacttggactggtttccttcaacgctttcccttccccgtgcattgaggaaagcttccgtcgcttagaccccctgctgctccccgtggaagcggccatctgtgagaagagctcggcagtggacatcttgctctctcgggacaagttgctatctgagacctgcctcagcctccagccggccagctcttctctagacagctacacagccgtcaaccaggcccagctcaacgcagtgacctcattaacgcccccatcgtcccctgagctcagccgccatctggtcaaaacctcacaaactctctctgccgtggatggcacggtgacgttgaaactggtggccaagaaggctgctctcagctccgtaaaggtgggaggggtcgcaacagctgcagcagccgtgacggctgcgggggccgttaagagtggacagagcgacagtgaccaaggagggctaggggctgaagcatgtcccgaaaacaagaagagggttcaccgctgtcagtttaacgggtgccggaaagtttatacaaaaagctcccacttaaaggcccaccagaggactcacacaggtgagaagccttataagtgctcatgggagggatgtgagtggcgttttgcacgaagcgatgagctcacgaggcactacaggaaacacacaggtgcaaagcccttcaaatgcaaccactgcgacaggtgtttttccaggtctgaccatcttgccctccacatgaagagacatatctaa

SEQ ID NO: 131204 - DNA, 951 bp, Homo sapiens
atgccacaagctgaaggaaaggttgatcctgcagaggaaattcaggtcagaactgacaaagatcacagcatcagcaccacttcttctgtaagtgtcaacacgcagttccaacctgtggccctccacagttgtgaggattacagaagcgagggtgtcaaggagatggtccaaggagctcagaaaaggtggcacatgggaaaaagtagggaagctcctttcaaacagcaggctttgtggtatgaattccatggtcagaaacaggaatgctatgggagacctatggatgttatctgggatgggttccctcctctgaatccctccacagtggcctacactacaatccaagttcaggaaaaaacgagaaccttatttaaggtagtggcaagaaatgaatggattaactggacatttaaaaagtatttgatagaacttggtgataggagatgtaacagatctctctatgtctacatcccaactccagaaaacgagaaatcgagttcctcctctcaccatcgaagctctgcagacacctcgctggagaccccatgcagcagcatggacgtgttggctagttatagtatattccaggagctacaacttgtccacgacaccggctacttctcagctttaccatccctggaggagacctggcagcagagtgccgagctgagcagccggtgcgagctgcctgcgtttcagtcgccaacacacatccctgcgcacacgttgtcgggtttgctgtcccctatcagagacctgccgaacttctggggttcggaggagccgggtgggaagggaagctctagtttagtttctacaggcaaaggatttttcacccctcggaaccccctcattttttgccttaaccctctccaactgccagccactctcaccttaaaacccttagccaacttattcagcgtcatgcttatagccaatgctgatgcatag

SEQ ID NO: 131205 - DNA, 446 bp, Homo sapiens
gcatgtcatgatcctttcagggtgccctgatttctggtcctccccaaccagctccctgtccctgcttctgggtgctccttccttcctgagctcccagggttcctcaaggtcacttcctcaggtactcgcatgggcatgtcactgactttacatgctgctgcagctccttggtgagctggctctggtcatgcgacaggaactcagttttcttctgtgtgaaacaggaacaatagtttcattcgtcattcagtttctctcaaggtttcacgagatcatacctttagtgactgaggtgtggtttaggacttcaaggttggatggcccaggcgggaaacagagtggagagctcagtaggccgtctgagactgctgctggcggtagccaccgcggcgcatgtagccctcgtttttgcggtagccgtccttctggtctcgggaattccaccg

SEQ ID NO: 131206 - DNA, 10917 bp, Homo sapiens
atgccgcccgccgcgcccgcccgcctggcgctggccctgggcctgggcctgtggctcggggcgctggcggggggccccgggcgcggctgcgggccctgcgagcccccctgcctctgcggcccagcgcccggcgccgcctgccgcgtcaactgctcgggccgcgggctgcggacgctcggtcccgcgctgcgcatccccgcggacgccacagcgctaacggcgatggcaaaagcagatggagacgtgaaaaagtacgggagcaagcgaggggctctggccctgacccacggccactcactcctcagagacgtctcccacaacctgctccgggcgctggacgttgggctcctggcgaacctctcggcgctggcagagctggatataagcaacaacaagatttctacgttagaagaaggaatatttgctaatttatttaatttaagtgaaataaacctgagtgggaacccgtttgagtgtgactgtggcctggcgtggctgccgcgatgggcggaggagcagcaggtgcgggtggtgcagcccgaggcagccacgtgtgctgggcctggctccctggctggccagcctctgcttggcatccccttgctggacagtggctgtggggccaccctggtggggccccacggacctctggcctctggccagctagcagccttccacatcgctgccccgctccctgtcactgccacacgctgggacttcggagacggctccgccgaggtggatgccgctgggccggctgcctcgcatcgctatgtgctgcctgggcgctatcacgtgacggccgtgctggccctgggggccggctcagccctgctggggacagacgtgcaggtggaagcggcacctgccgccctggagctcgtgtgcccgtcctcggtgcagagtgacgagagcctcgacctcagcatccagaaccgcggtggttcaggcctggaggccgcctacagcatcgtggccctgggcgaggagccggcccgagcggtgcacccgctctgcccctcggacacggagatcttccctggcaacgggcactgctaccgcctggtggtggagaaggcggcctggctgcaggcgcaggagcagtgtcaggcctgggccggggccgccctggcaatggtggacagtcccgccgtgcagcgcttcctggtctcccgggtcaccaggagcctagacgtgtggatcggcttctcgactgtgcagggggtggaggtgggcccagcgccgcagggcgaggccttcagcctggagagctgccagaactggctgcccggggagccacacccagccacagccgagcactgcgtccggctcgggcccaccgggtggtgtaacaccgacctgtgctcagcgccgcacagctacgtctgcgagctgcagcccggaggcccagtgcaggatgccgagaacctcctcgtgggagcgcccagtggggacctgcagggacccctgacgcctctggcacagcaggacggcctctcagccccgcacgagcccgtggaggctgggatggggtctgtggagctgaggcggccccctgcccaccaggtcatggtattcccgggcctgcgtctgagccgtgaagccttcctcaccacggccgaatttgggacccaggagctccggcggcccgcccagctgcggctgcaggtgtaccggctcctcagcacagcagggaccccggagaacggcagcgagcctgagagcaggtccccggacaacaggacccagctggcccccgcgtgcatgccagggggacgctggtgccctggagccaacatctgcttgccgctggacgcctcctgccacccccaggcctgcgccaatggctgcactgagggggagcacgtggtggacgtggtggtggaaaacagcgccagccgggccaacctcagcctgcgggtgacggcggaggagcccatctgtggcctccgcgccacgcccagccccgaggcccgtgtactgcagggagtcctagtgaggtacagccccgtggtggaggccggctcggacatggtcttccggtggaccatcaacgacaagcagtccctgaccttccagaacgtggtcttcaatgtcatttatcagagcgcggcggtcttcaagctctcactgacggcctccaaccacgtgagcaacgtcaccgtgaactacaacgtaaccgtggagcggatgaacaggatgcagggtctgcaggtctccacagtgccggccgtgctgtcccccaatgccacgctagcactgacggcgggcgtgctggtggactcggccgtggaggtggccttcctgtggacctttggggatggggagcaggccctccaccagttccagcctccgtacaacgagtccttcccggttccagacccctcggtggcccaggtgctggtggagcacaatgtcatgcacacctacgctgccccaggtgagtacctcctgaccgtgctggcatctaatgccttcgagaaccggacgcagcaggtgcctgtgagcgtgcgcgcctccctgccctccgtggctgtgggtgtgagtgacggcgtcctgagccagccggctgccaaccacacctatgcctcgaggggcacctaccacgtgcgcctggaggtcaacaacacggtgagcggtgcggcggcccaggcggatgtgcgcgtctttgaggagctccgcggactcagcgtggacatgagcctggccgtggagcagggcgcccccgtggtggtcagcgccgcggtgcagacgggcgacaacatcacgtggaccttcgacatgggggacggcaccgtgctgtcgggcccggaggcaacagtggagcatgtgtacctgcgggcacagaactgcacagtgaccgtgggtgcggccagccccgccggccacctggcccggagcctgcacgtgctggtcttcgtcctggaggtgctgcgcgttgaacccgccgcctgcatccccacgcagcctgacgcgcggctcacggcctacgtcaccgggaacccggcccactacctcttcgactggaccttcggggatggctcctccaacacgaccgtgcgggggtgcccgacggtgacacacaacttcacgcggagcggcacgttccccctggcgctggtgctgtccagccgcgtgaacagggcgcattacttcaccagcatctgcgtggagccagaggtgggcaacgtcaccctgcagccagagaggcagtttgtgcagctcggggacgaggcctggctggtggcatgtgcctggcccccgttcccctaccgctacacctgggactttggcaccgaggaagccgcccccacccgtgccaggggccctgaggtgacgttcatctaccgagacccaggctcctatcttgtgacagtcaccgcgtccaacaacatctctgctgccaatgactcagccctggtggaggtgcaggagcccgtgctggtcaccagcatcaaggtcaatggctcccttgggctggagctgcagcagccgtacctgttctctgctgtgggccgtgggcgccccgccagctacctgtgggatctgggggacggtgggtggctcgagggtccggaggtcacccacgcttacaacagcacaggtgacttcaccgggcccggccctggccggcagcggcaaaggcttctcgctcaccgtctcgaggccggcacctaccatgtgcagctgcgggccaccaacatgctgggcagcgcctgggccgactgcaccatggacttcgtggagcctgtggggtggctgatggtggccgcctccccgaacccagctgccgtcaacaaaagcgtcaccctcagtgccgagctggctggtggcagtggtgtcgtatacacttggtccttggaggaggggctgagctgggagacctccgagccatttaccacccatagcttccccacacccggcctgcacttggtcaccatgacggcagggaacccgctgggctcagccaacgccaccgtggaagtggatgtgcaggtgcctgtgagtggcctcagcatcagggccagcgagcccggaggcagcttcgtggcggccgggtcctctgtgcccttttgggggcagctggccacgggcaccaatgtgagctggtgctgggctgtgcccggcggcagcagcaagcgtggccctcatgtcaccatggtcttcccggatgctggcaccttctccatccggctcaatgcctccaacgcagtcagctgggtctcagccacgtacaacctcacggcggaggagcccatcgtgggcctggtgctgtgggccagcagcaaggtggtggcgcccgggcagctggtccattttcagatcctgctggctgccggctcagctgtcaccttccgcctgcaggacacagatgagcccagggccgagcactcctacctgaggcctggggactaccgcgtgcaggtgaacgcctccaacctggtgagcttcttcgtggcgcaggccacggtgaccgtccaggtgctggcctgccgggagccggaggtggacgtggtcctgcccctgcaggtgctgatgcggcgatcacagcgcaactacttggaggcccacgttgacctgcgcgactgcgtcacctaccagactgagtaccgctgggaggtgtatcgcaccgccagctgccagcggccggggcgcccagcgcgtgtggccctgcccggcgtggacgtgagccggcctcggctggtgctgccgcggctggcgctgcctgtggggcactactgctttgtgtttgtcgtgtcatttggggacacgccactgacacagagcatccaggccaatgtgacggtggcccccgagcgcctggtgcccatcattgagggtggctcataccgcgtgtggtcagacacacgggacctggtgctggatgggagcgagtcctacgaccccaacctggaggacggcgaccagacgccgctcagtttccactgggcctgtgtggcttcgacacagagggaggctggcgggtgtgcgctgaactttgggccccgcgggagcagcacggtcaccattccacgggagcggctggcggctggcgtggagtacaccttcagcctgaccgtgtggaaggccggccgcaaggaggaggccaccaaccagacggtgctgatccggagtggccgggtgcccattgtgtccttggagtgtgtgtcctgcaaggcacaggccgtgtacgaagtgagccgcagctcctacgtgtacttggagggccgctgcctcaattgcagcagcggctccaagcgagggcggtgggctgcacgtacgttcagcaacaagacgctggtgctggatgagaccaccacatccacgggcagtgcaggcatgcgactggtgctgcggcggggcgtgctgcgggacggcgagggatacaccttcacgctcacggtgctgggccgctctggcgaggaggagggctgcgcctccatccgcctgtcccccaaccgcccgccgctggggggctcttgccgcctcttcccactgggcgctgtgcacgccctcaccaccaaggtgcacttcgaatgcacgggctggcatgacgcggaggatgctggcgccccgctggtgtacgccctgctgctgcggcgctgtcgccagggccactgcgaggagttctgtgtctacaagggcagcctctccagctacggagccgtgctgcccccgggtttcaggccacacttcgaggtgggcctggccgtggtggtgcaggaccagctgggagccgctgtggtcgccctcaacaggtctttggccatcaccctcccagagcccaacggcagcgcaacggggctcacagtctggctgcacgggctcaccgctagtgtgctcccagggctgctgcggcaggccgatccccagcacgtcatcgagtactcgttggccctggtcaccgtgctgaacgagcaccgagcccagatacgcaagaacatcacggagactctggtgtccctgagggtccacactgtggatgacatccagcagatcgctgctgcgctggcccagtgcatggggcccagcagggagctcgtatgccgctcgtgcctgaagcagacgctgcacaagctggaggccatgatgctcatcctgcaggcagagaccaccgcgggcaccgtgacgcccaccgccatcggagacagcatcctcaacatcacaggagacctcatccacctggccagctcggacgtgcgggcaccacagccctcagagctgggagccgagtcaccatctcggatggtggcgtcccaggcctacaacctgacctctgccctcatgcgcatcctcatgcgctcccgcgtgctcaacgaggagcccctgacgctggcgggcgaggagatcgtggcccagggcaagcgctcggacccgcggagcctgctgtgctatggcggcgccccagggcctggctgccacttctccatccccgaggctttcagcggggccctggccaacctcagtgacgtggtgcagctcatctttctggtggactccaatccctttccctttggctatatcagcaactacaccgtctccaccaaggtggcctcgatggcattccagacacaggccggcgcccagatccccatcgagcggctggcctcagagcgcgccatcaccgtgaaggtgcccaacaactcggactgggctgcccggggccaccgcagctccgccaactccgccaactccgttgtggtccagccccaggcctccgtcggtgctgtggtcaccctggacagcagcaaccctgcggccgggctgcatctgcagctcaactatacgctgctggacggccactacctgtctgaggaacctgagccctacctggcagtctacctacactcggagccccggcccaatgagcacaactgctcggctagcaggaggatccgcccagagtcactccagggtgctgaccaccggccctacaccttcttcatttccccggggagcagagacccagcggggagttaccatctgaacctctccagccacttccgctggtcggcgctgcaggtgtccgtgggcctgtacacgtccctgtgccagtacttcagcgaggaggacatggtgtggcggacagaggggctgctgcccctggaggagacctcgccccgccaggccgtctgcctcacccgccacctcaccgccttcggcgccagcctcttcgtgcccccaagccatgtccgctttgtgtttcctgagccgacagcggatgtaaactacatcgtcatgctgacatgtgctgtgtgcctggtgacctacatggtcatggccgccatcctgcacaagctggaccagttggatgccagccggggccgcgccatccctttctgtgggcagcggggccgcttcaagtacgagatcctcgtcaagacaggctggggccggggctcaggtaccacggcccacgtgggcatcatgctgtatggggtggacagccggagcggccaccggcacctggacggcgacagagccttccaccgcaacagcctggacatcttccggatcgccaccccgcacagcctgggtagcgtgtggaagatccgagtgtggcacgacaacaaagggctcagccctgcctggttcctgcagcacgtcatcgtcagggacctgcagacggcacgcagcgccttcttcctggtcaatgactggctttcggtggagacggaggccaacgggggcctggtggagaaggaggtgctggccgcgagcgacgcagcccttttgcgcttccggcgcctgctggtggctgagctgcagcgtggcttctttgacaagcacatctggctctccatatgggaccggccgcctcgtagccgtttcactcgcatccagagggccacctgctgcgttctcctcatctgcctcttcctgggcgccaacgccgtgtggtacggggctgttggcgactctgcctacagcacggggcatgtgtccaggctgagcccgctgagcgtcgacacagtcgctgttggcctggtgtccagcgtggttgtctatcccgtctacctggccatcctttttctcttccggatgtcccggagcaaggtggctgggagcccgagccccacacctgccgggcagcaggtgctggacatcgacagctgcctggactcgtccgtgctggacagctccttcctcacgttctcaggcctccacgctgaggcctttgttggacagatgaagagtgacttgtttctggatgattctaagagtctggtgtgctggccctccggcgagggaacgctcagttggccggacctgctcagtgacccgtccattgtgggtagcaatctgcggcagctggcacggggccaggcgggccatgggctgggcccagaggaggacggcttctccctggccagcccctactcgcctgccaaatccttctcagcatcagatgaagacctgatccagcaggtccttgccgagggggtcagcagcccagcccctacccaagacacccacatggaaacggacctgctcagcagcctgtccagcactcctggggagaagacagagacgctggcgctgcagaggctgggggagctggggccacccagcccaggcctgaactgggaacagccccaggcagcgaggctgtccaggacaggactggtggagggtctgcggaagcgcctgctgccggcctggtgtgcctccctggcccacgggctcagcctgctcctggtggctgtggctgtggctgtctcagggtgggtgggtgcgagcttccccccgggcgtgagtgttgcgtggctcctgtccagcagcgccagcttcctggcctcattcctcggctgggagccactgaaggtcttgctggaagccctgtacttctcactggtggccaagcggctgcacccggatgaagatgacaccctggtagagagcccggctgtgacgcctgtgagcgcacgtgtgccccgcgtacggccaccccacggctttgcactcttcctggccaaggaagaagcccgcaaggtcaagaggctacatggcatgctgcggagcctcctggtgtacatgctttttctgctggtgaccctgctggccagctatggggatgcctcatgccatgggcacgcctaccgtctgcaaagcgccatcaagcaggagctgcacagccgggccttcctggccatcacgcggtctgaggagctctggccatggatggcccacgtgctgctgccctacgtccacgggaaccagtccagcccagagctggggcccccacggctgcggcaggtgcggctgcaggaagcactctacccagaccctcccggccccagggtccacacgtgctcggccgcaggaggcttcagcaccagcgattacgacgttggctgggagagtcctcacaatggctcggggacgtgggcctattcagcgccggatctgctgggggcatggtcctggggctcctgtgccgtgtatgacagcgggggctacgtgcaggagctgggcctgagcctggaggagagccgcgaccggctgcgcttcctgcagctgcacaactggctggacaacaggagccgcgctgtgttcctggagctcacgcgctacagcccggccgtggggctgcacgccgccgtcacgctgcgcctcgagttcccggcggccggccgcgccctggccgccctcagcgtccgcccctttgcgctgcgccgcctcagcgcgggcctctcgctgcctctgctcacctcggtgtgcctgctgctgttcgccgtgcacttcgccgtggccgaggcccgtacttggcacagggaagggcgctggcgcgtgctgcggctcggagcctgggcgcggtggctgctggtggcgctgacggcggccacggcactggtacgcctcgcccagctgggtgccgctgaccgccagtggacccgtttcgtgcgcggccgcccgcgccgcttcactagcttcgaccaggtggcgcagctgagctccgcagcccgtggcctggcggcctcgctgctcttcctgcttttggtcaaggctgcccagcagctacgcttcgtgcgccagtggtccgtctttggcaagacattatgccgagctctgccagagctcctgggggtcaccttgggcctggtggtgctcggggtagcctacgcccagctggccatcctgctcgtgtcttcctgtgtggactccctctggagcgtggcccaggccctgttggtgctgtgccctgggactgggctctctaccctgtgtcctgccgagtcctggcacctgtcacccctgctgtgtgtggggctctgggcactgcggctgtggggcgccctacggctgggggctgttattctccgctggcgctaccacgccttgcgtggagagctgtaccggccggcctgggagccccaggactacgagatggtggagttgttcctgcgcaggctgcgcctctggatgggcctcagcaaggtcaaggagttccgccacaaagtccgctttgaagggatggagccgctgccctctcgctcctccaggggctccaaggtatccccggatgtgcccccacccagcgctggctccgatgcctcgcacccctccacctcctccagccagctggatgggctgagcgtgagcctgggccggctggggacaaggtgtgagcctgagccctcccgcctccaagccgtgttcgaggccctgctcacccagtttgaccgactcaaccaggccacagaggacgtctaccagctggagcagcagctgcacagcctgcaaggccgcaggagcagccgggcgcccgccggatcttcccgtggcccatccccgggcctgcggccagcactgcccagccgccttgcccgggccagtcggggtgtggacctggccactggccccagcaggacaccccttcgggccaagaacaaggtccaccccagcagcacttag

SEQ ID NO: 131207 - DNA, 14934 bp, Homo sapiens
atggggtctgtggagctgaggcggccccctgcccaccaggtcatggtattcccgggcctgcgtctgagccgtgaagccttcctcaccacggccgaatttgggacccaggagctccggcggcccgcccagctgcggctgcaggtgtaccggctcctcagcacagcagggaccccggagaacggcagcgagcctgagagcaggtccccggacaacaggacccagctggcccccgcgtgcatgccagggggacgctggtgccctggagccaacatctgcttgccgctggacacctcctgccaccccaggcctgcgccaatggctgcacgtcaggggccagggctactcggggccccctatgcgctatggagagagttcctcttctccgttcccgcggggccccccgcgcagtactcggtcaccctccacagccaggatgtcctcatgctccctggtgacctcgttggcttgcagcacgacgctggccctggcgccctcctgcactgctcgccggctcccggccaccctggtccccaggccccgtacctctccgccaacgcctcgtcatggctgccccacttgccagcccagctggagggcacttgggcctgccctgcctgtgccctgcggctgcttgcagccacggaacagctcaccgtgctgctgggcctgaggcccaaccctgggctgcggctgcctgggcgctatgaggtccgggcagaggtgggcaatggcgtgtccaggcacaacctgtcctgcagctttgacgtggtctccccagtggctgggctgcgggtcatctaccctgccccccgcgacggccgcctctacgtgcccaccaacggctcagcctcggtgctccaggtggactctggtgccagcgccacggccacggctcgctggcctgggggcagtgtcagcgcccgctttgagaatgcctgccctgccctggtggccaccttcgtgcccagctgcccctgggagaccaatgataccctgttctcagtggtagcactgccgtggctcggtgagggggagcacgtgatggacgttgtggtggaaaacagcgccagccgggccaacctcagcctgcgggtgacggcggaggagcccatctgtggcctccgcgccacgcccagccccgaggcccgtgtactgcagggagtcccagtcctgctggctggctcctcaggctacctggtgggctttaaattcctggaaagtcacggctctgacagcggctccgctaactcattccaccgtctcatttcacgaaatgaatttaaaactccgctccctgacctcacacgagtccccaggtacagccccgtggtggaggccggctcggacatggtcttccggtggaccatcaacgacaagcagtccctgaccttccagaacgtggtcttcaatgtcatttatcagagcgcggcggtcttcaagctctcactgacggcctccaaccacgtgagcaacgtcaccgtgaactacaacatcaccgtggagcggatgaacaggatgcagggcctgcgggtctctacagtgccagccgtgctgtcccccaatgccacgctggcactgacggcgggcgtgctggtggactcggccgtggaggtggccttcctgtggacctttggggatggggagcaggccctccaccagttccagcctccgtacaacgagtccttcccggttccagacccctcggtggcccaggtgctggtggagcacaatgtcacccacacctacgctgccccaggtgagtacgtcctgaccgtgctggcatctaatgccttcgagaaccggacgcagcaggtgcctgtgagcgtgtgcgcctccctgccctctgtgagcgtgtgcgcctccctgactggggcctgctgggtccagctgggtccagtacaccagaacgcacaccccagtgtcctctgccctgtgtatgcccttccgccgcccaggttggaaggtggcaaaccggatgagtatcctgggaggggaccttccagcaggccaaatagacctgtgttggaggtaaccccactcccacgccaggtgctgatccgcagtggccgggtgcccattgtgtccttggagtgtgtgtcctgcaaggcacaggccgtgtacgaagtgagccgcagctcctacgtgtacctggagggccgctgcctcaattgcagcagcggctccaagcgagggggatacaccttcacgctgacggtgctgggccgctctggcgaggaggagggctgcgcctccatccccctgtcccccaaccgcccgccgctggggggctcttgccgcctcttcccactgggcgctgtgcacgccctcaccaccaaggtgcacttcgaatgcatgggctggcatgacgcggaggatgctggcgccccgctggtgtacgccctgctgctgcagcgctgtcgccagggccactgcgaggagttctgtgtctacaagggcagcctctccggctacggagccgtgctgcccccgggtttcaggccacacttcgaggtgggcctggccgtggtggtgcaggaccagctgggagccgctgtggtcgccctcaacaggtctctggccatcaccctcccagagcccaacggcagcgcaatggggctcacagtctggctgcacgggctcaccgctagtgtgctcccggggctgctgcggcaggccgatccccagctcgtcatcgagtactcgctggccctggtcactgtgctgaacgagtacgagcgggccctggacgtggcggcagagcccaagcacgagcggcagcgccgagcccagatacgcaagaacatcacggagactctggtgtccctgagggtccacactgtggatgacatccagcagatcgctgctgcgctggcccagtgcatggggcccagcagggagctcgtatgccgctcgtgcctgaagcagacgctgcacaagctggaggccatgatgcgcatcctgcaggcagagaccaccgcgggcaccgtgacgcccaccgccatcggagacagcatcctcaacatcacaggagacctcatccacctggccagctcagacgtgcgggcaccacagcgctcagagctgggagccgagtcaccatcgcggatggtggcgtcccaggcctacaacctgacctctgccctcacgcccatcgtcacgcgctcccgcgtgctcaacgaggagcccctgacgctggcgggtggcctcgatggcgttccagacacaggccggcgcccagatccccatcgagcggctggcctcagagcgcgcctcaccgtgaaggtgcccaacaactcggactgggctgcccggggccaccgcagctccgccaactccgttgtggtccagccccaggcctccgtcggtgctgtggtcaccctggacagcagcaaccctgcggccgtgctgcatctgcagctcaactatacgctgctggacggccgctacctgtctgaggaacccgagccctacctggcagtctacctgcactcggagccccggcccaatgagcgcaactgctcggctagcaggaggatccgcccagagtccctccagggtgccgaccaccggccctacaccttcttcatttccccggggaccagagacccagtggggagttaccgtctgaacctctccagccacttccgctggtcggcgctggaggtgtccgtgggcttgtacacgtccctgtgccagtacttcagcgaggaggacgtggtgtggcggacagaggggctgctgcccctggaggagacctcgccccgccaggccgtctgcctcacccgccacctcaccgccttcggcaccagcctcttcgtgcccccaagccatatccgctttgtgtttcctgagccaacagcggatgtaaactacatcgtcatgctgacatgtgctgtgtgcctggtgacctacatggtcatggccgccatcctgcacaagctggaccagttggatgccagccggggctgcgccatccccttctgtgggcagcggggccgcttcaagtacgagatcctcgtcaagacaggctggggccggggctcaggtaccacggcccacgtgggcatcatgctgtatggggtggacagccggagcggccaccggcacctggacggcgacagagccttccaccgcaacagtctggacatcttccagatcgccaccccgcacagcctgggtagcgtgtggaagatccgagtgtggcacgacaacaaagggctcagccctgcctggttcctgcagcacatcatcgtcagggacctgcagacggcacgcagcaccttcttcctggtcaatgactggctttcggtggagacggaggccaacgggggcctggtggagaaggaggtgctggccgcgagtaaggcctcgttccgtgttcccactccgtcacgcagccctgttgcgcttccggcgcctgctggtggctggctgcagcgtggcttctttgacaagcacatctggctctccatatgggaccggccgcctcggagctgtttcactcgcatccagagggccacctgctgcgttctcctcatctgtctcttcctgggcgccaacgccgtgtggtacggggctgttggagactctgcctacagcacggggcgtgtgtccaggctgaacccgctgagcgtcgacacagtcgctgttggcctggtgtccagcgtggttgtctatcccgtctacctggccatcctctttctcttccggatgtcccggagcaaggtggctgggagcccgagccccacacctgccgggcagcaggtgctggacgtcgacagctgcctggactcatccgtgctggacagctccttcctcacgttctcaggcctccacgctgagcttggactcaagaccctgtgcacctctcagcaggcctttgctggacagatgaagagtgacttgtttctggatgattctaagagatcgggcccggtccccgtccccttccctcccccctgccctaagccacctccacctctgtcctggctgcctcagggcgccctgaaaggaccaggacatgcgggaattaaaattgtcctggaagacatctttactttatggagacaggtggaaaccaaagttcgagctaaaatccgtaagatgaaggtgacaacaaaagtcaaccgtcatgacaaaatcaatggaaagaggaagaccgccaaagaacaatcaccccttctgcaagaaagcctctttgcaaccggagacgtctcccacaacctgctccgggcgctggacgttgggctcctggcgaacctctcggcgctggcagagctggatataagcaacaacaagatttctacgttagaagaaggaatatttgctaatttatttaatttaagtgaaataaacctgagtgggaacccgtttgagtgtgactgtggcctggcgtggctgccgcgatgggcggaggagcagcaggtgcgggtggtgcagcccgaggcagccacgtgtgctgggcctggctccctggctggccagcctctgcttggcatccccttgctggacagtggctgtggtgaggagtatgtcgcctgcctccctgacaacagctcaggcaccgtggcagcagtgtccttttcagctgcccacgaaggcctgcttcagccagaggcctgcagcgccttctgcttctccaccggccagggcctcgcagccctctccgagcagggctggtgcctgtgtgggtcagcccagccctccagtgcctccttcgcctgcctgtccctctgctccggccccccgccgcctcctgcccccacctgtaggggccccaccctcctccagcacgtcttccctgcctccccaggggccaccctgctagcagccttccacatcgctgccccgctccctgtcactgccacacgctgggacttcggagacggctcccccgaggtggatgccgctgggccggctgcctcgcatcgctatgtgctgcctgggcgctatcacgtgatggccgtgctggccctgggggccggctcagccctgctggggacagacgtgcaggtggaagcggcacctgccgccctggagctcgtgtgcccgtcctcggtgcagagtgacgagagcctcgacctcagcatccagaaccgtgttggttcaggcctggaggctgcctacagcatcgtggccctgggcgaggagccggcccgagcggtgcacccgctctgcccctcggacacggagatcttctctggcaacgggcactgctaccgcctggtggtggagaaggcggcctggctgcaggcgcaggagcagtgtcgggcctgggccggggccaccctggcaatggtggacagtcccgccgtgcagcgcttcctggtctcccgggtcaccaggagcctagacatgtggatcggcttctcgactgtgcagggggtggaggtgggcccagcgccgcagggcgaggcctttagcctggagagctgccagaactggctgcccggggagccacacccagccacagccgagcactgcgtccggctcgggcccaccgggtggtgtaacaccgacctgtgctcagcgctgcacagctacgtctgcgagctgcggcctggaggcccagtgcaggatgccgagaacctcctcgtgggagcgcccagtggggacctgcagggacccctgatgcctctggcacggcagtacggcctctcagccccgcatgagcccgtggaggtcatggtattcccgggcctgcgtctgagccgtgaagccttcctcaccacggccgaatttgggacccaggagctccggcggcccgcccagctgcggctgcaggtgtaccggctcctcagcacagcagggaccccggagaacggcagcgagcctgagagcaggtccccggacaacaggacccagctggcccccgcgtgcatgccagggggacgctggtgccctggagccaacatctgcttgccgctggacgcctcctgccaccccaggcctgcgccaatggctgcacgtcaggggccagggctactcggggccccctatgcgctatggagagagttcctcttctccgttcccgcggggccccccgcgcagtactcggtcaccctccacggccaggatgtcctcatgctccctggtgacctcgttggcttgcagcacgacgctggccctggcgccctcccgcactgctcgccggctcccggccaccctggtccccaggccccgtacctctccgccaacgcctcgtcatggctgccccacttgccagcccagctggagggcacttgggcctgccctgcctgtgccctgcggctgcttgcagccacggaacagctcaccgtgctgctgggcctgaggcccaaccctgggctgcggctgcctgggcgctatgaggtccgggcagaggtgggcaatggcgtgtccaggcacaacctgtcctgcagctttgacgtggtctccccagtggctgggctgcgggtcatctaccctgccccccgcgacggccgcctctacgtgcccaccaacggctcagcctcggtgctccaggtggactctggtgccagcgccacggccacggctcgctggcctgggggcagtgtcagcgcccgctttgagaatgcctgccctgccctggtggccaccttcgtgcccggctgcccctgggagaccaatgataccctgttctcagtggtagcactgccgtggctcggtgagggggagcacgtgatggacgttgtggtggaaaacagcgccagccgggccaacctcagcctgcgggtgacggcggaggagcccatctgtggcctccgcgccacgcccagccccgaggcccgtgtactgcagggagtcccagtgaggtacagccccgtggtggaggccggctcggacatggtcttccggtggaccatcaacgacaagcagtccctgaccttccagaacgtggtcttcaatgtcatttatcagagcgcggcggtcttcaagctctcactgacggcctccaaccacgtgagcaacgtcaccgtgaactacaacatcaccgtggagcggatgaacaggatgcagggcctgcgggtctccacagtgccggccgtgctgtcccccaatgccacgctggcactgacggcaggcgtgctggtggactcggccgtggaggtggccttcctgtggacctttggggatggggagcaggccctccaccagttccagcctccgtacaacgagtccttcccggttccagacccctcggtggcccaggtgctggtggagcacaatgtcacgcacacctacgctgccccaggtgagtacgtcctgaccgtgctggcatctaatgccttcgagaaccggacgcagcaggtgcctgtgagcgtgcgcgcctccctgccctccgaggctgtgggtgtgagtgacggcgtcctggtggccggccggcccgtcaccttctacccgcatctgctgccctcgcctgggggtgttctttacacgtgggacttcggggacggctcccctgtcctgacccagagccagccggctgccaaccacacctatccctcgaggggcatctaccacgtgcgcctggaggtcaacaacacggtgagcggtgcggcggcccaggcggatgtgcgcgtctttgaggagctccgcgggctcagcgtggacatgagcctggccgtggagcagggcgcccccgtggtggtcagtgccgcggtgcagacgggcgacaacatcacgtggaccttcgacatgggggacggcaccgtgctgtcgggcccagaggccacagtggagcatgtgtacctgcgggcacagaactgcacagtgaccgtgggtgcggccagccccgccggccacctggcccggagcctgcacgtgctggtcttcgtcctggaggtgctgcgcgtcgagcccgccgcctgcatccccactcagcctgacgcgcggctcacggcctacgtcaccgggaacccggcccgctacctcttcgactggacctttggggatggctcctccaacacgaccatgcgggggtgcccgacggtgacacacaacttcacgcgtagcggcacgttccccctggcgctggtgctgtccagccgcgtgaacagggcgcgttacttcaccagcatctgcgtggagccagaggtgggcaacgtcaccctgcagccagagaggcagtttgtgcagctcggggacgaggcccggctggtggcatgtgcctggcccccgttcccctaccgctacacctgggactttggcaccgaagaagccgtccccgcccgtgtcgggggccctgaggtgacgttcatctaccgagacccaggctcctatcttgtgacagtcaccgcgtccaacaacatctccgctgccaatgactcagccctggtggaggtgcaggagcccatgctggtcaccagcatcaaggtcaatggctcccttgggctggagctgcactacctgtgggatctgggggacggtgggcggctcgagggtccggaggtcacccacgcttacaacagcacaggtgacttcaccgttagggtggccggctgcaatgaggtgagccgcagcgaggcctggctcaatgtgacggtgaagcggcgcgtgcgggggctcatcgtcaatgccagctgcacggtggtgcccctgaatgggagcatgagcttcagcacctcgctggaggccggcagtgatgtgcgctattcctgggtgctctgtgaccgctgcacgcccatctctggggctgagaacgaggtgggctccgcccaggacagcatcttcgtctatgtcctgcagctcatagaggggctgcaggtggtgggcggtggccgctacttccccaccaaccacacggtacagctgcaggccgtggtcagggatggcaccaacatctacagctggactgcctggagggacaggggcccggccctggccggcagcggcaaaggcttctcgctcactgcgctcgaggccggcacctaccatgtgcagctgcgggccaccaacatgctgggcagcgcctgggctgactgcaccgtggacttcgtggagcctgtggggtggctgatggtggccgcctccccgaacccagctgccgtcaacacaagtgtcaccctcagtgccgagctggctggtggcagtggtgtcgtatacacttggtccttggaggaggggctgagctgggagacccccgagccatttaccacccacagcttccccacacccggcctgcacttggtcaccatgacggcagggaacccgctgggctcagccaacgccaccgtggaagtggatgtgcaggtgcctgtgagtggcctcagcatcagggccagcgagccgggaggcagcttcgtggcggccgggtcctctgtgcccttttgggggcagctggccacgggcaccaatgtgagctggtgctgggctgtgcccggcggcagcagcaagcgtggccctcatgtcaccatggtcttcccggatgctggcaccttcaacatccggctcaatgcctccaacgcagtcagctgggtctcagccacgtacaacctcacggtggaggagcccatcgtgggcctggtgctgtgggccagcagcaaggtggtggcgcccgggcagcttgtccattttcagatcctgctggctgccggctcagctgtcaccttccgccggcaggtcggcggggccagccccgaagtgctccctgggccccgtttctcccacagcttcccccgcatcggagaccacgtggtgagcgtgcagagcaaaaaccacgtgagctgggcccaggcgcaggtgcgcatcgtggtgctggaggccgtgagcgggctgcaggtgcccaactgctgtgagcctggcatcgccatgggcactgagaggaacttcacagcccgcgtgcagcgcggctctcgggtcgcctacgcctggtatttctcgctgcagaaggtccggggcgactctctgttcatcctgtcgggccgcgacgtcacctacacgccgtggccgcggggctgttggagatccagtgagaaccgcacgctggtgctggaggttcaggacgccgtccagtatgtggccctgcggagcggcccctgcttcaccaaccgcttggcgcagtttgaggccgccaccagccccagcccccggcgcgtggcctaccactgggactttggggatgggtccccagggcaggacacagataagcccagggccgagcactcctacctgaggcctggggactaccgcgtgcaggtgaacgcctccaacctggtgagctttttcgtggcgcaggccacggtgaccgtccaggtgctggcctgccgggagccggaggtggacgtggtcctgcccctgcaggtgctgatgcgacgatcacagcgcaactgcctggatgcctacgttgacctgcgcgactgtgtcacctaccagactgagtaccgctgggaggtgtaccgcaccgccagctgccagcggccggggtgcccggcgcgtgtggccctgcccggcgtggacgtgagccggcctcagctggtgctgccgcggctggcgctgcctgtggggcactactgctttgtgtttgtcgtgtcatttggggacacgccactggcacggagcatccaggccaatgtgacggtggcccccgagcgcctggtgcccatcactgagggtggctcctaccgcgtgtggtcagacacacaggacctggtgctggatgggagcgagtcctacgaccccaacctggaggacggcgaccagacgccgctcagtttccagtgggcctgtgtggcttcgacacagagggaggctggcgggtgtgcgctgaactttgggccccgcgggagcagcacggtcaccattccacgggaacggctggcagctggcgtggagtacaccttcagcctcaccgtgtggaaggccggccgcaaggaggaggccaccaaccagacgtgctggtggaggccgcgcgctctcccctctctgtttctgatgcaaattctatgtaacacgacagcctgcttcagctttgcttccttccaaacctgccacagttccacatacagtcttcaagccacatatgctctagtgacaaaagctacacagtcccccagcaataccaacaggtccagctggctccagtacaccagaacacacaccccagtgtcctctgccctgtgtatgcccttccgccgcccaggttggaaggtggcaaaccggatgagtatcctgggagggggctggcatgacgcggaggatgctggcgccccgctggtgtatgccctgctgctgcagcgctgttgccagggccactgcaaagagttctgtgtctacaagagcagcctctccggctacggagccgtgctgcccccgggtttcaggccacacttcgaggtgggcctggccgtggtggtgcaggaccagctgggagccgctgtggtcgccctcaacaggtctctggccatcaccctcccagagcccaacggcagcgcaatggggctcacagtctggctgcaccggctcaccgctagtgtgctcccggggctgctgcggcaggccgatccccagcacgtcatcgagtactcgctggccctggtcactgtgctgaacgaggggcccagcagggagctcgtatgccgctcgtgcctgaagcagacgctgcacaagctggaggccatgatgcgcatcctgcaggcagagaccaccgcgggcaccgtgacgcccaccgccatcggagacagcatcctcaacatcacaggagacctcatccacctggccagctcagacgtgcgggcaccgcagcgctcagagctgggagccgagtcaccattgcggatggtggcgtcccaggcctacaacctgacctctgccctcatgcgcatcctcacgcgctcccgcgtgctcaacgaggagcccgctttcagcagggccccggccaacctcagtgacgtggtgcagctcgtctttctggtggactccaatccctttctctttggctatatcagcaactacaccgtctccaccaaggtggcctcgatggcgttccagacacaggccggcgcccagatccccatcgagcggctggcctcagagcgcgccatcaccgtgaaggtgcccaacaactcggactgggctgcccggggccaccgcagctccgccaactccgttgtggtccagccccaggcctccgtcggtgctgtggtcaccctggacagcagcaaccctgtggccgtgctgcatctgcagctcaactatacgctgctggacggccgctacctgtctgaggaacccgagccctacctggcagtctacctgcactcggagccccggcccaatgagcgcaactgctcggctagcaggaggatccgcccagagtccctccagggtgccgaccaccggccctacaccttcttcatttccccggggaccagagacccagtggggagttaccgtctgaacctctccagccacttccgctggtcggcgctggaggtgtccgtgggcttgtacacgtccctgtgccagtacttcagcgaggaggatgtggtgtggcggacagaggggctgctgcccctggaggagacctcgccccgccaggccgtctgcctcacccgccacctcaccgccttcggcgccagcctcttcatgcccccaagccatgtacgctttgtgtttcctgagccgacagcggatgtaaactacatcgtcatgctgacatgtgctgtgtgcctggtgacctacatggtcatggccgccatcctgcacaagctggaccagttggatgccagccggggctgcgccatccccttctgtgggcagcggggccgcttcaagtacgagatcctcgtcaagacaggctggggccggggctcaggtaccacggcccacgtgggcatcatgctgtatggggtggacagccggagcggccaccggcacctggacggcgacagagccttccaccgcaacagtctggacatcttccagatcgccaccccgcacagcctgggtagcgtgtggaagatccgagtgtggcacgacaacaaagggctcagccctgcctggttcctgcagcacatcatcgtcagggacctgcagacggcacgcagcaccttcttcctggtcaatgactggctttcggtggagacggaggccaacgggggcctggtggagaaggaggtgctggctgcgagtcacgcagccctgttgcgcttccggcgcctgctggtggctgagctgcagcgtggcttctttgacaagcacatctggctctccatatgggaccggccacctcgtagctgtttcactcgcatccagagggccacctgctgcgttctcctcatctgcctcttcctgggcgccaacgccgtgtggtacggggctgttggtgactctgcctacagcacggggcatgtgtccaggctgagcccgctgagcgtcgacacagtcgctgttggcctggtgtccagcgtggttgtctatcccgtctacctggccatcctctttctcttccggatgtcccggagcaaggtgctggacatcgacagctgcctggactcgtccgtgctggacagctccttcctcacgttctcaggcctccacgctgaggtgagggctctactgggggtcctgggctgggctgggggtcctgccgccttggcgcagcttggactccagacactgtgcacctctcagcaggcctttgctggacaggtgaagagtgacttgtttctggatgattctaagagatcgggcccggtccccgtccccttccctcccccctgccctaagccacctccacctctgtcctggctgcctcagggcgccctgaaaggaccaggacatgcgggaattaaaattgtcctggaagacatctttactttatggagacaggtggaaaccaaagttcgagctaaaatccgtaagatgaaggtgacaacaaaagtcaaccgtcatgacaaaatcaatggaaagaggaagaccgccaaagaacagtaa

SEQ ID NO: 131208 - DNA, 3012 bp, Homo sapiens
atgtctgcaggagacctcatccacctggccagctcggacgtgcgggcaccacagccctcagagctgggagccgagtcaccatctcggatggtggcgtcccaggcctacaacctgacctctgccctcatgcgcatcctcatgcgctcccgcgtgctcaacgaggagcccctgacgctggcgggcgaggagatcgtggcccagggcaagcgctcggacccgcggagcctgctgtgctatggggggcccccagggcctggctgccacttctccatccccgaggctttcagcggggccctgggcaacctcagggggggcaactacaccgtctgcaccaaggtggcctcgatggcattccagacacaggccggcgcccagatccccatcgagcggctggcctcagagcgcgccatcaccgtgaaggtgcccaacaactcggactgggctgcccggggccaccgcagctccgccaactccgccaactccgttgtggtccagccccaggcctccgtcggtgctgtggtcaccctggacagcagcaaccctgcggccgggctgcatctgcagctcaactatacgctgctggacggccactacctgtctgaggaacctgagccctacctggcagtctacctacactcggagccccggcccaatgagcacaactgctcggctagcaggaggatccgcccagagtcactccagggtgctgaccaccggccctacaccttcttcatttccccggggagcagagacccagcggggagttaccatctgaacctctccagccacttccgctggtcggcgctgcaggtgtccgtgggcctgtacacgtccctgtgccagtacttcagcgaggaggacatggtgtggcggacagaggggctgctgcccctggaggagacctcgccccgccaggccgtctgcctcacccgccacctcaccgccttcggcgccagcctcttcgtgcccccaagccatgtccgctttgtgtttcctgagccgacagcggatgtaaactacatcgtcatgctgacatgtgctgtgtgcctggtgacctacatggtcatggccgccatcctgcacaagctggaccagttggatgccagccggggccgcgccatccctttctgtgggcagcggggccgcttcaagtacgagatcctcgtcaagacaggctggggccggggctcaggtaccacggcccacgtgggcatcatgctgtatggggtggacagccggagcggccaccggcacctggacggcgacagagccttccaccgcaacagcctggacatcttccggatcgccaccccgcacagcctgggtagcgtgtggaagatccgagtgtggcacgacaacaaagggctcagccctgcctggttcctgcagcacgtcatcgtcagggacctgcagacggcacgcagcgccttcttcctggtcaatgactggctttcggtggagacggaggccaacgggggcctggtggagaaggaggtgctggccgcgagcgacgcagcccttttgcgcttccggcgcctgctggtggctgagctgcagcgtggcttctttgacaagcacatctggctctccatatgggaccggccgcctcgtagccgtttcactcgcatccagagggccacctgctgcgttctcctcatctgcctcttcctgggcgccaacgccgtgtggtacggggctgttggcgactctgcctacagcacggggcatgtgtccaggctgagcccgctgagcgtcgacacagtcgctgttggcctggtgtccagcgtggttgtctatcccgtctacctggccatcctttttctcttccggatgtcccggagcaaggtggctgggagcccgagccccacacctgccgggcagcaggtgctggacatcgacagctgcctggactcgtccgtgctggacagctccttcctcacgttctcaggcctccacgctgaggtgaggactctactgggggtcctgggctgggctgggggtcctgccgccttggcgcagcttggactcaagacactgtgcacctctcagcaggcctttgttggacagatgaagagtgacttgtttctggatgattctaagagtctggtgtgctggccctccggcgagggaacgctcagttggccggacctgctcagtgacccgtccattgtgggtagcaatctgcggcagctggcacggggccaggcgggccatgggctgggcccagaggaggacggcttctccctggccagcccctactcgcctgccaaatccttctcagcatcagatgaagacctgatccagcaggtccttgccgagggggtcagcagcccagcccctacccaagacacccacatggaaacggacctgctcagcagcctgtgtgctgaggtccacacggccctgccgttgcactgcagctgcctgcaggattcagtgcagtggcatgcagtgcagggtcttccggctttttgtcggggggaccctgtgacccaagaggctcaagaaactgcccgcccagcagcacagaacctggtgctgatcccgctgcacgcggcgccgcatcaagccgtggcggagatcgacgcgctctacgacgtgtacctggacgtgatcgacaagtggggcaccgacgacatgctgttcctgggcgacttcaacgccgactgcagctatgtgcgggcgcaggactgggccgccatccgtctgaggagcagtgaggtcttcaagtggctcatccctgacagcgccgacaccacggtgggcaactcagactgcgcctacgaccgcattgtggcctgtggcgcccgcctgcgccggagcctgaagccccagtcggccaccgtgcacgacttccaggaggaattcggcctggaccagactcaggcgagtgggccgtggggcggtgctggtcttgggtccccaccgcccgggcgcacgcaggcagcagggagggctcttgccatcagcgaccactttccagtggaggtgaccctcaagttccaccgatga

SEQ ID NO: 131209 - DNA, 363 bp, Homo sapiens
atgcgggcgctacttggcattgtccattgtgaggcactgtccattgtgaggcaccaccggggtcatcagggattggtggagagggagtataaagccccagggttgacccgttcttcttctcctcctcctcctccaactcctccaggtgcccaagaggccacttctcctcctctaccttccattagttccccacttccagatagagtagaagaagaaagcaggagaacagtcaacggagtagacgaagaggcaagagaacggacgaaagaagcaggatcggacaccgacggaacaacaactaagagtgaagtagaaaagcagaagtacgaagaaaagaaggaagcagagcagaagcgagagtaa

SEQ ID NO: 131210 - DNA, 12879 bp, Homo sapiens
atgccgcccgccgcgcccgcccgcctggcgctggccctgggcctgggcctgtggctcggggcgctggcggggggccccgggcgcggctgcgggccctgcgagcccccctgcctctgcggcccagcgcccggcgccgcctgccgcgtcaactgctcgggccgcgggctgcggacgctcggtcccgcgctgcgcatccccgcggacgccacagcgctagacgtctcccacaacctgctccgggcgctggacgttgggctcctggcgaacctctcggcgctggcagagctggatataagcaacaacaagatttctacgttagaagaaggaatatttgctaatttatttaatttaagtgaaataaacctgagtgggaacccgtttgagtgtgactgtggcctggcgtggctgccgcgatgggcggaggagcagcaggtgcgggtggtgcagcccgaggcagccacgtgtgctgggcctggctccctggctggccagcctctgcttggcatccccttgctggacagtggctgtggtgaggagtatgtcgcctgcctccctgacaacagctcaggcaccgtggcagcagtgtccttttcagctgcccacgaaggcctgcttcagccagaggcctgcagcgccttctgcttctccaccggccagggcctcgcagccctctcggagcagggctggtgcctgtgtggggcggcccagccctccagtgcctcctttgcctgcctgtccctctgctccggccccccgccacctcctgcccccacctgtaggggccccaccctcctccagcacgtcttccctgcctccccaggggccaccctggtggggccccacggacctctggcctctggccagctagcagccttccacatcgctgccccgctccctgtcactgccacacgctgggacttcggagacggctccgccgaggtggatgccgctgggccggctgcctcgcatcgctatgtgctgcctgggcgctatcacgtgacggccgtgctggccctgggggccggctcagccctgctggggacagacgtgcaggtggaagcggcacctgccgccctggagctcgtgtgcccgtcctcggtgcagagtgacgagagccttgacctcagcatccagaaccgcggtggttcaggcctggaggccgcctacagcatcgtggccctgggcgaggagccggcccgagcggtgcacccgctctgcccctcggacacggagatcttccctggcaacgggcactgctaccgcctggtggtggagaaggcggcctggctgcaggcgcaggagcagtgtcaggcctgggccggggccgccctggcaatggtggacagtcccgccgtgcagcgcttcctggtctcccgggtcaccaggagcctagacgtgtggatcggcttctcgactgtgcagggggtggaggtgggcccagcgccgcagggcgaggccttcagcctggagagctgccagaactggctgcccggggagccacacccagccacagccgagcactgcgtccggctcgggcccaccgggtggtgtaacaccgacctgtgctcagcgccgcacagctacgtctgcgagctgcagcccggaggcccagtgcaggatgccgagaacctcctcgtgggagcgcccagtggggacctgcagggacccctgacgcctctggcacagcaggacggcctctcagccccgcacgagcccgtggaggtcatggtattcccgggcctgcgtctgagccgtgaagccttcctcaccacggccgaatttgggacccaggagctccggcggcccgcccagctgcggctgcaggtgtaccggctcctcagcacagcagggaccccggagaacggcagcgagcctgagagcaggtccccggacaacaggacccagctggcccccgcgtgcatgccagggggacgctggtgccctggagccaacatctgcttgccgctggacgcctcttgccacccccaggcctgcgccaatggctgcacgtcagggccagggctacccggggccccctatgcgctatggagagagttcctcttctccgttgccgcggggccccccgcgcagtactcggtcaccctccacggccaggatgtcctcatgctccctggtgacctcgttggcttgcagcacgacgctggccctggcgccctcctgcactgctcgccggctcccggccaccctggtccccaggccccgtacctctccgccaacgcctcgtcatggctgccccacttgccagcccagctggagggcacttgggcctgccctgcctgtgccctgcggctgcttgcagccacggaacagctcaccgtgctgctgggcttgaggcccaaccctggactgcggatgcctgggcgctatgaggtccgggcagaggtgggcaatggcgtgtccaggcacaacctctcctgcagctttgacgtggtctccccagtggctgggctgcgggtcatctaccctgccccccgcgacggccgcctctacgtgcccaccaacggctcagccttggtgctccaggtggactctggtgccaacgccacggccacggctcgctggcctgggggcagtgtcagcgcccgctttgagaatgtctgccctgccctggtggccaccttcgtgcccggctgcccctgggagaccaacgataccctgttctcagtggtagcactgccgtggctcagtgagggggagcacgtggtggacgtggtggtggaaaacagcgccagccgggccaacctcagcctgcgggtgacggcggaggagcccatctgtggcctccgcgccacgcccagccccgaggcccgtgtactgcagggagtcctagtgaggtacagccccgtggtggaggccggctcggacatggtcttccggtggaccatcaacgacaagcagtccctgaccttccagaacgtggtcttcaatgtcatttatcagagcgcggcggtcttcaagctctcactgacggcctccaaccacgtgagcaacgtcaccgtgaactacaacgtaaccgtggagcggatgaacaggatgcagggtctgcaggtctccacagtgccggccgtgctgtcccccaatgccacgctagcactgacggcgggcgtgctggtggactcggccgtggaggtggccttcctgtggaactttggggatggggagcaggccctccaccagttccagcctccgtacaacgagtccttcccggttccagacccctcggtggcccaggtgctggtggagcacaatgtcatgcacacctacgctgccccaggtgagtacctcctgaccgtgctggcatctaatgccttcgagaacctgacgcagcaggtgcctgtgagcgtgcgcgcctccctgccctccgtggctgtgggtgtgagtgacggcgtcctggtggccggccggcccgtcaccttctacccgcacccgctgccctcgcctgggggtgttctttacacgtgggacttcggggacggctcccctgtcctgacccagagccagccggctgccaaccacacctatgcctcgaggggcacctaccacgtgcgcctggaggtcaacaacacggtgagcggtgcggcggcccaggcggatgtgcgcgtctttgaggagctccgcggactcagcgtggacatgagcctggccgtggagcagggcgcccccgtggtggtcagcgccgcggtgcagacgggcgacaacatcacgtggaccttcgacatgggggacggcaccgtgctgtcgggcccggaggcaacagtggagcatgtgtacctgcgggcacagaactgcacagtgaccgtgggtgcggccagccccgccggccacctggcccggagcctgcacgtgctggtcttcgtcctggaggtgctgcgcgttgaacccgccgcctgcatccccacgcagcctgacgcgcggctcacggcctacgtcaccgggaacccggcccactacctcttcgactggaccttcggggatggctcctccaacacgaccgtgcgggggtgcccgacggtgacacacaacttcacgcggagcggcacgttccccctggcgctggtgctgtccagccgcgtgaacagggcgcattacttcaccagcatctgcgtggagccagaggtgggcaacgtcaccctgcagccagagaggcagtttgtgcagctcggggacgaggcctggctggtggcatgtgcctggcccccgttcccctaccgctacacctgggactttggcaccgaggaagccgcccccacccgtgccaggggccctgaggtgacgttcatctaccgagacccaggctcctatcttgtgacagtcaccgcgtccaacaacatctctgctgccaatgactcagccctggtggaggtgcaggagcccgtgctggtcaccagcatcaaggtcaatggctcccttgggctggagctgcagcagccgtacctgttctctgctgtgggccgtgggcgccccgccagctacctgtgggatctgggggacggtgggtggctcgagggtccggaggtcacccacgcttacaacagcacaggtgacttcaccgttagggtggccggctggaatgaggtgagccgcagcgaggcctggctcaatgtgacggtgaagcggcgcgtgcgggggctcgtcgtcaatgcaagccgcacggtggtgcccctgaatgggagcgtgagcttcagcacgtcgctggaggccggcagtgatgtgcgctattcctgggtgctctgtgaccgctgcacgcccatccctgggggtcctaccatctcttacaccttccgctccgtgggcaccttcaatatcatcgtcacggctgagaacgaggtgggctccgcccaggacagcatcttcgtctatgtcctgcagctcatagaggggctgcaggtggtgggcggtggccgctacttccccaccaaccacacggtacagctgcaggccgtggttagggatggcaccaacgtctcctacagctggactgcctggagggacaggggcccggccctggccggcagcggcaaaggcttctcgctcaccgtgctcgaggccggcacctaccatgtgcagctgcgggccaccaacatgctgggcagcgcctgggccgactgcaccatggacttcgtggagcctgtggggtggctgatggtgaccgcctccccgaacccagctgccgtcaacacaagcgtcaccctcagtgccgagctggctggtggcagtggtgtcgtatacacttggtccttggaggaggggctgagctgggagacctccgagccatttaccacccatagcttccccacacccggcctgcacttggtcaccatgacggcagggaacccgctgggctcagccaacgccaccgtggaagtggatgtgcaggtgcctgtgagtggcctcagcatcagggccagcgagcccggaggcagcttcgtggcggccgggtcctctgtgcccttttgggggcagctggccacgggcaccaatgtgagctggtgctgggctgtgcccggcggcagcagcaagcgtggccctcatgtcaccatggtcttcccggatgctggcaccttctccatccggctcaatgcctccaacgcagtcagctgggtctcagccacgtacaacctcacggcggaggagcccatcgtgggcctggtgctgtgggccagcagcaaggtggtggcgcccgggcagctggtccattttcagatcctgctggctgccggctcagctgtcaccttccgcctgcaggtcggcggggccaaccccgaggtgctccccgggccccgtttctcccacagcttcccccgcgtcggagaccacgtggtgagcgtgcggggcaaaaaccacgtgagctgggcccaggcgcaggtgcgcatcgtggtgctggaggccgtgagtgggctgcagatgcccaactgctgcgagcctggcatcgccacgggcactgagaggaacttcacagcccgcgtgcagcgcggctctcgggtcgcctacgcctggtacttctcgctgcagaaggtccagggcgactcgctggtcatcctgtcgggccgcgacgtcacctacacgcccgtggccgcggggctgttggagatccaggtgcgcgccttcaacgccctgggcagtgagaaccgcacgctggtgctggaggttcaggacgccgtccagtatgtggccctgcagagcggcccctgcttcaccaaccgctcggcgcagtttgaggccgccaccagccccagcccccggcgtgtggcctaccactgggactttggggatgggtcgccagggcaggacacagatgagcccagggccgagcactcctacctgaggcctggggactaccgcgtgcaggtgaacgcctccaacctggtgagcttcttcgtggcgcaggccacggtgaccgtccaggtgctggcctgccgggagccggaggtggacgtggtcctgcccctgcaggtgctgatgcggcgatcacagcgcaactacttggaggcccacgttgacctgcgcgactgcgtcacctaccagactgagtaccgctgggaggtgtatcgcaccgccagctgccagcggccggggcgcccagcgcgtgtggccctgcccggcgtggacgtgagccggcctcggctggtgctgccgcggctggcgctgcctgtggggcactactgctttgtgtttgtcgtgtcatttggggacacgccactgacacagagcatccaggccaatgtgacggtggcccccgagcgcctggtgcccatcattgagggtggctcataccgcgtgtggtcagacacacgggacctggtgctggatgggagcgagtcctacgaccccaacctggaggacggcgaccagacgccgctcagtttccactgggcctgtgtggcttcgacacagagggaggctggcgggtgtgcgctgaactttgggccccgcgggagcagcacggtcaccattccacgggagcggctggcggctggcgtggagtacaccttcagcctgaccgtgtggaaggccggccgcaaggaggaggccaccaaccagacggtgctgatccggagtggccgggtgcccattgtgtccttggagtgtgtgtcctgcaaggcacaggccgtgtacgaagtgagccgcagctcctacgtgtacttggagggccgctgcctcaattgcagcagcggctccaagcgagggcggtgggctgcacgtacgttcagcaacaagacgctggtgctggatgagaccaccacatccacgggcagtgcaggcatgcgactggtgctgcggcggggcgtgctgcgggacggcgagggatacaccttcacgctcacggtgctgggccgctctggcgaggaggagggctgcgcctccatccgcctgtcccccaaccgcccgccgctggggggctcttgccgcctcttcccactgggcgctgtgcacgccctcaccaccaaggtgcacttcgaatgcacggcgctggtgtacgccctgctgctgcggcgctgtcgccagggccactgcgaggagttctgtgtctacaagggcagcctctccagctacggagccgtgctgcccccgggtttcaggccacacttcgaggtgggcctggccgtggtggtgcaggaccagctgggagccgctgtggtcgccctcaacaggtctttggccatcaccctcccagagcccaacggcagcgcaacggggctcacagtctggctgcacgggctcaccgctagtgtgctcccagggctgctgcggcaggccgatccccagcacgtcatcgagtactcgttggccctggtcaccgtgctgaacgagtacgagcgggccctggacgtggcggcagagcccaagcacgagcggcagcaccgagcccagatacgcaagaacatcacggagactctggtgtccctgagggtccacactgtggatgacatccagcagatcgctgctgcgctggcccagtgcatggggcccagcagggagctcgtatgccgctcgtgcctgaagcagacgctgcacaagctggaggccatgatgctcatcctgcaggcagagaccaccgcgggcaccgtgacgcccaccgccatcggagacagcatcctcaacatcacaggagacctcatccacctggccagctcggacgtgcgggcaccacagccctcagagctgggagccgagtcaccatctcggatggtggcgtcccaggcctacaacctgacctctgccctcatgcgcatcctcatgcgctcccgcgtgctcaacgaggagcccctgacgctggcgggcgaggagatcgtggcccagggcaagcgctcggacccgcggagcctgctgtgctatggcggcgccccagggcctggctgccacttctccatccccgaggctttcagcggggccctggccaacctcagtgacgtggtgcagctcatctttctggtggactccaatccctttccctttggctatatcagcaactacaccgtctccaccaaggtggcctcgatggcattccagacacaggccggcgcccagatccccatcgagcggctggcctcagagcgcgccatcaccgtgaaggtgcccaacaactcggactgggctgcccggggccaccgcagctccgccaactccgccaactccgttgtggtccagccccaggcctccgtcggtgctgtggtcaccctggacagcagcaaccctgcggccgggctgcatctgcagctcaactatacgctgctggacggccactacctgtctgaggaacctgagccctacctggcagtctacctacactcggagccccggcccaatgagcacaactgctcggctagcaggaggatccgcccagagtcactccagggtgctgaccaccggccctacaccttcttcatttccccggggagcagagacccagcggggagttaccatctgaacctctccagccacttccgctggtcggcgctgcaggtgtccgtgggcctgtacacgtccctgtgccagtacttcagcgaggaggacatggtgtggcggacagaggggctgctgcccctggaggagacctcgccccgccaggccgtctgcctcacccgccacctcaccgccttcggcgccagcctcttcgtgcccccaagccatgtccgctttgtgtttcctgagccgacagcggatgtaaactacatcgtcatgctgacatgtgctgtgtgcctggtgacctacatggtcatggccgccatcctgcacaagctggaccagttggatgccagccggggccgcgccatccctttctgtgggcagcggggccgcttcaagtacgagatcctcgtcaagacaggctggggccggggctcaggtaccacggcccacgtgggcatcatgctgtatggggtggacagccggagcggccaccggcacctggacggcgacagagccttccaccgcaacagcctggacatcttccggatcgccaccccgcacagcctgggtagcgtgtggaagatccgagtgtggcacgacaacaaagggctcagccctgcctggttcctgcagcacgtcatcgtcagggacctgcagacggcacgcagcgccttcttcctggtcaatgactggctttcggtggagacggaggccaacgggggcctggtggagaaggaggtgctggccgcgagcgacgcagcccttttgcgcttccggcgcctgctggtggctgagctgcagcgtggcttctttgacaagcacatctggctctccatatgggaccggccgcctcgtagccgtttcactcgcatccagagggccacctgctgcgttctcctcatctgcctcttcctgggcgccaacgccgtgtggtacggggctgttggcgactctgcctacagcacggggcatgtgtccaggctgagcccgctgagcgtcgacacagtcgctgttggcctggtgtccagcgtggttgtctatcccgtctacctggccatcctttttctcttccggatgtcccggagcaaggtggctgggagcccgagccccacacctgccgggcagcaggtgctggacatcgacagctgcctggactcgtccgtgctggacagctccttcctcacgttctcaggcctccacgctgaggcctttgttggacagatgaagagtgacttgtttctggatgattctaagagtctggtgtgctggccctccggcgagggaacgctcagttggccggacctgctcagtgacccgtccattgtgggtagcaatctgcggcagctggcacggggccaggcgggccatgggctgggcccagaggaggacggcttctccctggccagcccctactcgcctgccaaatccttctcagcatcagatgaagacctgatccagcaggtccttgccgagggggtcagcagcccagcccctacccaagacacccacatggaaacggacctgctcagcagcctgtccagcactcctggggagaagacagagacgctggcgctgcagaggctgggggagctggggccacccagcccaggcctgaactgggaacagccccaggcagcgaggctgtccaggacaggactggtggagggtctgcggaagcgcctgctgccggcctggtgtgcctccctggcccacgggctcagcctgctcctggtggctgtggctgtggctgtctcagggtgggtgggtgcgagcttccccccgggcgtgagtgttgcgtggctcctgtccagcagcgccagcttcctggcctcattcctcggctgggagccactgaaggtcttgctggaagccctgtacttctcactggtggccaagcggctgcacccggatgaagatgacaccctggtagagagcccggctgtgacgcctgtgagcgcacgtgtgccccgcgtacggccaccccacggctttgcactcttcctggccaaggaagaagcccgcaaggtcaagaggctacatggcatgctgcggagcctcctggtgtacatgctttttctgctggtgaccctgctggccagctatggggatgcctcatgccatgggcacgcctaccgtctgcaaagcgccatcaagcaggagctgcacagccgggccttcctggccatcacgcggtctgaggagctctggccatggatggcccacgtgctgctgccctacgtccacgggaaccagtccagcccagagctggggcccccacggctgcggcaggtgcggctgcaggaagcactctacccagaccctcccggccccagggtccacacgtgctcggccgcaggaggcttcagcaccagcgattacgacgttggctgggagagtcctcacaatggctcggggacgtgggcctattcagcgccggatctgctgggggcatggtcctggggctcctgtgccgtgtatgacagcgggggctacgtgcaggagctgggcctgagcctggaggagagccgcgaccggctgcgcttcctgcagctgcacaactggctggacaacaggagccgcgctgtgttcctggagctcacgcgctacagcccggccgtggggctgcacgccgccgtcacgctgcgcctcgagttcccggcggccggccgcgccctggccgccctcagcgtccgcccctttgcgctgcgccgcctcagcgcgggcctctcgctgcctctgctcacctcggtgtgcctgctgctgttcgccgtgcacttcgccgtggccgaggcccgtacttggcacagggaagggcgctggcgcgtgctgcggctcggagcctgggcgcggtggctgctggtggcgctgacggcggccacggcactggtacgcctcgcccagctgggtgccgctgaccgccagtggacccgtttcgtgcgcggccgcccgcgccgcttcactagcttcgaccaggtggcgcagctgagctccgcagcccgtggcctggcggcctcgctgctcttcctgcttttggtcaaggctgcccagcagctacgcttcgtgcgccagtggtccgtctttggcaagacattatgccgagctctgccagagctcctgggggtcaccttgggcctggtggtgctcggggtagcctacgcccagctggccatcctgctcgtgtcttcctgtgtggactccctctggagcgtggcccaggccctgttggtgctgtgccctgggactgggctctctaccctgtgtcctgccgagtcctggcacctgtcacccctgctgtgtgtggggctctgggcactgcggctgtggggcgccctacggctgggggctgttattctccgctggcgctaccacgccttgcgtggagagctgtaccggccggcctgggagccccaggactacgagatggtggagttgttcctgcgcaggctgcgcctctggatgggcctcagcaaggtcaaggagttccgccacaaagtccgctttgaagggatggagccgctgccctctcgctcctccaggggctccaaggtatccccggatgtgcccccacccagcgctggctccgatgcctcgcacccctccacctcctccagccagctggatgggctgagcgtgagcctgggccggctggggacaaggtgtgagcctgagccctcccgcctccaagccgtgttcgaggccctgctcacccagtttgaccgactcaaccaggccacagaggacgtctaccagctggagcagcagctgcacagcctgcaaggccgcaggagcagccgggcgcccgccggatcttcccgtggcccatccccgggcctgcggccagcactgcccagccgccttgcccgggccagtcggggtgtggacctggccactggccccagcaggacaccccttcgggccaagaacaaggtccaccccagcagcacttag

SEQ ID NO: 131211 - DNA, 1302 bp, Homo sapiens
ctaacctcctttttccagtccggagtgagcgggggccccatcgccccacccccctttcctggctctggttacggccttgcgagttgaacaaacttgctgcaggcggattggcggctgggagctctcgggctggggcgttgtatttattaatttatattccgcggcgccccgcgcgggcggctcctttgtgtccagccgccgccaccggagctcccggggcctccgcggggagcgcgtcccccgcatccgcccgacccccggggctggcacgtgctgcgcccggtccgctgagggggcggaggccccgatctccccgaacccccttctgtgtgtgttgggggtgagcttattattgtcatcatcaacattattttgctgaaccatttgagagctttcaagtttgttgcagacattgtggtattttatgcttaaccattcgtgtgcatttcccctgcttgtctgcaaatccctttcatttttctcagcttcatcttggacccaggcctggtaaagcctgccactcagttggcctccaaatatacaactctcaagcccactcccatccaagccagcaggaaagacagctcttctgttaggggtgcccttgaagcaggcacttttaattcttacagttgtcagggctctatgggtgccaaagagctgaaacccgggctgggaaattcccttgctccgggacatccggaagagaaagaggatggccaggtagacgggatagacaaccacgctggacaccaggccaacagcgactgtgtcgacgctcagcgggttcagcctggacacacgccccgtgctgtaggcagagtctccaacagccccgtaccacacggcgttggcgcccaggaagagacagatgaggagaacgcagcaggtggccctctggatgcgagtgaaacagtcgcggcgcagcacctccttctccaccaggcccccgttggcctccgtctccaccgaaagccagtcattgaccaggaagaaggtgctgcgtgccgtctgcaggtccctgacgatgatgtgctgcaggaaccaggcagggctgagccctttgttgtcgtgccacactcggatcttccacacgctacccaggctgtgcggggtggcgatctggaagatgtccagactgttgcggtggaaggctctgtcgccgtccaggtgccggtggccgctccggctgtccaccccatacagcatgatgcccacgtgggccgtggtacatctcacccgggcaggcgcgaacaaggggccccgcaagaacacctcgccaaacaaaagggcactgtccat

SEQ ID NO: 131212 - DNA, 513 bp, Homo sapiens
tttttttttgttttatataatttattcttatttgtgattacaagtatacctctacagaaagttagtatactcacacaaaggcaacttgttgcagaagagaatgttaaatgttgtaccgtcctcagaaccccaataatgataattatcaaattatccaatttttgtggagatggggttttgccatgttggcccagggtggtctcgaactcctacaccaaagtcagtctcacgatgacgatagacagccagactattgataaccttcctcaggtactcgcatgggcatgtcactgactttacatgctgctgcagctccttggtgagctggctctggtcatgcgacaggaactgtggggtcaggacaatagagagcttcaccatttgcagaatgagaacagcggctcatcatgagtgccaacctcagttttcttctgtgtgaaacaggaacaatagtttcattcgtcattcagtttctctcaaggtttcacgagatcatacgttacagtcaggggg

SEQ ID NO: 131213 - DNA, 4066 bp, Homo sapiens
gagcagagacccagcggggagttaccatctgaacctctccagccacttccgctggtcggcgctgcaggtgtccgtgggcctgtacacgtccctgtgccagtacttcagcgaggaggacatggtgtggcggacagaggggctgctgcccctggaggagacctcgccccgccaggccgtctgcctcacccgccacctcaccgccttcggcgccagcctcttcgtgcccccaagccatgtccgctttgtgtttcctgagccgacagcggatgtaaactacatcgtcatgctgacatgtgctgtgtgcctggtgacctacatggtcatggccgccatcctgcacaagctggaccagttggatgccagccggggccgcgccatccctttctgtgggcagcggggccgcttcaagtacgagatcctcgtcaagacaggctggggccggggctcaggtaccacggcccacgtgggcatcatgctgtatggggtggacagccggagcggccaccggcacctggacggcgacagagccttccaccgcaacagcctggacatcttccggatcgccaccccgcacagcctgggtagcgtgtggaagatccgagtgtggcacgacaacaaagggctcagccctgcctggttcctgcagcacgtcatcgtcagggacctgcagacggcacgcagcgccttcttcctggtcaatgactggctttcggtggagacggaggccaacgggggcctggtggagaaggaggtgctggccgcgagcgacgcagcccttttgcgcttccggcgcctgctggtggctgagctgcagcgtggcttctttgacaagcacatctggctctccatatgggaccggccgcctcgtagccgtttcactcgcatccagagggccacctgctgcgttctcctcatctgcctcttcctgggcgccaacgccgtgtggtacggggctgttggcgactctgcctacagcacggggcatgtgtccaggctgagcccgctgagcgtcgacacagtcgctgttggcctggtgtccagcgtggttgtctatcccgtctacctggccatcctttttctcttccggatgtcccggagcaaggtggctgggagcccgagccccacacctgccgggcagcaggtgctggacatcgacagctgcctggactcgtccgtgctggacagctccttcctcacgttctcaggcctccacgctgaggtgaggactctactgggggtcctgggctgggctgggggtcctgccgccttggcgcagcttggactcaagacactgtgcacctctcagcaggcctttgttggacagatgaagagtgacttgtttctggatgattctaagagtctggtgtgctggccctccggcgagggaacgctcagttggccggacctgctcagtgacccgtccattgtgggtagcaatctgcggcagctggcacggggccaggcgggccatgggctgggcccagaggaggacggcttctccctggccagcccctactcgcctgccaaatccttctcagcatcagatgaagacctgatccagcaggtccttgccgagggggtcagcagcccagcccctacccaagacacccacatggaaacggacctgctcagcagcctgtccagcactcctggggagaagacagagacgctggcgctgcagaggctgggggagctggggccacccagcccaggcctgaactgggaacagccccaggcagcgaggctgtccaggacaggactggtggagggtctgcggaagcgcctgctgccggcctggtgtgcctccctggcccacgggctcagcctgctcctggtggctgtggctgtggctgtctcagggtgggtcttgctggaagccctgtacttctcactggtggccaagcggctgcacccggatgaagatgacaccctggtagagagcccggctgtgacgcctgtgagcgcacgtgtgccccgcgtacggccaccccacggctttgcactcttcctggccaaggaagaagcccgcaaggtcaagaggctacatggcatgctgcggagcctcctggtgtacatgctttttctgctggtgaccctgctggccagctatggggatgcctcatgccatgggcacgcctaccgtctgcaaagcgccatcaagcaggagctgcacagccgggccttcctggccatcacgcggtacgggcatccggtgcactggtctgaggagctctggccatggatggcccacgtgctgctgccctacgtccacgggaaccagtccagcccagagctggggcccccacggctgcggcaggtgcggctgcaggaagcactctacccagaccctcccggccccagggtccacacgtgctcggccgcaggaggcttcagcaccagcgattacgacgttggctgggagagtcctcacaatggctcggggacgtgggcctattcagcgccggatctgctgggggcatggtcctggggctcctgtgccgtgtatgacagcgggggctacgtgcaggagctgggcctgagcctggaggagagccgcgaccggctgcgcttcctgcagctgcacaactggctggacaacaggagccgcgctgtgttcctggagctcacgcgctacagcccggccgtggggctgcacgccgccgtcacgctgcgcctcgagttcccggcggccggccgcgccctggccgccctcagcgtccgcccctttgcgctgcgccgcctcagcgcgggcctctcgctgcctctgctcacctcggtgtgcctgctgctgttcgccgtgcacttcgccgtggccgaggcccgtacttggcacagggaagggcgctggcgcgtgctgcggctcggagcctgggcgcggtggctgctggtggcgctgacggcggccacggcactggtacgcctcgcccagctgggtgccgctgaccgccagtggacccgtttcgtgcgcggccgcccgcgccgcttcactagcttcgaccaggtggcgcagctgagctccgcagcccgtggcctggcggcctcgctgctcttcctgcttttggtcaaggctgcccagcagctacgcttcgtgcgccagtggtccgtctttggcaagacattatgccgagctctgccagagctcctgggggtcaccttgggcctggtggtgctcggggtagcctacgcccagctggccatcctgctcgtgtcttcctgtgtggactccctctggagcgtggcccaggccctgttggtgctgtgccctgggactgggctctctaccctgtgtcctgccgagtcctggcacctgtcacccctgctgtgtgtggggctctgggcactgcggctgtggggcgccctacggctgggggctgttattctccgctggcgctaccacgccttgcgtggagagctgtaccggccggcctgggagccccaggactacgagatggtggagttgttcctgcgcaggctgcgcctctggatgggcctcagcaaggtcaaggaggtgggtacggcccagtgggggggagagggacacgccctgggctctgcccagggtgcagccggactgactgagcccctgtgccgcccccagttccgccacaaagtccgctttgaagggatggagccgctgccctctcgctcctccaggggctccaaggtatccccggatgtgcccccacccagcgctggctccgatgcctcgcacccctccacctcctccagccagctggatgggctgagcgtgagcctgggccggctggggacaaggtgtgagcctgagccctcccgcctccaagccgtgttcgaggccctgctcacccagtttgaccgactcaaccaggccacagaggacgtctaccagctggagcagcagctgcacagcctgcaaggccgcaggagcagccgggcgcccgccggatcttcccgtggcccatccccgggcctgcggccagcactgcccagccgccttgcccgggccagtcggggtgtggacctggccactggccccagcaggacaccccttcgggccaagaacaaggtccaccccagcagcacttag

SEQ ID NO: 131214 - DNA, 771 bp, Homo sapiens
  misc_feature (1)...(771): n = a,t,c or g
actcacatccagagggccacctgctgcgttctcctcatctgtctcttcctgggcgccaacgccgtgtggtacggggctgttggagactctgcctacagcacggggcgtgtgtccaggctgaacccgctgagcgtcgacacagtcgctgttggcctggtgtccagcgtggttgtctatcccgtctacctggccatcctctttctcttccggatgtcccggagcaaggtggctgggagcccgagccccacacctgccgggcagcaggtgctggacgtcgacagctgcctggactcaacccgtgctggacagctccttcctcacgttctgaggcctccacgctgaggtgagggctctactgggggtcctgccgccttggcgcagcttggactcaagaccctgtgcacctctcagcaggcctttgctggacagatgaagagtgacttgtttctggatgattctaagagtgaccttgaggaaccctgggagctcaggaaggaaggagcgcccagaagcagggacagggagctggttggggaggaccagaaatcaggttatcaatactctggctgaccatcgtcatcgtgggactgactttggtggaagtccttggttacttatcattactgtgtttctgagaagttataaatttgccatctccctctgcacaagttacctttgtgtgagtatactaactttctgtagaggtatacttgtaatcacaaataagaataaattatatgnacaaaaaaaaaaaaaaaaaattccgccgaa

SEQ ID NO: 131215 - DNA, 14169 bp, Homo sapiens
gcactgcagcgccagcgtccgagcgggcggccgagctcccggagcggcctggccccgagccccgagcgggcgtcgctcagcagcaggtcgcggccgcgcagccccatccagccccgcgcccgccatgccgtccgcgggccccgcctgagctgcggtctccgcgcgcgggcgggcctggggacggcggggccatgcgcgcgctgccctaacgatgccgcccgccgcgcccgcccgcctggcgctggccctgggcctgggcctgtggctcggggcgctggcggggggccccgggcgcggctgcgggccctgcgagcccccctgcctctgcggcccagcgcccggcgccgcctgccgcgtcaactgctcgggccgcgggctgcggacgctcggtcccgcgctgcgcatccccgcggacgccacagcgctagacgtctcccacaacctgctccgggcgctggacgttgggctcctggcgaacctctcggcgctggcagagctggatataagcaacaacaagatttctacgttagaagaaggaatatttgctaatttatttaatttaagtgaaataaacctgagtgggaacccgtttgagtgtgactgtggcctggcgtggctgccgcgatgggcggaggagcagcaggtgcgggtggtgcagcccgaggcagccacgtgtgctgggcctggctccctggctggccagcctctgcttggcatccccttgctggacagtggctgtggtgaggagtatgtcgcctgcctccctgacaacagctcaggcaccgtggcagcagtgtccttttcagctgcccacgaaggcctgcttcagccagaggcctgcagcgccttctgcttctccaccggccagggcctcgcagccctctcggagcagggctggtgcctgtgtggggcggcccagccctccagtgcctcctttgcctgcctgtccctctgctccggccccccgccacctcctgcccccacctgtaggggccccaccctcctccagcacgtcttccctgcctccccaggggccaccctggtggggccccacggacctctggcctctggccagctagcagccttccacatcgctgccccgctccctgtcactgccacacgctgggacttcggagacggctccgccgaggtggatgccgctgggccggctgcctcgcatcgctatgtgctgcctgggcgctatcacgtgacggccgtgctggccctgggggccggctcagccctgctggggacagacgtgcaggtggaagcggcacctgccgccctggagctcgtgtgcccgtcctcggtgcagagtgacgagagccttgacctcagcatccagaaccgcggtggttcaggcctggaggccgcctacagcatcgtggccctgggcgaggagccggcccgagcggtgcacccgctctgcccctcggacacggagatcttccctggcaacgggcactgctaccgcctggtggtggagaaggcggcctggctgcaggcgcaggagcagtgtcaggcctgggccggggccgccctggcaatggtggacagtcccgccgtgcagcgcttcctggtctcccgggtcaccaggagcctagacgtgtggatcggcttctcgactgtgcagggggtggaggtgggcccagcgccgcagggcgaggccttcagcctggagagctgccagaactggctgcccggggagccacacccagccacagccgagcactgcgtccggctcgggcccaccgggtggtgtaacaccgacctgtgctcagcgccgcacagctacgtctgcgagctgcagcccggaggcccagtgcaggatgccgagaacctcctcgtgggagcgcccagtggggacctgcagggacccctgacgcctctggcacagcaggacggcctctcagccccgcacgagcccgtggaggtcatggtattcccgggcctgcgtctgagccgtgaagccttcctcaccacggccgaatttgggacccaggagctccggcggcccgcccagctgcggctgcaggtgtaccggctcctcagcacagcagggaccccggagaacggcagcgagcctgagagcaggtccccggacaacaggacccagctggcccccgcgtgcatgccagggggacgctggtgccctggagccaacatctgcttgccgctggacgcctcttgccacccccaggcctgcgccaatggctgcacgtcagggccagggctacccggggccccctatgcgctatggagagagttcctcttctccgttgccgcggggccccccgcgcagtactcggtcaccctccacggccaggatgtcctcatgctccctggtgacctcgttggcttgcagcacgacgctggccctggcgccctcctgcactgctcgccggctcccggccaccctggtccccaggccccgtacctctccgccaacgcctcgtcatggctgccccacttgccagcccagctggagggcacttgggcctgccctgcctgtgccctgcggctgcttgcagccacggaacagctcaccgtgctgctgggcttgaggcccaaccctggactgcggatgcctgggcgctatgaggtccgggcagaggtgggcaatggcgtgtccaggcacaacctctcctgcagctttgacgtggtctccccagtggctgggctgcgggtcatctaccctgccccccgcgacggccgcctctacgtgcccaccaacggctcagccttggtgctccaggtggactctggtgccaacgccacggccacggctcgctggcctgggggcagtgtcagcgcccgctttgagaatgtctgccctgccctggtggccaccttcgtgcccggctgcccctgggagaccaacgataccctgttctcagtggtagcactgccgtggctcagtgagggggagcacgtggtggacgtggtggtggaaaacagcgccagccgggccaacctcagcctgcgggtgacggcggaggagcccatctgtggcctccgcgccacgcccagccccgaggcccgtgtactgcagggagtcctagtgaggtacagccccgtggtggaggccggctcggacatggtcttccggtggaccatcaacgacaagcagtccctgaccttccagaacgtggtcttcaatgtcatttatcagagcgcggcggtcttcaagctctcactgacggcctccaaccacgtgagcaacgtcaccgtgaactacaacgtaaccgtggagcggatgaacaggatgcagggtctgcaggtctccacagtgccggccgtgctgtcccccaatgccacgctagcactgacggcgggcgtgctggtggactcggccgtggaggtggccttcctgtggaactttggggatggggagcaggccctccaccagttccagcctccgtacaacgagtccttcccggttccagacccctcggtggcccaggtgctggtggagcacaatgtcatgcacacctacgctgccccaggtgagtacctcctgaccgtgctggcatctaatgccttcgagaacctgacgcagcaggtgcctgtgagcgtgcgcgcctccctgccctccgtggctgtgggtgtgagtgacggcgtcctggtggccggccggcccgtcaccttctacccgcacccgctgccctcgcctgggggtgttctttacacgtgggacttcggggacggctcccctgtcctgacccagagccagccggctgccaaccacacctatgcctcgaggggcacctaccacgtgcgcctggaggtcaacaacacggtgagcggtgcggcggcccaggcggatgtgcgcgtctttgaggagctccgcggactcagcgtggacatgagcctggccgtggagcagggcgcccccgtggtggtcagcgccgcggtgcagacgggcgacaacatcacgtggaccttcgacatgggggacggcaccgtgctgtcgggcccggaggcaacagtggagcatgtgtacctgcgggcacagaactgcacagtgaccgtgggtgcggccagccccgccggccacctggcccggagcctgcacgtgctggtcttcgtcctggaggtgctgcgcgttgaacccgccgcctgcatccccacgcagcctgacgcgcggctcacggcctacgtcaccgggaacccggcccactacctcttcgactggaccttcggggatggctcctccaacacgaccgtgcgggggtgcccgacggtgacacacaacttcacgcggagcggcacgttccccctggcgctggtgctgtccagccgcgtgaacagggcgcattacttcaccagcatctgcgtggagccagaggtgggcaacgtcaccctgcagccagagaggcagtttgtgcagctcggggacgaggcctggctggtggcatgtgcctggcccccgttcccctaccgctacacctgggactttggcaccgaggaagccgcccccacccgtgccaggggccctgaggtgacgttcatctaccgagacccaggctcctatcttgtgacagtcaccgcgtccaacaacatctctgctgccaatgactcagccctggtggaggtgcaggagcccgtgctggtcaccagcatcaaggtcaatggctcccttgggctggagctgcagcagccgtacctgttctctgctgtgggccgtgggcgccccgccagctacctgtgggatctgggggacggtgggtggctcgagggtccggaggtcacccacgcttacaacagcacaggtgacttcaccgttagggtggccggctggaatgaggtgagccgcagcgaggcctggctcaatgtgacggtgaagcggcgcgtgcgggggctcgtcgtcaatgcaagccgcacggtggtgcccctgaatgggagcgtgagcttcagcacgtcgctggaggccggcagtgatgtgcgctattcctgggtgctctgtgaccgctgcacgcccatccctgggggtcctaccatctcttacaccttccgctccgtgggcaccttcaatatcatcgtcacggctgagaacgaggtgggctccgcccaggacagcatcttcgtctatgtcctgcagctcatagaggggctgcaggtggtgggcggtggccgctacttccccaccaaccacacggtacagctgcaggccgtggttagggatggcaccaacgtctcctacagctggactgcctggagggacaggggcccggccctggccggcagcggcaaaggcttctcgctcaccgtgctcgaggccggcacctaccatgtgcagctgcgggccaccaacatgctgggcagcgcctgggccgactgcaccatggacttcgtggagcctgtggggtggctgatggtgaccgcctccccgaacccagctgccgtcaacacaagcgtcaccctcagtgccgagctggctggtggcagtggtgtcgtatacacttggtccttggaggaggggctgagctgggagacctccgagccatttaccacccatagcttccccacacccggcctgcacttggtcaccatgacggcagggaacccgctgggctcagccaacgccaccgtggaagtggatgtgcaggtgcctgtgagtggcctcagcatcagggccagcgagcccggaggcagcttcgtggcggccgggtcctctgtgcccttttgggggcagctggccacgggcaccaatgtgagctggtgctgggctgtgcccggcggcagcagcaagcgtggccctcatgtcaccatggtcttcccggatgctggcaccttctccatccggctcaatgcctccaacgcagtcagctgggtctcagccacgtacaacctcacggcggaggagcccatcgtgggcctggtgctgtgggccagcagcaaggtggtggcgcccgggcagctggtccattttcagatcctgctggctgccggctcagctgtcaccttccgcctgcaggtcggcggggccaaccccgaggtgctccccgggccccgtttctcccacagcttcccccgcgtcggagaccacgtggtgagcgtgcggggcaaaaaccacgtgagctgggcccaggcgcaggtgcgcatcgtggtgctggaggccgtgagtgggctgcagatgcccaactgctgcgagcctggcatcgccacgggcactgagaggaacttcacagcccgcgtgcagcgcggctctcgggtcgcctacgcctggtacttctcgctgcagaaggtccagggcgactcgctggtcatcctgtcgggccgcgacgtcacctacacgcccgtggccgcggggctgttggagatccaggtgcgcgccttcaacgccctgggcagtgagaaccgcacgctggtgctggaggttcaggacgccgtccagtatgtggccctgcagagcggcccctgcttcaccaaccgctcggcgcagtttgaggccgccaccagccccagcccccggcgtgtggcctaccactgggactttggggatgggtcgccagggcaggacacagatgagcccagggccgagcactcctacctgaggcctggggactaccgcgtgcaggtgaacgcctccaacctggtgagcttcttcgtggcgcaggccacggtgaccgtccaggtgctggcctgccgggagccggaggtggacgtggtcctgcccctgcaggtgctgatgcggcgatcacagcgcaactacttggaggcccacgttgacctgcgcgactgcgtcacctaccagactgagtaccgctgggaggtgtatcgcaccgccagctgccagcggccggggcgcccagcgcgtgtggccctgcccggcgtggacgtgagccggcctcggctggtgctgccgcggctggcgctgcctgtggggcactactgctttgtgtttgtcgtgtcatttggggacacgccactgacacagagcatccaggccaatgtgacggtggcccccgagcgcctggtgcccatcattgagggtggctcataccgcgtgtggtcagacacacgggacctggtgctggatgggagcgagtcctacgaccccaacctggaggacggcgaccagacgccgctcagtttccactgggcctgtgtggcttcgacacagagggaggctggcgggtgtgcgctgaactttgggccccgcgggagcagcacggtcaccattccacgggagcggctggcggctggcgtggagtacaccttcagcctgaccgtgtggaaggccggccgcaaggaggaggccaccaaccagacggtgctgatccggagtggccgggtgcccattgtgtccttggagtgtgtgtcctgcaaggcacaggccgtgtacgaagtgagccgcagctcctacgtgtacttggagggccgctgcctcaattgcagcagcggctccaagcgagggcggtgggctgcacgtacgttcagcaacaagacgctggtgctggatgagaccaccacatccacgggcagtgcaggcatgcgactggtgctgcggcggggcgtgctgcgggacggcgagggatacaccttcacgctcacggtgctgggccgctctggcgaggaggagggctgcgcctccatccgcctgtcccccaaccgcccgccgctggggggctcttgccgcctcttcccactgggcgctgtgcacgccctcaccaccaaggtgcacttcgaatgcacgggctggcatgacgcggaggatgctggcgccccgctggtgtacgccctgctgctgcggcgctgtcgccagggccactgcgaggagttctgtgtctacaagggcagcctctccagctacggagccgtgctgcccccgggtttcaggccacacttcgaggtgggcctggccgtggtggtgcaggaccagctgggagccgctgtggtcgccctcaacaggtctttggccatcaccctcccagagcccaacggcagcgcaacggggctcacagtctggctgcacgggctcaccgctagtgtgctcccagggctgctgcggcaggccgatccccagcacgtcatcgagtactcgttggccctggtcaccgtgctgaacgagtacgagcgggccctggacgtggcggcagagcccaagcacgagcggcagcaccgagcccagatacgcaagaacatcacggagactctggtgtccctgagggtccacactgtggatgacatccagcagatcgctgctgcgctggcccagtgcatggggcccagcagggagctcgtatgccgctcgtgcctgaagcagacgctgcacaagctggaggccatgatgctcatcctgcaggcagagaccaccgcgggcaccgtgacgcccaccgccatcggagacagcatcctcaacatcacaggagacctcatccacctggccagctcggacgtgcgggcaccacagccctcagagctgggagccgagtcaccatctcggatggtggcgtcccaggcctacaacctgacctctgccctcatgcgcatcctcatgcgctcccgcgtgctcaacgaggagcccctgacgctggcgggcgaggagatcgtggcccagggcaagcgctcggacccgcggagcctgctgtgctatggcggcgccccagggcctggctgccacttctccatccccgaggctttcagcggggccctggccaacctcagtgacgtggtgcagctcatctttctggtggactccaatccctttccctttggctatatcagcaactacaccgtctccaccaaggtggcctcgatggcattccagacacaggccggcgcccagatccccatcgagcggctggcctcagagcgcgccatcaccgtgaaggtgcccaacaactcggactgggctgcccggggccaccgcagctccgccaactccgccaactccgttgtggtccagccccaggcctccgtcggtgctgtggtcaccctggacagcagcaaccctgcggccgggctgcatctgcagctcaactatacgctgctggacggccactacctgtctgaggaacctgagccctacctggcagtctacctacactcggagccccggcccaatgagcacaactgctcggctagcaggaggatccgcccagagtcactccagggtgctgaccaccggccctacaccttcttcatttccccggggagcagagacccagcggggagttaccatctgaacctctccagccacttccgctggtcggcgctgcaggtgtccgtgggcctgtacacgtccctgtgccagtacttcagcgaggaggacatggtgtggcggacagaggggctgctgcccctggaggagacctcgccccgccaggccgtctgcctcacccgccacctcaccgccttcggcgccagcctcttcgtgcccccaagccatgtccgctttgtgtttcctgagccgacagcggatgtaaactacatcgtcatgctgacatgtgctgtgtgcctggtgacctacatggtcatggccgccatcctgcacaagctggaccagttggatgccagccggggccgcgccatccctttctgtgggcagcggggccgcttcaagtacgagatcctcgtcaagacaggctggggccggggctcaggtaccacggcccacgtgggcatcatgctgtatggggtggacagccggagcggccaccggcacctggacggcgacagagccttccaccgcaacagcctggacatcttccggatcgccaccccgcacagcctgggtagcgtgtggaagatccgagtgtggcacgacaacaaagggctcagccctgcctggttcctgcagcacgtcatcgtcagggacctgcagacggcacgcagcgccttcttcctggtcaatgactggctttcggtggagacggaggccaacgggggcctggtggagaaggaggtgctggccgcgagtaaggcctcgttccgtgttcccactccgtcacgcagccctgttgcgcttccggcgcctgctggtggctgagctgcagcgtggcttctttgacaagcacatctggctctccatatgggaccggccgcctcgtagccgtttcactacgcatccagagagccacctgctgcgttctcctcatctgtctcttcctgggcgccaacgccgtgtggtacggggctgttggagactctgcctacagcacggggcgtgtgtccaggctgaacccgctgagcgtcgacacagtcgctgttggcctggtgtccagcgtggttgtctatcccgtctacctggccatcctctttctcttccggatgtcccggagcaaggtgggctgggagcccgagccccacacctgccgggcagcaggtgctggacgttgacagctgcctggactcatccgtgctggacagctccttcctcacgttctcaggcctccacgctgagcaggcctttgttggacagatgaagagtgacttgtttctggatgattctaagagtctggtgtgctggccctccggcgagggaacgctcagttggccggacctgctcagtgacccgtccattgtgggtagcaatctgcggcagctggcacggggccaggcgggccatgggctgtgcccagaggaggacggcttcttcctggccagcccctactcgcctgccaaatccttctcagcatcagatgaagacctgatccagcaggtccttgccgagggggtcagcagcccagcccctacccaagacacccacatggaaacggacctgctcagcagcctgtccagcactcctggggagaagacagagacgctggcgctgcagaggctgggggagctggggccacccagcccaggcctgaactgggaacagccccaggcagcgaggctgtccaggacaggactggtggagggtctgcggaagcgcctgctgccggcctggtgtgcctccctggcccacgggctcagcctgctcctggtggctgtggctgtggctgtctcagggtgggtgggtgcgagcttccccccgggcgtgagtgttgcgtggctcctgtccagcagcgccagcttcctggcctcattcctcggctgggagccactgaaggtcttgctggaagccctgtacttctcactggtggccaagcggctgcacccggatgaagatgacaccctggtagagagcccggctgtgacgcctgtgagcgcacgtgtgccccgcgtacggccaccccacggctttgcactcttcctggccaaggaagaagcccgcaaggtcaagaggctacatggcatgctgcggagcctcctggtgtacatgctttttctgctggtgaccctgctggccagctatggggatgcctcatgccatgggcacgcctaccgtctgcaaagcgccatcaagcaggagctgcacagccgggccttcctggccatcacgcggtctgaggagctctggccatggatggcccacgtgctgctgccctacgtccacgggaaccagtccagcccagagctggggcccccacggctgcggcaggtgcggctgcaggaagcactctacccagaccctcccggccccagggtccacacgtgctcggccgcaggaggcttcagcaccagcgattacgacgttggctgggagagtcctcacaatggctcggggacgtgggcctattcagcgccggatctgctgggggcatggtcctggggctcctgtgccgtgtatgacagcgggggctacgtgcaggagctgggcctgagcctggaggagagccgcgaccggctgcgcttcctgcagctgcacaactggctggacaacaggagccgcgctgtgttcctggagctcacgcgctacagcccggccgtggggctgcacgccgccgtcacgctgcgcctcgagttcccggcggccggccgcgccctggccgccctcagcgtccgcccctttgcgctgcgccgcctcagcgcgggcctctcgctgcctctgctcacctcggtgtgcctgctgctgttcgccgtgcacttcgccgtggccgaggcccgtacttggcacagggaagggcgctggcgcgtgctgcggctcggagcctgggcgcggtggctgctggtggcgctgacggcggccacggcactggtacgcctcgcccagctgggtgccgctgaccgccagtggacccgtttcgtgcgcggccgcccgcgccgcttcactagcttcgaccaggtggcgcagctgagctccgcagcccgtggcctggcggcctcgctgctcttcctgcttttggtcaaggctgcccagcagctacgcttcgtgcgccagtggtccgtctttggcaagacattatgccgagctctgccagagctcctgggggtcaccttgggcctggtggtgctcggggtagcctacgcccagctggccatcctgctcgtgtcttcctgtgtggactccctctggagcgtggcccaggccctgttggtgctgtgccctgggactgggctctctaccctgtgtcctgccgagtcctggcacctgtcacccctgctgtgtgtggggctctgggcactgcggctgtggggcgccctacggctgggggctgttattctccgctggcgctaccacgccttgcgtggagagctgtaccggccggcctgggagccccaggactacgagatggtggagttgttcctgcgcaggctgcgcctctggatgggcctcagcaaggtcaaggagttccgccacaaagtccgctttgaagggatggagccgctgccctctcgctcctccaggggctccaaggtatccccggatgtgcccccacccagcgctggctccgatgcctcgcacccctccacctcctccagccagctggatgggctgagcgtgagcctgggccggctggggacaaggtgtgagcctgagccctcccgcctccaagccgtgttcgaggccctgctcacccagtttgaccgactcaaccaggccacagaggacgtctaccagctggagcagcagctgcacagcctgcaaggccgcaggagcagccgggcgcccgccggatcttcccgtggcccatccccgggcctgcggccagcactgcccagccgccttgcccgggccagtcggggtgtggacctggccactggccccagcaggacaccccttcgggccaagaacaaggtccaccccagcagcacttagtcctccttcctggcgggggtgggccgtggagtcggagtggacaccgctcagtattactttctgccgctgtcaaggccgagggccaggcagaatggctgcacgtaggttccccagagagcaggcaggggcatctgtctgtctgtgggcttcagcactttaaagaggctgtgtggccaaccaggacccagggtcccctccccagctcccttgggaaggacacagcagtattggacggtttctagcctctgagatgctaatttatttccccgagtcctcaggtacagcgggctgtgcccggccccaccccctgggcagatgtcccccactgctaaggctgctggcttcagggagggttagcctgcaccgccgccaccctgcccctaagttattacctctccagttcctaccgtactccctgcaccgtctcactgtgtgtctcgtgtcagtaatttatatggtgttaaaatgtgtatatttttgtatgtcactattttcactagggctgaggggcctgcgcccagagctggcctcccccaacacctgctgcgcttggtaggtgtggtggcgttatggcagcccggctgctgcttggatgcgagcttggccttgggccggtgctgggggcacagctgtctgccaggcactctcatcaccccagaggccttgtcatcctcccttgccccaggccaggtagcaagagagcagcgcccaggcctgctggcatcaggtctgggcaagtagcaggactaggcatgtcagaggaccccagggtggttagaggaaaagactcctcctgggggctggctcccagggtggaggaaggtgactgtgtgtgtgtgtgtgtgcgcgcgcgacgcgcgagtgtgctgtatggcccaggcagcctcaaggccctcggagctggctgtgcctgcttctgtgtaccacttctgtgggcatggccgcttctagagcctcgacacccccccaacccccgcaccaagcagacaaagtcaataaaagagctgtctgactgc

SEQ ID NO: 131216 - DNA, 1357 bp, Homo sapiens
gaaagaatccaaaatgaaacaagattgccatgttatgatcttatcattgagttgaaaggcaatcttgtttcattttggattctttcttatgtttatgtcttataagggcactttgaatttccaagcaaataataattttgaattagcttttaatcattgacttctagcacagttacatgatcagaaacatgctgtgtgatttgattgctctcaaatatattgagatttgctggaacaaaataagtcaggttaatttttgtaaatgtaccatgcatgcttaaaatgaatgtatcctacatttgttccccaagatacaggttgatggacggatggcctacatggatgtgatggagatggtttactatccgggaccttcccgcatcctgcctgatgttttgttgccttaggatatgaaatggctgagcggaggctgtaaaacctgggcactctgcttgggtatgaggttcttcctgccatcctgccatcatttgttttttatgttttgtcgccaaaagtgacccttgaaggaaccctggggagctcaggaaggaaggagcgcccagaagccagggacagggaagctggtttggggaggaccagaaatcaggtttgtgaaggttccaagagaagaccttgtctttgggaggaatttgggagacttagatgggggaggggtcattggaatgattcgggcgctacttggcattgtccattgtgaggcactgtccattgtgaggcaccaccggggtcatcagggattggtggagagggagtataaagccccagggttggtaagggagggcccagaccgaagaaggtttggtggatagcagaacctttttgtctccctctgattgctcctaagcctcacgctcccttgccccgcgtgtcctgttgcttccctgatcttctccgtgacctgtagctaaaccttccaccagcgcttgagaacttaatttgaaccggatcctttcccagacccctttcttcttctcctcctcctcctccacctcctccagggcgccctgaaaggaccaggacatgcggctgcgcttttggctcctcatttggctcctgctgggatttatcagccatcagcccacccctgttatcaatagtctggctgtctatcgtcatcgtgagactgactttggtgcaggagttcgagaccaccctggccaacatggcaaaaccccatctcccacgaaaaattggataatttgataattatcattattgggtttctgagacgttacacatttaacgttctcttctgcacaagttgcctttgtgtgagtatactaactttctgtagaggtatacttgtaatcacaaataagaataaattatataaaac

SEQ ID NO: 131217 - DNA, 2764 bp, Homo sapiens
gaggcagtactcacagtcccagcagaaccccatccacagacacttacagcagccagtccacagccaccagcaggctgatgtcctctgttggcaggcccacggctgtcagaatgaggagcatggtgaccagcccggcactggggatactggccgcgccgacgcttgccagggtggctgtgaggctatgagaacagagaagttcagatgccatttgtacaaagctgtcatatcaaaatgtcatatcaaaatatccaagagtactttggaaatatggattcccaagttgtttttgtgggtgccaaaagttatctgcctcttcacccggaggatctacaaacagcacacagtgactaagtccctgggctttcaagtgcagagggatactacagactgcatggatgggcaaaatggcgcctttggttatcctcggtggagggctggtgttttcaaagctgtccttcctactgctgcagcttctttgactgttttatctggaagatctcatgttctgaaccccaagtccaggcaactcctagtagtacaacggaagaaacagctacccagaaggaacagtggtttggcaacagatggcatgagggatatcgccaaacacccaaagaagactcccattcgacaacagggacagctggtaatggatggtttaacaaataggaatgatgtcacaggtggaagaagagacccaaatcattctgaaggctcaactactttactggaaggttatacctctcattacccacacacgaaggaaagcaggaccttcatcccagtgacctcagctaagactgggtcctttggagttactgcagttactgttggagattccaactctaatgtcaatcgttccttatcagggttgtcaggcctggatgctaaggctagtggccgcttgggcacgagagccatggtgtattacatgtccacgaccatcattgctgcagtactgggggtcattctggtcttggctatccatccaggcaatcccaagctcaagaagcagctggggcctgggaagaagaatgatgaagtgtccagcctggatgccttcctggaccttattcgaaatctcttccctgaaaaccttgtccaagcctgctttcaacagattcaaacagtgacgaagaaagtcctggttgcaccaccgccggacgaggaggccaacgcaaccagcgctgttgtctctctgttgaacgagactgtgactgaggtgccggaggagactaagatggttatcaagaagggcctggagttcaaggatgggatgaacgtcttaggtctgatagggtttttcattgcttttggcatcgctatggggaagatgggagatcaggccaagctgatggtggatttcttcaacattttgaatgagattgtaatgaagttagtgatcatgatcatgtggtactctcccctgggtatcgcctgcctgatctgtggaaagatcattgcaatcaaggacttagaagtggttgctaggcaactggggatgtacatggtaacagtgatcataggcctcatcatccacgggggcatctttctccccttgatttactttgtagtgaccaggaaaaaccccttctccttttttgctggcattttccaagcttggatcactgccctgggcaccgcttccagtgctggaactttgcctgtcacctttcgttgcctggaagaaaatctggggattgataagcgtgtgactagattcgtccttcctgttggagcaaccattaacatggatggtacagccctttatgaagcggtagccgccatctttatagcccaaatgaatggtgttgtcctggatggaggacagattgtgactgtaagtgattcagaatgtggagagctgccctttatgcagctccacaaggaactcatggctacacatttcaaactttggttgagagatgttggttttccccttaggacactcacatgggagtcaagaaggtggagcaaacacaacctctggtcctataaggacacccaaattccaggtgtattccacgtggagaaaaatggtcgctacagcatctctcggacggaggccgctgacctctgcaaggctttcaatagcaccttgcccacaatggcccagatggagaaagctctgagcatcggatttgagacctgcaggtatgggttcatagaagggcacgtggtgattccccggatccaccccaactccatctgtgcagcaaacaacacaggggtgtacatcctcacatccaacacctcccagtatgacacatattgcttcaatgcttcagctccacctgaagaagattgtacatcagtcacagacctgcccaatgcctttgatggaccaattaccataactattgttaaccgtgatggcacccgctatgtccagaaaggagaatacagaacgaatcctgaagacatctaccccagcaaccctactgatgatgacgtgagcagcggctcctccagtgaaaggagcagcacttcaggaggttacatcttttacaccttttctactgtacaccccatcccagacgaagacagtccctggatcaccgacagcacagacagaatccctgctaccagtacgtcttcaaataccatctcagcaggctgggagccaaatgaagaaaatgaagatgaaagagacagacacctcagtttttctggatcaggcattgatgatgatgaagattttatctccagcaccagtaagaataatcaattacagtacagccatttatgcaaggcttattga

SEQ ID NO: 131218 - DNA, 232 bp, Homo sapiens
  misc_feature (1)...(232): n = a,t,c or g
atggcatcctgggaaagagcatgngcggtgttgtccctaccctgggctgacagcacggtggtatatttggaaggcaactggatggggccttctcacccactcctatccaggttacnagcttcaaaaccaccagatgctgacagctgctgtggaaatctaagcaagtggagggatatccagattgagctggccaagtttggtacaagagctaagagtctgggaacaatgggag

SEQ ID NO: 131219 - DNA, 383 bp, Homo sapiens
acgagaaagtgcggccaacttccgaggtcagtctcattgcccagcggaccccagcctctgccaggttcggtccgccatcctcgtcccgtcctccgccggcccctgccccgcgcccagggatcctccagctcctttcgcccgcgccctccgttcgctccggacaccatggacaagttttggtggcacgcagcctggggactctgcctcgtgccgctgagcctggcgcagatcggtgagtgcccgccgcagcctgggcagcaagatgggtgcggggtgctcagcgcggacccggcggcagcccctccggctgagtcggccctgggggactggagtcaagtgagctgtctgcgaagtgcattgggctccggaaagcagggctggga

SEQ ID NO: 131220 - DNA, 798 bp, Homo sapiens; identical to SEQ ID NO: 116519

SEQ ID NO: 131221 - DNA, 2273 bp, Homo sapiens
cggcccagcggaccccagcctctgccaggttcggtccgccatcctcgtcccgtcctccgccggcccctgccccgcgcccagggatcctccagctcctttcgcccgcgccctccgttcgctccggacaccatggacaagttttggtggcacgcagcctggggactctgcctcgtgccgctgagcctggcgcagatcgatttgaatataacctgccggctttgcaggtgtattccacgtggagaaaaatggtcgctacagcatctctcggacggaggccgcttaacctctgcaaggctttcaatagcaccttgcccacaatggcccagatggagaaagctctgagcatcggatttgagacctgcaggtatgggttcatagaagggcacgtggtgattccccggatccaccccaactccatctgtgcagcaaacaacacaggggtgtacatcctcacatccaacacctcccagtatgacacatattgcttcaatgcttcagctccacctgaagaagattgtacatcagtcacagacctgcccaatgcctttgatggaccaattaccataactattgttaaccgtgatggcacccgctatgtccagaaaggagaatacagaacgaatcctgaagacatctaccccagcaaccctactgatgatgacgtgagcagcggctcctccagtgaaaggagcagcacttcaggaggttacatcttttacaccttttctactgtacaccccatcccagacgaagacagtccctggatcaccgacagcacagacagaatccctgctaccagtacgtcttcaaataccatctcagcaggctgggagccaaatgaagaaaatgaagatgaaagagacagacacctcagtttttctggatcaggcattgatgatgatgaagattttatctccagcaccatttcaaccacaccacgggcttttgaccacacaaaacagaaccagggactgggacccagtgggaacccaagccatttcaaatccggaagtgctactttcaggacaaccacaaggatgactgatgtagacagaaatggcaccactgcttatgaaggaaactggaacccagaagcacaccctcccctcattcaccatgagcatcatgaggaagaagagaccccacattctacaagcacaatccaggcaactcctagtagtacaacggaagaaacagctacccagaaggaacagtggtttggcaacagatggcatgagggatatcgccaaacacccagagaagactcccattcgacaacagggacagctgcagcctcagctcataccagccatccaatgcaaggaaggacaacaccaagcccagaggacagttcctggactgatttcttcaacccaatctcacaccccatgggacgaggtcatcaagcaggaagaaggatggatatggactccagtcatagtacaacgcttcagcctactgcaaatccaaacacaggtttggtggaagatttggacaggacaggacctctttcaatgacaacgcagcagagtaattctcagagcttctctacatcacatgaaggcttggaagaagataaagaccatccaacaacttctactctgacatcaagcaataggaatgatgtcacaggtggaagaagagacccaaatcattctgaaggctcaactactttactggaaggttatacctctcattacccacacacgaaggaaagcaggaccttcatcccagtgacctcagctaagactgggtcctttggagttactgcagttactgttggagattccaactctaatgtcaatcgttccttatcaggagaccaagacacattccaccccagtggggggtcccataccactcatggatctgaatcagatggacactcacatgggagtcaagaaggtggagcaaacacaacctctggtcctataaggacaccccaaattccagaatggctgatcatcttggcatccctcttggccttggctttgattcttgcagtttgcattgcagtcaacagtcgaagaaggtgtgggcagaagaaaaagctagtgatcaacagtggcaatggagctgtggaggacagaaagccaagtggactcaacggagaggccagcaagtctcaggaaatggtgcatttggtgaacaaggagtcgtcagaaactccagaccagtttatgacagctgatgagacaaggaacctgcagaatgtggacatgaagattggggtgtaacacctacaccattatcttggaaagaaacaaccgttg

SEQ ID NO: 131222 - DNA, 1983 bp, Homo sapiens
atggacaagttttggtggcacgcagcctggggactctgcctcgtgccgctgagcctggcgcagatcgatgtggaatctgagtttgcacagagagactaccaggacttggaggagaatatgggcctgggagcagttgtggggagaggctctgctgggtatgcacaccatggcatcctgggaaagagcatggcggtgttgtccctaccctgggctgacagcacggtggtatatttggaaggcaactggatggggccttctcacccactcctatccaggttacagtcaggtccctcagctgcaggtctgttggagtttgctggaggtccactccagatcctgtttgcctgggtatcaccagtggaggctgcagaacagcaaatattgcagaacagaaaatattgctccctgatccttcctctggaagcttcgtctcagaggggcacccgcctgtatgaggtgtcagtcggcccctactgggagagctgtcagacagggatgcttaagtctgcagacgtttctgctgcctttgttcagcagaacaaaggtggagactatgccctgcccccagaggtggagactacagaggcagccggccttgctgagctgcgctctcagtccaacagtgataaggttttgcaaatctcctcactggactttagaaatacgattctactcaggaacctaacagtgctgacttttcctggcatgccattatgctacgttcaagtttccaccaggttgtttgccttgcttcttgtggctttctggctgacagatgtaaaaatagaggctacaatagagccagcattttgtatcagcaggatcactcacacatgcctcacactggcagcagcttcaaaaccaccagatgctgacagctgctgtggaaatctaagcaagtggagggatatccagattgagctggccaagtttggtacaagagctaagagtctgggaacaatgggaggtacgtcttcaaataccatctcagcaggctgggagccaaatgaagaaaatgaagatgaaagagacagacacctcagtttttctggatcaggcattgatgatgatgaagattttatctccagcaccagcagatgtgggcccagtaactcactggtggctgcggagctgacgtcagctggtttcctgcaagatgccggtggagagaagaccctggaaccaagggcctgtaagcccaactatctagtaaccctgtctttagccagatgtccccagcggtcacagcaggcagccaccaaagccgcaaacaaacagatgggtgagctcactgtttggggtagaccaaacatgaggcctgtggacagatgccatctggttcgcatactccatagattgatgcttttttacccctttccccataccaccactatgattcacagggtgcacaatgccagtcacactccaatgggcactaactgccttgtaatcctagtggcctcttccctgttactcaaagaagcttatccgaatgcaagcaaaagaaggctacatatctttctcacttacgctacaaacactcaaggaatccgtgtgactctctcctacctgcagagaaatggcatttcactctggtgtcaaggtggttatgtttcaaccacaccacgggcttttgaccacacaaaacagaaccaggactggacccagtggaacccaagccattcaaatccggaagtgctacttcagacaaccacaaggatgactgcagatgtagacagaaatggcaccactgcttatgaaggaaactggaacccagaagcacaccctcccctcattcaccatgagcatcatgaggaagaagagaccccacattctacaagcacaagtaagcaagatggcggtcggcagttctggaaacccttacaagtattaggtaaccacaggataaatgtgtatgtgtttaacccgttttacctcgtagctgaaattggacccaaaacacagaaagataaattaatctga

SEQ ID NO: 131223 - DNA, 2761 bp, Homo sapiens
atgggggtatccggagcgcagccggggcgcagctgctggcacaggagctccacaggcagccaaggactcggtcctgtcccagagcctgcggactgtggaggggaggccgcaggaagagcccgggaggaggggactgtgtccctgacaatgggaacagccgacagtgatgagatggccccggaggccccacagcacacccacatcgatgtgcacatccaccaggagtctgccctggccaagctcctgctcacctgctgctctgcgctgcggccccgggccacccaggccaggggcagcagccggctgctggtggcctcgtgggtgatgcagatcgtgctggggatcttgagtgcagtcctaggaggatttttctacatccgcgactacaccctcctcgtcacctcgggagctgccatctggacaggggctgtggctgtgctggctggagctgctgccttcatttacgagaaacggggtggtacatactgggccctgctgaggactctgctaacgctggcagctttctccacagccatcgctgccctcaaactttggaatgaagatttccgatatggctactcttattacaacagtgcctgccgcatctccagctcgagtgactggaacactccagcccccactcagagtccagaagaagtcagaaggctacacctatgtacctccttcatggacatgctgaaggtaggtggccaaggggaaggggcagcagcaggccttgttcagaacccttcaggccatgctcttgggtgtctggattctgctgcttctggcatctctgacccctctgtggctgtactgctggagaatgttcccaaccaaaggggtgagtccctaaggtgtgtgcctgtgtatttggggcagtggaactgctcaaaggagacaggaatggacagtggacagtttggggaggagaaaggggcccatgacccaagtcccacctattatcatgcctgtctttctacccagtggtggcccagcccagaaagcccctatccccaaccaagtggcccccaagtcaaagagcccaggaatccagggaagtccatatccatgctatgcctttggatcaggtaccatgctgctgattctggtagctccagagctaagctgcccctggaggagagactccgccctttctctcccactcacgattgtcttgcctttcctcttccattagaaaagagaccagaaggaaatgttggaagcaggtgcccctctgggacaaagctaccggaggaaggatcaggcagcaatatttgctgttctgcaatatttcctgttctgcagcctccgctggtgatacctaggcaaacaaggtctggagtggacctccagcaaactccaacagacctgcagctgagggacctgactgatcgcagctccttgccagcaatggaacaaagctggatagagaatgactttgatgagctgaacagaagtaggcttcagaaggcaaataaactagaaaatctagaagaaacggataaattcctcgacacatacaccctcccaagactaaaccaggaagaaactgaatctctgaatagaccaataacaggctctgaaattgaggcaataattaataacgtaccaaccaaaaaaagtccaggaccagatggagtcacagccaaattctaccagaggtacaaggaggagctgagaaccgtcaacaaaaaccacatgattatctcaatagatgcagaaaaggccttcgacaacattcaacagcccttcatgctaaaaactctcaataaactaggtattgatgcaacatatctcaaaataataagagctatcgatgacaaacccacagccaatatcatactgaatgggcaaaaactggaagcattccctttgaaaactggcacaagacagggatgccctctctcaccactcctattcaacatagtgttggaagttctggccagggcaatcaggcaagagaaagaaataaagggtattcaattaggaaaagaggaagtcaaattgtccctgtttgcagatgacatgattgtatatctagaaaaccccattgtctcagcccaaaatctccttaagctgataaacaacttcagcaaagtctcaggatacaaaatcaatgtgcaaaaatcacaagaattcctatacaacaataacagacaaacagagaaccaaatcatgagtgaactcccattcacaattgcttcaaagagaataaaatacctaggaatccaacttacaagggatgtgaaggacctcttcaaggagaactacaacccactgctcaatgaaataaaaaaggacacaaacaaatggaagaacattccatgctcatggataggaagaatcaatatcatgaaaatggccatactgcccaagtcaggaccctcagctgcacgtctgttggagtttgctggaggtccactgcagaccctgtttgcctgggtatcaccagaggaggctgcagaacagcaaatattgccgaacagccaaagttgctacctgatccttcctctggaagcttcgtctcagaggggcagctggcctgtatgaggtgtcagttggcccctactgggagtttgtgaatagcacaatggaagaagctggactttgtgggttaagagagaaagcagatatgttgtgtaactctgaatcacatgatattcttcaacatcaagactcaaattgcagtgccacaagtaataaacatttattggaagatgaagaaggccgtgactttataacaaagaacaggagttgg

SEQ ID NO: 131224 - DNA, 486 bp, Homo sapiens
atgcagcagagaggactcgccatcgtggccttggctgtctgtgcggccctacatgcctcagaagtcgtggctgccgtggaccaggagagactgaagtggaaaacagcgggcggtagccgaagcagagagcaaggaagagcgcgggaagtgcagagcgacagcaacaagaaaggggtggcgcgggacgtcgtttacctgggcgacgtccagccgcccttcccgcctctgcgcgtacgcaacctgcttggcgccactgacctggccgtggacggttcctacccgcgcgcggagaggaccgacgtgaagaagctgccaaagtataacaagtactacgcgaaggcctttttggatcaagtccagcttctgcgcagagcgctggactgtttgcagtgcctagaactgaacatggtctggctccctatgcacatgctgttctccgagaagctcttcctccaccacttaaatatctgggtagccgttacttaa

SEQ ID NO: 131225 - DNA, 474 bp, Homo sapiens
cctcatttcctgatcgaacagcctcacttgtgttgctgtcagtgccagtagggcaggcaggaatgcagcagagaggactcgccatcgtggccttggctgtctgtgcggccctacatgcctcagaagccatacttcccattgcctccagctgttgcacggaggtttcacatcatatttccagaaggctcctgggaaagagtgaatatgtgtcgcatccagagagctgatggggattgtgacttgggctgctgtcatccttcatgttcaagcgcaggaaggaatctgtgttcagcccgcacaaccatactgttaagcagtggatgaaagtgcaagctgccaagaaaaatggtaaaggaaatgtttgccacaggaagaaacaccatggcaagaggaacagtaacagggcacatcaggggaaacacgaaacatacggccataaaactccttattagagagtctacagataaatctacg

SEQ ID NO: 131226 - DNA, 393 bp, Homo sapiens
  misc_feature (1)...(393): n = a,t,c or g
tttcgtcgtctttcgggttcaagcctgcgcctcgcgttccacaggttcccacgctccgctgtcgggttttggggtcgccctgtaggttaaaaccccgaacctgctcattcctctcgcggcgtggccctaagacgttcccagtcccgtcgctccgagagggtctagagatctgcgtccatttcggattaaaatcgttctgaacccacacaatatgacctcggggaggatgcgaggaagatgaactgnnnnnnnnnnnnnnnnnnnnnnnnnngactgacttacctgagaaagaaactcagaggaagaggaaagaaagaagaggagggaatggctctttctcagggactgtttacattcaaggatgtggccatagaattctctcaagaggagtgg

SEQ ID NO: 131227 - DNA, 415 bp, Homo sapiens; identical to SEQ ID NO: 112196
  misc_feature (1)...(415): n = a,t,c or g

SEQ ID NO: 131228 - DNA, 796 bp, Homo sapiens
  misc_feature (1)...(796): n = a,t,c or g
gccctgtacggcacgagcggcacgagcctgcgcctcgcgggccacaggttcccacgctccgctgtcgggttttggggtcgccctgtaggttaaaaccccgaacctgctcattcctctcgcggcgtggccctaagacgttcccagtcccgtcgctccgagagggtctagagatctgcgtccatttcggattaaaatcgttctgaagtgggtactggccccgacctttttgctttagcccacacaatatgacctcggggaggatgcgaggaagatgaactgnnnnnnnnnnnnnnnnnnnnnnnnnngactgacttacctgagaaagaaactcagaggaagaggaaagaaagaagaggagggaatggctctttctcagggacttggttacattcagggatgtggccatagaattctcttcagaggagtgggagtgcctggaccctgcccagagggccttgtacagggacgtgatgttggagaactacaggaacctgctttctctcgatgaggataacatccctccagaagatgatatttctgttggatttacaagcaagggattatcaccaaaggaaaataataaagaggaattataccatctggtgatattagaaagaaaggaaagccatggcatcaacaattttgacctcaaggaagtctgggaaaatatgcctaagtttgacagcctgtgggactatgatgtaaaaaattacaaaggaatgcctttgacctgtaacaaaaatctcactcacagaaaagatcaacaacataataaatcctcaatacatttctcttt

SEQ ID NO: 131229 - DNA, 198 bp, Homo sapiens
cggccgcgtcgaccggataaggagaagaagaaaaaggagagcatcttggacttgtccaagtacatcgacaagacgatccgggtaaagttccagggaggccgcgaagccagtggaatcctgaagggcttcgacccactcctcaaccttgtgctggacggcaccattgagcacgtactcaatggtgcgtcgacgcggccg

SEQ ID NO: 131230 - DNA, 633 bp, Homo sapiens
atgtcggccggtgcccgccgcaaccaacggcagatgtttcccagcaacgccccgagaccccgggccacgcatgcgccgcgcatgcgcgtgggggaggtcaaagggcgcggggcggtgcctgcgaagagccacacggcgcgacaagatggcgaaaaaggagagcatcttggacttgtccaaagtacatcgaccaagactatccgggtaaagttccagggaggccgcaaaagccagtggaatcttgaagggcttcgaacccaacctcctccaacttggtgctgaccgtcaccatttagtacatgcgagaccctgacgaccagtacaagctcacggaggacatcccggcagcttgggtctcgtggtgttccggggcaacgtccttggtgctaaatctgcccgcaggacggcatggaggccatcccccaaccccttcatccagcagcaggacgcctagcctggccgggggcgcggagggtgcaaggcaggcccgagcaagctcggtttcccgcggacttggctgctgctcccaccgcagtaccgcctcctggaacggacgcatttctcctttttgtaaaaggtttgaatttttgttttccttaataaaattgcaaacctcaaaaaaaaaaaaaaaaa

SEQ ID NO: 131231 - DNA, 1809 bp, Homo sapiens
atgcagtctcagtcaagggatgcctcttccaaggtgaattcttccctcaggatgcagccagctgtaatgggcacagccattggggacaaccaagcagccaacaacgtcccatttatcccaaaaaacacaaaaacaacaagcttcagcaaattcgacacgtttcccaacacgggcaaaagttggcttatgtgcggatttaacatagccagagtcgtccccttccacgtgggatacatttccaagtatgtcgttcccgtattatcatattcgagaagacaaatgttattaattcaaagggggccatgtgccagaaaagttaccccacagttatggaatgtgggatcccaagatcccgaagattacgaatggcccaagttccacattccacccgaagaccaaggcagtggacggcacacgagaaaggacttttggggaatggggcgtcccgaagagaaacctggagctgattaccattacacgaaaagttttactccaggaaagggaagaaacgggacccctcgttggagcacagttggtagatcctcctctgttttaggcaccatccagatgcacctgtccagtgcaaagctggccggagctggcttagatttggtcactgcagcagctgctggagcaagggaggcagcctccaagagggcagaggtcatgtctgtcttgctcattgatgtatctcaagtgtttagcacagttcctggtgaagatagcagatgtcctccgaatgctctggcttatggcttgcccaatagcctggtgattgattccagtggcctcacagaggctgattttggcagcagaggttttggaggtgcctgggtaccccttttgggtgctatagactgggcccatctggagctgggaagactgttgggtacagaattccaggtcatgttcttcttctctgcattggtgctcactttgtgttttactgttcatctgtgcagtatctctgaagccccacttacagaggttgcaaagggcattcccccacagcaaacccctcaggaccctccattgtcatcagatggaatgtacgagtatggttctatcaagaaagttaaaaatggttactcactatctgggaacagccaggaaaggggtaactttggcaggaacaggtacaggaacagagttccttggcaggaacaggaacagtggatccagagaggcagcattcagggctgtcgatcaactgtgttttctctggctgcctggaggagaatacttgtactctttgactctccttcaccaagaagccagaactctaagattactagttggactggagccctctgtgcatttatgcaggacagccaaagaatcacggaatatctatatgataacattcatgcggtcattaaaaatgatcatactggtaaggccatgtttcatctcctgttacaactttttgaagaaatgtttcaggatcttgatcctgcatgtttaaaattttcattgaaagctctgctcttgtctgcagttgatctgggcacaatacttttggtacccattgagtggaagcctcattctgggcctgaaactgccaagcagccactcgtgcttaacagaatacctcctactcgcagggcaatgacattaaagtcactgctgagagcactggtgaacatgcctcctcactaccgctacctttgcatcagccacctcattggatggacggccttcctgtccaacatgctgttcttcacagatttcatgggccagtgggttcctgatcaagtttctctggaaaatgaaagggaatctttacaagatgaagtgttggatggatga

SEQ ID NO: 131232 - DNA, 2066 bp, Homo sapiens
atgccgggccgcaccgcggggctccaggccgcccgcgccccactccgcgagccgacagcgccctctggtggacgctggcgcgctcgccccagtggctcccgaggctctcaccgcctccgctgtctccgctccctgcggtgcccggctcagccccggaccagcctgggggaagcgacccttctacgtcctggccggtctagtttctctgtcgtcggctaccgggtccctcaggtcaccccaccccggccggagccggatggagaggcgaagagagccttgggtctaaaaagggcaacttggcttttcaaagtgaagaattctgttcttatcgctgcattagagccacaggccatctatttgacagttaaatccaagaagctagaatttgaaggtaaaggtattcgaagggccttcagacagaccacagagaccacccctgcattttcccaaacccgaggctgcaggtcagctcctgaagctgaggtgagggttgtgggaagtggccgtacaatcccactgcaggcatcgcctccaggatgggaggtgctgggcatgggagcaggctatgaggactctgtggtgcaagtgaaagagacacaggtgcaggtgtgggccaagataaggacgatgaggtgtgatgaagaggaggccatgcactgggctagtgaaggattgatccagatccccagacaaggcttccctcctatgaccaaccttgtccactttatgtgtgaaatgagccgcctggctccgccccgttcggtagcgccgcgccttggaggtctgtggctaacttggtccggaagaagcgaggcggaccttctggcgtttgaaaaacttccggcgggaaccggaagatcatctgcctctgaagaagatgacaaggaagatagtgcctgggagccccaaaagaaagttcccagaagccgtaaacagccccctcccaaggaatccaaaccaaagaggatgcctcgggtgaagaagaatgccccacagatcagtgatggctcagaagtccgttgttgttaaggaggagctgaatagctctgtggctattgctgatactgctttagaagacagaaaaaataaattggatactgtacagactctgaaaacagccaagacaaaacagaaatgtgcagcgcagccacatacagttcgaaggactaaaaagctgaaagttgaagaagaaaccagcaaagccagcaacttagagggtgagagtaatagttcagagacaccatccacaagcacatgtgtggggaggtacatgcaagaaggaagagaatgacgatgactttacatttggtcagtccgctttaaagaaaatcaagactgagacatatcctcaggggcagcctgtcaagtttccagcaaatgccaatagtactaaagaggaggtggaaatgaattgggacatggtacaggttttatctgagagaactaatattgaaccttgggtttgtgccaacatcattcgtctctttaatgatgataacacaattcccttcattatacgttatagaaaagagctcattaataaccttgatgctgattccttgagagaagttcagcaaaccctagaagagctacgggctgttgcaaagaaagttcatagtacaatccagaaaattaagaaggaagggaagatgtctgagtgcttgttaaaagccatgctgaattgtaaaacttttgaagaactagaacacgtgtctgctccatataaaactggaagcaaagggactaaagcccagagagcaagacagttgggcttagaaggagcagccagggcactgcttgagaaaccaggggagctcagtctgctatcgtacattaggcctgacgttaaagggctttcaacgcttcaggatattgaaataggagtgcagcatattttagcagatatgattgctaaagacaaagacacgcttgacttcattcggaacttcctttatgtagataaccccagcacagtatcacagaacacagaaatgaatgcaaatgatgaaagacagtgtggtgaaggaaaattactgtggaactctctccaagtactgtgggaatag

SEQ ID NO: 131233 - DNA, 441 bp, Homo sapiens
  misc_feature (1)...(441): n = a,t,c or g
gctgagtggtggctgggtatggaggcgaaggcggcacccaagccagctgcaagtcgcgtgtgtcggcagaggagaccgaaaagtggatggaggaggcatgcacatgatactatgctatgcacagtgttttcatgtgggccatgttataatccccacagaagccctatcannnnnnnnnnnnnnnnnnnnnnnnncctcactggaagcagatgctgataccatacttcttgtacagtctggagaactgccaaagaagccctcgaaaatactgaagttcctgttggctgtcttatggtctacaacaatgaagttgtagggaaggggagaaatgaagttaaccaaaccaaaaatgctactcgacatgcagaaatggtggccatcgatcaggtcctcgattggtgtcgtcaaagtggcaagagtccctctgaagtatttgaacac

SEQ ID NO: 131234 - DNA, 462 bp, Homo sapiens
cttctgcacacatagacgttccctgtctccccgcttgcatactttctctgtcctcacaacaaccttttggtttagaaagaactcatttctggtcatacaagatgtagctttagtaagactggtcagatatccaaaaattgggataaagtcttagcttaagtaaagaaatatttcagctgtgaattgtgtccccccccgcgctccaccccgccaaattgttacatcgaagtgcttaactctcagtacctcagattgggagagaatgccaagggtgtggctggacagccatgtgctaacgaaattaggtacgtgactcacggatccaatcaacctccacagtagatgccagaaatacagaggtggttatctgaaaaagatccgcgaagaaccctcttgtctgactgcttggacccccatgacttgcatgggcctcgtgccaagcatggcgtaagatggtcaaac

SEQ ID NO: 131235 - DNA, 587 bp, Homo sapiens
actgagaacggctccggaatttccgggtcgacgatttcgtggctgcgcggcggcagcggcagaaagcgtagctgctttgctgtagtccacgcccccttgccgctccggtgacagtctctgcggaaagtcacgtttgtgatttcgggagagcacagaacgggacgacggcgctcttgctgggtcatctgggccaggtgacgaagaaacagtttcctggtgaagcagtccctcacccctagtcagcccacacccctagggcctaaagatgctgaggtctgtatggaattttctgaaacgccacaaaaagaaatgcatcttcctgggcacggtccttggaggagtatatattctgtggaaatatggacagatgatcaccctagacttacaggaatgggaggttcgcctattacatcgcccaagcacgacgacaatatcattttgaaagtaaccagaggacttgcaatatgacagtgctgtccatgcttccaacacttgagagaggccttaatgcagcaactgaattccgagagcctcacagctctgctaaaaaacaggccttcaaacaagctagaaatatgggaggatct

SEQ ID NO: 131236 - DNA, 761 bp, Homo sapiens
atgagtaatgatgtaacgaacattaaagaagtggtattggcgaattgcaaagtccatgctgtcaatgtttctgctggtataaaattctcaaaaaccttattggcctcccatgcaagtcatgggggtccaagcagtcagacaagagggcactccgcggatctttttcagataaccacctctctatttctggcatctactgtggaggttgattggatccatgacccaagcaagagcgccgtccgtcccgttctgtgctctcccgaaatcacaaacgtgactttccgcagagactgtcacccggagcggcaaagggggcgtggactacagcaaaggcagctacgctttctgccgctgccgccgcgcagccgccgccgctcactggtccgacaagcccagctgagtggtggctgggtatggaggcgaaggcggcacccaagccagctgcaagcggcgcgtgctcggtgtcggcagaggagaccgaaaagtggatggaggaggcgatgcacatggtgaggagcccgggaggaacatactgtttaattgatgaaattaagtcaggcacagatgaaaaggttgtatggagtattacgtcttacattttccactttgtgtttcaggccaaagaagccctcgaaaatactgaagttcctgttggctgtcttatggtctacaacaatgaagttgtagggaaggggagaaatgaagttaaccaaaccaaaaatgtatgtgagttgagcagtataattgcaaacatacagtag

SEQ ID NO: 131237 - DNA, 425 bp, Homo sapiens
atgtttctgtgaaagtaggtaaatagctgctgagtgaaagcccctgaagccccctcacttaaagaaaacacaaatgagagtacacatatatgctgtcatcgattgttctgtttgttttcatttaattctgtaattcagaactcctaccatattcaaatattcaactcatttctcacccagttgaatcctgatacattcagccagtcttctaaggatggactcttgggtgttgtcaattcttctaagcaaagcatcagtgaacactttgatgaaaggagaatgccttccttagatacctatgtaactgtcttctctttgccaagtgggtctctgctcaaatgttaccttcttagagtggccctctctgaccactgaagttgaggcggcctccccttcactctccatttcatcccattctctgatca

SEQ ID NO: 131238 - DNA, 993 bp, Homo sapiens
atgatcagagaatgggatgaaatggagagtgaaggggaggccgcctcaacttcagtggtcagagagggccactctaagaagcctccgcgtctgcgcagccgcagtcagtgcggcgccagctctgcagagcccagacagggtccggttggggagggtgaattccagcctcctcgtgaggaggggagcacagacctgtgtaccctcgtggggcggcacgggcacgtgcgctcgtctcgctggggcttggtgtcgatgttcgctccccctggggtgttcagcgcacctgcccgagtgtgcacctgtgcgtgttcgcgttgtgtgtccgcctgggcccctgtggaccaccctgcaacgcccctgctggccctctgtaatgattcactgaatgatgaaatgtccatcagtcctcaggttctgaatcttgtgcctggagaaccagagaggaccctggagcaggaggagaaagagaagcttgtctcagaagctccacctcctcctggggcaatgcagagtctcaggcctgagcagacacgggggctgctggagcctgagaggaccaagactctgctgcctcgggagagccgggcctgggagaagcctcctcatcccgcctgcaccaaagactgggaggctgtggaggttggggcctccagccatgacagtgatgagaaagacctgtcttctcaagagactgggctttcccaggagtggagctcggtggaggaagatgacgaatcagagggctcccaggcagtgggagccatcgaaggtgttcggggacttacagaatcactctgggagcccatgtggaaggaagccacactggcctccttgctgtttctcaaactcgcctatcatgcttacttcaggacttttgcactgttcctgctccgcggaatgctctttccccagaagctcccatggctccctcatctccttcaggtctcaaatgtcacttcctcacagaagccttccccgaccaccctcaagtag

SEQ ID NO: 131239 - DNA, 2199 bp, Homo sapiens
atgttcaaatcaacaactgttactgtgagagaaaactgtaatgaaatttcccaacgagttgttgtggattcagttaataaccagcaagatttcaaatatactttgattcatagtgaagagaatactaaagatgctaccactgttgctgaagatccagaaagtgcaaataattatacagcaaaaaataaccaagttggggatcaagcccaggggattcacagacacaaaatcggcttttcttttgcatttccaaagaaagcgtccgtgaagctagagtcctcagctgcagccttctctgaatacagtgatgatgcctcagtgggaaaaggatttagcagaaaaagtagatttgtccccagtgcttgtcatcttcaacaatcttcaccaacagatgtgcttttgagttctgaggagaaaactaactcttttcatccaccagaggcaatgtgcagagacaaagaaactgttcaaactcaagagataaaagaagtctctagtgaaaaagatgcattattattaccttcattttgcaagtttcaacttcagttatcttctgatgcagataattgtcaaaattcagtcccattagcagatcaaataccactagagagtgttgttattaatgaagacatacctgttagtggtaacagttttgagttgttaggaaataaatccacagttcttgacatgtctaatgattgcatatctgtgcaagctaccacagaggaaaatgttaagcataacgaggcatccacaactgaggttgaaaataaaaatggtcccgagacattggccccttcaaatactgaagaggttaacataactatacataagaaaacaaatttctgcaaaagacaatgtgagccatttgtacctgtccttaacaaacacagatctacagttcttcagtggccatcagaaatgctggtttatacaactacgaaaccatcaatttcctatagctgtaatcctctatgttttgacttcaagtctactaaagtaaataataatctagataaaaataagccagacttaaaagatctttgttctcagcagaagcaggaagacatttgcatgggaccactttcagattacaaggatgtatctacagaaggactcactgattatgaaattggaagtagcaaaaataaatgcagccaagtcactcctcttttggctgatgatattctctccagtagttgtgattctggaaaaaatgagaacacaggtcagaggtataaaaacatttcctgtaagatcagagaaacagaaaagtataattttactaaaagtcaaataaaacaggacactctagatgaaaaatacaacaaaataaggttgaaagagacccatgaatactggttccataaaagtagaagaaagaaaaaaagaaaaaagttatgtcagcatcatcatatggagaaaaccaaagaatcagaaactcgctgcaaaatggaagcagagaatagttacactgaaaatgctgggaaatatctattggaaccaatttcagaaaagcagtatttagctgcagagcaattattagactcacatcagttacttgataaaaggcccaaatcagaatccatatccttaagtgacaatgaagaaatgtgtaaaacatggaatactgaatacaacacttatgatactatcagttctaaaaaccactgtaaaaagaacacaatacttttaaatggacaatcaaatgcaacaatgatacattctgggaaacataatttaacatattctagaacttactgttgttggaaaaccaaaatgtcaagctgtagtcaggatcacagaagcttagttcttcaaaatgatatgaaacacatgagtcagaatcaggctgttaaaagaggttacaattctgtcatgaatgaatcagaaagattctatcgaaaacgtagacaacattcacattcttattcttcagatgaaagtttaaatcgacagaatcatttaccagaagaatttttgaggccaccaagtacttcagttgctccctgcaagcctaaaaagaaacggaggcgaaaaagaggcagattccaccccggatttgaaactttagaactcaaagaaaatacagattatcccgtgaaacccaattcttccttaaatcctctggataggttaatccatcacacggcggccgggcgagcagctaaaaagggcagtacgagtaattttaaatag

SEQ ID NO: 131240 - DNA, 1388 bp, Homo sapiens
ggtaaacatgttgcttggaagtatgcttttccagtttcacaaaatgacaccagtggccacagaagttagtaccctttggcctctgaaaatttcgctttatgaagagaaggctactaaaagacatgtaggacttagggttcaaggtggcagactagaggagctagtgtgtactgctctcgtggagaggaaatagtgacgagtaaacatggactctctaagtggatcatctaagaaaccacgtcaggattcaggatgcatcaagggagtaatgggacatggagaacagagaaaatcgaagctgggcagctgcctgcctgggaccagcatgaagacaggagaagctcctcaacacagggaaagaattagtgagtaagagtcctcaggggatccatacttcccacagtgacctgtgcaatcctgagaatgtgaaaaaccccatgactcccttgggcctctagactgatacagagagctacccagagtttttgcagaggcaacactcaagtccgtggggacccccccaggccctggactctggaacagcctggttgaggtgccatggccctgacagaagctgcagtcatggtgctggagatggacagattgctctactccctcttgacagaaaacctgctaaacccctgtggtttaggagagctttgtgttcccccaggaagcacttcgatggtgaattgggtgactccactcatcctgctcctaactgggcaggattcaacttcaccctgctcctaacttgggcagagccccaagcagggggtggggaggacgccctccctctcagaatactgaaaaggctggataacgcagatgaacaagcagcccagatcagaagggaacttgatggccggctgcaattggcagataaaatggcaaagaaatatgtgaatgttatattggaggagaagaaaagcaggtggcctgagactctgggactgatctgtgaagtggtgccagatgttccttccaatcccatgaatgaactggtgcaagaaagaaaattccccaaatttatagcaaaagatatggagaatatgtatatagaagagttgcggtcttcagtgaatttgctaatggccaatttggaaagtcttccagtttcgaaaggtggtccggaatttaaattacaaaaattaaaacgttcacagaactctgcatttttggacataggagatgagaatgagattcagctgtcaaagtccgacgtggtactgtcattcaccttagagtattttaagcaggagttatgtgtccagcaacaaagtaaaatcgtgttaagtgacgatggtgcagtgcatgtttataggacaccagagagaatagatatgcctctagtcacaggacctgtgacatcagccaagctaaactga

SEQ ID NO: 131241 - DNA, 454 bp, Homo sapiens
ggagagcgactcccgcaaggtggcggaggagacccccttcggggcgcccgcgctctgccccagccctgaggcgctgtcgccggagccgcctgcgtacagtctgcaggactttgacacgctggccaccgtgggcactgggacgttcgggcgggtgcacctggtgaaggagaagacagccaatcatttttttgccctcaaggtgatgagcattcctgacgtcatccgcctaaagcaggagcaacacgtacacaatgagaagtctgtcctgaaggaagtcagccacccgttcctcatcaggctgtggccccgttgcaatgctgacttgacttgcaccaaggcagtacagaatggatgggatttgctaaaggtgcccacctgcctccaccttttgctggcagttccaggtgttggactttttattgatgaaggtgtaaagcaaggattttcagtggag

SEQ ID NO: 131242 - DNA, 960 bp, Homo sapiens
atgcttggggcccccgccttcctcgcagccatccagcactcggtgcacgccccgcgaggccagcggctgctccctcccggggctattgctgctagtgccgcggccgcggcggagagcaactcccgagaggtgacggaggatgccgccgactggacgcccgcgctctgccccagccccgaggcgcggtcgccggaggcgcctgcctaccgcctgcaggactgcgacgcgctggtcaccatgggttgcctccctgtggtcgtttactgtggtgggtccagactcaaaaccaggtttggggccaccatcatcatatttgtgtcccccaccccaagattcttatgtcgacaccctagtccccaagatgatgatattagcagaattccagaagcaaatctcgtatcctgctggaggagcaagacggaaacgcaggtgctagagggcagattgtttgcacagaaacctgggcatgtggatgaatttggtaatactcacgtgtgtgcggaaggacactcgttgttggatttgggtcccaccctaaatccaggatggcctcatctggagattgtttacttaatagaaactacaatgaccctattttcgaataaggctctattcacaggcactgggacgttcgggcgggtgcacctggtgaaggagaagacagccaagcatttcttcgccctcaaggtgatgagcattcccgacgtcatccgccggaagcaggagcagcacgtgcacaatgagaagtctgtcctgaaggaagtcagccacccgttcctcatcaggctccatacagaatgtgcctccttcctcttcgccttctgccaggattgtgtcaatgtgggggaattatgggataaaagaggtcagggagaatcatctatttggagtgacaactacagaaagagcacaggtcaagtggctacagtgaaaccagagaacgtgatgtttaagatttga

SEQ ID NO: 131243 - DNA, 553 bp, Homo sapiens
ttagtaaacagaagctgctattgtcgatgatgtgatggtctccatttgtggatgtgctgtctttgtagctctgcagttgtctctgaggctgaacagccctgcgggtcgccccaccaagctcaggaggatggccagctgcttctggcccaggcagcactgggtcagcgtgagctccgtcagctgcagggactcgctcaagccggtggccagcctggacacgaactcatggccggaagctgcactcacttagcctgagtgtcttcccagcctggtcctctctggagaagtgaatccggaagctctgctcagagcccaggtcaagcaaaccggagatgggcacctgcggcagacattccagaaggcatctgagtccgctgtcgcccagcaggtttgctgagagacaggagcctgcatccactgtcactgctactggaccccatgtcagggtcaccagcgccaccaccatcaccaccatcaccagtatcaccaccatcaccaccaccaccaatgtcaccaccaccagtattaccaccatcaccaccaccactttcat

SEQ ID NO: 131244 - DNA, 328 bp, Homo sapiens; identical to SEQ ID NO: 126749

SEQ ID NO: 131245 - DNA, 247 bp, Homo sapiens
  misc_feature (1)...(247): n = a,t,c or g
gttctctggagcagcgttcttttatctccgtccgccttctctcctacctaagtgcgtgccgccacccgatggaagattcgatggacatggacatgagccccctgaggccccagaactatcttttcgattatcactttaaggtggataatgatgaaaatgagcaccagttatctttaagaacggtcagtttaggggctggtgcaaaggatgagttgcacattgttgaagcagaggcaatganttacga

SEQ ID NO: 131246 - DNA, 1115 bp, Homo sapiens
aatggggcacagtaacagcctcctttgcaatgtggatgacacagaatgccccggaagcacatccccctttcgccagctggcgtaatagcgaagaggcccgcaccgtacgcacttcccaaaagagagagatgaccagtaggctaatggatcgggattcaaccttaactgtgtcgattttatgcaaattaagacagcaggactattttccatatatcaaatttatcagcaaaggcgtgttttcaatgtcatcatccaccattgatgtgcaagtctcaaaatgtggcactgtcatccacctagatgttcaagccaaaaacccaaaagccatcactgagtccctcctctgtcacttgacacagaagccctgtgggctccacctcctgatttctgcatcgcccagtgaccaccataggctctcacctacgctactccctgcgaaaatagattgctacagtcaattctgcactcagcaaccaggaaaatccatcccgaattcaaaatctgtatctcatcacatgattcccctttcaaaaccaccagtggcttttcatcgaaatcaaatgtacagttcctactctagtcttctacgggcaatcttcccctctccgtgcctgaggaagccagttgacttgcactacatcaaaggcttccttgcattctgctttctggttagtacgtgccaccaccccatgaaagatgtgatggacacggacatgagccctgtgaggccccagaactatctttttggttgtgaactaaaggccatcaaagatgatcactttaaggtggataatgatgaagatgagcaccagttatctttaagaacggtcagctcaggggctggtgcaaaggatgaattgcacattgttgaagcagaggcaatgaattacgaaggcagtccaattaaagtaacactggcaactttgaaaatgtctgtacagccaatgatttcccttaggggctttgaaataataccaccggtggtcttacagttgaagtgtggctcagggccagtgcatattagtggacagcacttagtagctgtagaggaagatgcagagtcagaagatgaagaggaagaagatgtgaaattcttaagtatatctggaaggtga

SEQ ID NO: 131247 - DNA, 1345 bp, Homo sapiens
  misc_feature (1)...(1345): n = a,t,c or g
agtgtggtggaattcattccgtcctgcgcggttgttctctggagcagcgttcttttatctccggtccgccttctctcctacctaagtggcgtgccccccggtcacccgatggaagattcgatggacatggacatgagccccctgaggccccataactatcttttcggttgcgaactaaaggccggccaagattatcactttaaggtggataatgatgaaaatgagcaccagttatctttaagaacggtcagtttagggggctggtgcaaaggatgagttgcacaattgttgaagcagaggcaatgtattacgagggcagtcccattaaagtaaacacttggcaactttgaaaatgtctgtacagccaaccggtttcccttgggggcatttgaaataacaccaccagtggtcgttaaggttgaagtgtggttcagggccagtgcatattagtggacagcacttagtagctgtcggaggaagatgcagagtcagaagatgaagaggaggaggatgtgaaacctctttaagtatatctggaaagcggtctgccccatggaggtggtagcaaggttccacagaaagaaagaaaaacttgcatgctgatgaaagatgatgacgatcgatgatgaagaggatggatatgatgaagatgattgatgatgatgatgatgattttggatgatgaggaagctgaagaaaaagcgcccagtgaaagaaatctataccgagatactcccagccaaaaatgcacaaaagtcaaatcagaatggaaaagactcaaaaccatcatcaacaccaagatcaaaaggacaagaatccttccaagaaacaggaaaaaactcctaaaacaccaaaaggacctagttctgtagaagacattaaagcaaaaatgcaagcaagtatagnagaaaaggtggttctcttcccaaagtggaagccaaattcatcaattatgtgaagaattgcttcccgatgactgaccaagatgctattcaagatctctggcagtggaggaagtctctttaagaaaatagtttaaacaatttggtaagagaatttaccgtcttatttcatttctgtaacagttgatatctggctttcctttttataatgcagagtgagaactttccctaccgtgtttgataaatgttgtccaggttctattgccaagaatgtgttgtccaaaatgcctgtttagtctttaaagatggaactccaccctttgcttggttttaagtatgtatggaatgttatgataggacatagtagtagcggtggtcagacatggaaatggtggggagacaaaaatatacatgtgaaataaaactcagtattttaataaagt

SEQ ID NO: 131248 - DNA, 291 bp, Homo sapiens
tcacctgctccttagagaagggaagatgagcgagtcgagctcgaagtccagccagcccttggcctccaagcaggaaaaggagggcactgagaagcggggccggggcaggccgcgcaagcagcctccgatgagtcctctgaacagttgtgttgttttttgttcaatgttccattcttccacatccgtcattgctgctgctaccagcgccaaatattcatcctcactgcctcctgttctgcccacgatcccctcccgcaagatactctttgtagggaagaggggctggggcat

SEQ ID NO: 131249 - DNA, 885 bp, Homo sapiens
ttttttttttccagaaaaggatattttttttattcaagtaactgcaaataggaaaccagagagggagccccaggctgggacaaatcatggctacccctccccaacagaacagggggaggaggtggcccctacaccctttatggtcgattcgggcccccttgctcactctgctgcagcatcctaggggcagggccccaccttccctgggactggggtagtcggtcacccagcctgccatgccccagcccctcttccccacaaagagtatcttgggggaggggatcgtgggcagaacaggaggcaatgaggatgaacatttggcgctggtagcagcagcaatgacggatgtcgaagaatggaacattgaacaaaaaacaacacaactgtccagaggtagtttgtgaacagaggaaaaatggaagcaaagtagggttaggggagcagccccagcccacctcaggtggcggccacagggctcttgggcctcacctggacaataagtgactgcatctccatcaccacaatatgtactcagatcccaggcggagggcaagggggctgtggccacagtgaagagggagtaagggactcacccctcctgccttcctgtagccgaagggggctgtccaacctagtacggggactagggaagttggggaaggatgaaaagtgagccccacgtggtgacaaagacagtttggctgggggaatcctgggggccagcacccccctccattggccacacctgctgctgccagggcagtggagtagggcgtgccaggatgagatggggcttgggccccttttaaggccaggggaaccctcccaggccccactatgggaagccagagggaacagttaaggagcagagagggcccttgttcc

SEQ ID NO: 131250 - DNA, 672 bp, Homo sapiens
gcgtccgcggcggacaggcgttccgtcagcgcccagcaccgccgctcccggtaacccggagcgcgcaccgaggccggcgcccgactcgcgcatcccagccatcactcttccacctgctccttagagaagggaagatgagtgagtcgagctcgaagtccagccagcccttggcgtccaagcaggaaaaggacggcactgagaagcggggccggggcaggccgcgcaagcagcctcgcggtgagtcccgggacagcgctggtagggagtcagaaggagcccagcgaagtgccaacacctaagagacctcggggccgaccaaagggaagcaaaaaaaactggagaaggaggaagaggagggcatctcgcaggagtcctcggaggaggagcagtgacccatgcgtgccgcctgctcctcactggaggagcagcttccttctgggactggacagctttgctccgctcccaccgcccccgccccttccccaggcccaccatcaccaccgcctctggccgccacccccatcttccacctgtgccctcaccaccacactacacagcacaccagccgctgcagggctcccatgggctgagtggggagcagttttcccctggcctcagttcccagctccccccgcccacccacgcatacacacatgccctcctggacaaggc

SEQ ID NO: 131251 - DNA, 626 bp, Homo sapiens
ccagaaaaggattttttttaattcaagtaactgcaaataggaaaccagagggggagcccaggctgggtataaatcatggctacccctccccaacagaacagggggaggaggtggcccctacacccattatggtcgattcgggcccccttgctcactctgctgcagatcctagaggcagggccccaccttccctgggactggggtagtcggtcacccagcctgcattgccccagcccctcttccccacaaagagtatcttgggggaggggatcgtgggcagaacaggaggcaatgaggatgaacattgctcaaactcctttcaaagggcacctgaccgcacagggaggtggcagaaggcaaggatgggatgccgtgtaagaggcggaggcagcagttgtggggtggagagggaggtagtggcacgggccggggcatggcagtggggtgcagggtggctggatgcatcccagaagacttttggcctaaaaaatgggcaggattcggtcataggttggagagttgagagaggggaggagaagaagaggacagtgctggaggatggtaatgtcatttacttaaggaaagggggacatggaaaaagagaaggtaaatgtggtggataaaat

SEQ ID NO: 131252 - DNA, 2012 bp, Homo sapiens
  misc_feature (1)...(2012): n = a,t,c or g
tttttttttttttttttttccagaaaaaggatatttttttttattcaagtaactgcaaataggaataccagagatgggagccccaggctggggacaaaatcatgcttaccccttccccaaacagaacagggggaggaagttgccccctacaccccttttatggttcgattcgggccccctttgcttcacttctgctgcaagcattcccttaggcaggggccccaccttccctgggactggggtagtcggttaaccccaccttcccatgccccaaccccttcttccccacaaagagtatcttgggggagggaatcgtggccagaacaggaggcaaatgaggattgaacattttggcgcttggtagcagcagcaattgacggattgtcgaaagaatgggaacattgaaccaaaaaaccaacacaactgtccagaaggtaattttttgaacagaggaaaaaatggaacccagaaccttgggggggcagggaggagacaggagggggggttgtggagcgggcaggggtgacctccttcttattgggtgccccatcttgaggagggcggaatggctgagatggcggaagcaaagtatgggtatggggagcagcccccaccccacctcaagtggcggccacagggctcttgggcctcacctggacaataagtgactgcatctccatcaccacaatatgtactcagatcccaggcggacgtgcaagggggctggggcccacgtgaaagagggagtagggggctcacccctcctgccttccttggaccaaagggggctggcccaccttatacgggggactaaggaggttgggaaagaagaaaaagtgagccccacgtggtgacaaagacagtttggctgggggaatcctgggggccagcacccccctccattggccacacctgctgctgccagggcagtggagtagggcgtgccaggatgagatggggcttgggccccttttaaggccagggggaaccctcccaggccccactatgggaagccagagggaacagtgaaggaggcagagagggcgcccccaaaccaaaagcccagagagcaatgtccccaccaccaagggagtggggacgcagcaggtgcagggtgcggctaagtgggatgttagccttgtccaggagggcatgtgtgtatgcgtgggtgggcggggggagctgggaactgaggccaggggaaaactgctccccactcaggcccatgggagcccctgcagcggcctggtgtgctgtgtagtgtggtggtgagggcacaggtggaagatgggggtgtcggccagagccggtggtaatggtgggcctgggaaaggggcggggccggtgggagccggagcaaagcctgtccagtcccagaaagaaagctgctcctccagtgaggaagcaggcggcacgcatggcgtcactgctcctcgtcctgacgattcctgcgnagatgctcttgtcttcctccttctccagttttttttgggtcttgccccttggttttcctttcctggagttgtggtggtttttccagggtcttggcagcaacccttgtttttgattccctttggtcggccccgaggtctcttaggtgttggcactttcgctgggctccttctgactccctaccagcgctgtcccggggactcaccggacggctcgttgcgcggcctgccccggccccgcttctcagtgccgtccttttcctgcttggaggccaagggctgggctggacttcgagctcgactcactcatcttcccttctctaaggagcaggtggaagagtgatggctgggatgcgcgagcaacgccgccggcctgccggtgcgcgctccgggttgccgggagcggcggtgctgggcgctgaggaccggcctggctccgccgcggccgccgctggtagcaaatgcggatgccttcttggagcccggccagcgccagaaatagccccggctcggagtcccaattagaggagcgcagcaccggctcaggggagcttaaaaagc

SEQ ID NO: 131253 - DNA, 416 bp, Homo sapiens
aataaggaggtgactgctgtgcaggaatgttacctagaagtgtgcagagagaaggataatctagaattgactctcaggaagaccactgaaaaggagcaacagactcaggagaagatcaaagaaaaactcattcaacagcttgaaaaggagtggcagtctaagctggatcaaactataaaggcaatgaaaaagaagaccttagattgtggcagccaaactgaccaagtaaccaccagtgatgttatttccaagaaagagatggcaattatgatagaagagcagaagtgcacaatccagcaaaacttagaacaagagaaggacatagccatcaagggggctatgaagaaactcgaaattgaattggaactcaaacattgtgaaaatattaccaaacaggtagaaatagctgtgcaaat

SEQ ID NO: 131254 - DNA, 407 bp, Homo sapiens
tttcgtctagtggactagagccagggtaaggggatctgctagaagttggtcttccgccaggactagagtttcctcgcggtatatgcctccgtggcctccggaggaccatgtcattagactttggcagtgtggcactaccagtgcaaaatgaagatgaagagtatgacgaagaggactatgaaagagagaaagagttgcagcagttactcacagaccttccccatgacatgctggatgacgacctctcctctccagagctccagtattcggactgcagcgaggatggcacagacggacaaccacatcatcctgagcaattggagatgagctggaatgagcaaatgctgcccaaatctcaaagtgtaaatggctataatgaaattcagagtttatatgctggagaaaaa

SEQ ID NO: 131255 - DNA, 996 bp, Homo sapiens
atgtcggaaatggctgagttgtccgagctgtatgaagagagcagtgacctgcagatggatgtgatgcctggcgagggtgaccttccgcagatggaggtaggcagcgggagccgggagctatccctgcgtccctcccgcagcggggcccaacagctcgaggaggaaggcccaatggaggaggaggaggcccagccaatggcggcgccagaggggaaacggagccttgctaacgggcccaacgctggggagcagccaggccaggtggcgggcgcagacttcgagagcgaggacgagggcgaggaatttgatgactgggaggacgactacgactatcccgaagaggagcagctcagtggtgccggctacagagtatcagccgctcttgaagaagccgacaagatgtttctgagaacaagagaaccagccctggatggcgggtttcagatgcattatgagaagaccccgtttgatcagttagcttttatcgaagagcttttttcactgatggttgtcaatcgtctgaccgaagaactcggctgtgatgagattattgatagagagaacattatttatataaacatttttaataccgtagatgaaaaggatggtttgactctcagccttcgagaatcacagaaactctttcagaatggaaaagaaagagagatacagcttgaagctcaaataaaagcactggagactcagatacaagcattaaaagtcaatgaagaacagatgatcaagaagtccagaacaactgaaatggctctggaaagcttgaagcagcagctggtggaccttcatcattctgaatcacttcaacgagctagagaacagcatgagagcattgttatgggcctcacaaagaagtacgaagagcaagtattgtccttacaaaagaatttggatgccacagtcaccgcacttaaagaacaggttgggatgatttcaaatgagcaactgttatcaacaagtaaagctggttatgttttgtaa

SEQ ID NO: 131256 - DNA, 1290 bp, Homo sapiens
atggtacaagattttgaccatgacaaacaagaagctgtggataggtgtgaaaggacttatcagcagcaccatgaagccatgaaaactcaaatacgtgaaagcctattagcaaagcatgctttggagaagcagcagctctttgaggcttatgagagaactcatttgcaactgagggtcagtacaagaggtggctcagctacagttccagctgcagcaagcacagaaggcacatgctatgagtgcaaacatgaacaaggctttgcaagtgagtgttgccacttggaagaggctctatgggtatctgaattaggcagtagttacatcacctttttgaatcttgggtttctctgtataatagaggtggttggaccaccttcaaaccagcccatgggagttgttcaccatctccttcacacagttggcaagtcaaactcagtaagccagaaagcgccgccatcagcatttaagcccaaggaacacaccactttccatggaggacaaaatctaagagacagagatgaagaattaacagaactaaaagatgaaatttctctctatgaatctgctgcaaaactaggaatacatccaagtgactcagaaggagaattaaatatagaactcactgaatcgtatgtggatttgggtattaaaaaggtcaactggaaaaaatccaaagttaccagatcagtggcgacattagattctcataggagaatgaaccctattgtgaactacacatacgagggatctaggttgcatgctccttatgagaatctaatgcttgatgacctgagcaccacagatgcagaactagacaagtctagaaaccataacagaacaggaaagtccaagcagtcattttgcatcggtatatgcatgggtggagcaactgccctgactggatgggattttggggttcactactcaaggcaaagaggtcgcttttggaatgtgaggaccaaggatcatgtatttgataatgtcggccaccttatcagataccatatggataacagtttgccaatcatctcctctggaagcgaagaccaaaccgcaaaacagcccgaaaaaaacccgaagcccccaagaaaggcactttctccaaccatctactttaagtatgcacatgaagaacaatgccacactaactggaaagatgtctttggcagttctggagaaagatcccgaaacaccaaaacgaggttattaaacacaagctctcaatcaggggaccaaaccaaatcggacaccaaaacaaaccccgaacaaaacaacttcaatattttatga

SEQ ID NO: 131257 - DNA, 2007 bp, Homo sapiens
atgctcctgaatgaccagtggatcaatgacaagattaagaagaaaattgaaaaatattttgaaacaaatgataatggaaacacaacataccaaaacctatgggatacagcaaaagcagtaccagaagggaagtttattgctatatcatttgctgtttctgaagctaaagagaaatggaagagtgagcttgaaaatatgaggaaaaatatacttcctggaaaggaattggaagagaagattcattctcttcagaaggaacttgagttaaagaacgaagaagtccctgtggtcatcagggctgagttagctaaggctcggagtgaatggaacaaagaaaagcaagaagaaatccacagaatccaagaacaaaatgagcaagattaccggcaatttttagatgatcaccgaaataaaattaatgaggtgcttgcggcagctaaagaagactttatgaaacaaaaaactgaactacttcttcagaaggagacagaattacaaacttgtctagaccagagtcgtagagaatggactatgcaggaagccaagcggatccaactggaaatctatcagtatgaggaagacatcctgactgtacttggggttcttttaagtgatacccaaaaggagcacatcagtgattctgaggacaagcagcttttggaaatcatgtcgacttgttcttcaaaatggatgtctgtgcaatattttgaaaaactaaagggctgcatacagaaagcatttcaagatacacttcctctgcttgtagaaaacgctgacccagaatggaaaaagggggcccagcactttaccgactttggggtcgcgggttttgccttcgttatcactaatagtgacctgcggggtcggctacactttaccgagctagatgcggccaatgccgataacgccaacatagctgttgtaatcgagctgagaaatctgcatctggaacggaccgtcaaggtcaacgtccggcgcaggaacgtggtcaacaatcgcctggtacagcggggtcatgtcttccgccatatctacgaggtccagacccgcgataccgttcagggcaaaagcgtaaacgatcgggaagtccacttgctcgtcggccgtaagcaaacgcttttttggtttctaaacgcgtttgcgggattcggccggcaaatgcgtcaaccaccagcagacatgagtcctccatgggacagttacacgttacaacttcaccaccgaaagtcgcttccccctggggtatcaacgatgttgatacggatgttcagaatgaaactcatggaaacacttaaccagtttatttacgctggtcatgaaatgacgaaggctatcgccattgcacagtttaatgatgacagcccggaagcgaggaaaataacccggcgctggagaataggtgaagcagcggatttagttggggtttcttctcaggctatcagagatgccgagaaagcagggcgactaccgcacccggatatggaaattcgaggacgggttgagcaacgtgttggttatacaattgaacaaattaatcatatgcgtgatgtgtttggtacgcgattgcgacgtgctgaagacgtatttccaccggtgatcggggttgctgcccataaaggtggcgtttacaaaacctcagtttctgttcatcttgctcaggatctggctctgaaggggctacgtgttttgctcgtggaaggtaacgacccccagggaacagcctcaatgtatcacggatgggtaccagatcttcatattcatgcagaagacactctcctgcctttctatcttggggaaaaggacgatgtcacttatgcaataaagcccacttgctggccggggcttgacattattccttcctgtctggctctgcaccgtattgaaactgaattaatggccaaatttgatgaaggtaaactgcccaccgaaccacacctgatgcttcgactggccatggaaactgttgctcatgactatgaggtcatagttattggacggcgcgcctaa

SEQ ID NO: 131258 - DNA, 1371 bp, Homo sapiens
atgcccagcattgtacaagaagaagacccaaatgaagagctttcaaaagatgagttcattctgaagttaaaggcagaagtacagcgtttgctgggtagcaactcaatgaagcgtcatctggtgtctcagttacaaaatgacctcaaagactgtcataagaaaattgaagatctccaccaagtgaagaaggatgaaaaaagcattgaggttgagatatcatttgctgtttctgaagctaaagagaaatggaagagtgagcttgaaaatatgaggaaaaatatacttcctggaaaggaattggaagagaagattcattctcttcagaaggaacttgagttaaagaacgaagaagtccctgtggtcatcagggctgagttagctaaggctcggagtgaatggaacaaagaaaagcaagaagaaatccacagaatccaagaacaaaatgagcaagattaccggcaatttttagatgatcaccgaaataaaattaatgaggagcacatcagtgattctgaggacaagcagcttttggaaatcatgtcgacttgttcttcaaaatggatgtctgtgcaatattttgaaaaactaaagggctgcatacagaaagcatttcaagatacacttcctctgcttgtagaaaacgctgacccagaatggaaaaagctgtgggacccctacttccactttttcctttctctgcaaccccgcctttacacgcacattcgcacaacctgcaaacacttggctctttggcttggtgtcttgtgtttaagttggtatgatattgatgcagactttttgattcagttgcagcagttactcacagaccttccccatgacatgctggatgacgacctctcctctccagagctccagtattcggactgcagcgaggatggcacagacggacagccatataccaatggtcagaagcaggaatttaatgaccaagcaaccaatgtaattaaattttcagatcctcaatggaaccattttcagggtcccagttgtcaaggtttggaaccgtataataaagtgacatataaaccttatcagtcttctgcccagaataatggctcaccagcccaggagataacaggaagtgacacattcgaaggcctgcaacaacaatttttaggagctaatgagagtaggtttttgctccgagggaagttcatagccataaatgtctacatcaaaaagactgaaagagcacaaacagacaatctaaagtcacacctcaaggaactagagaaacaagaacaaaccaaacccaaacccagcagaagaaaggaaataaccaagatcagagcagaactaaatggaattgaggccaaagaagccaaaagaacgaatccaaaggataaatga

SEQ ID NO: 131259 - DNA, 3063 bp, Homo sapiens
atggcaaacaaggatgttgtaggagatatagccagtgctttgtccagaccccctggagtccctcaaagcacttctgtctaccccatccttggcttctgtgtgttttgcttctgtgtcactgttcattctgagaacagatgcaggctagtgaagctgctttgggtcaccaagaaccagaacggcctgaggaccatgtcattagactttggcagtgtggcactaccagtgcaaaatgaagatgaagagtatgacgaagaggactatgaaagagagaaagagctggccacagtccccacttctcacacagacatgggcttatgcactcagacctgcctgcttcactctggtaaattctctgccagggccctgagggcatttgagtttatgaccctgctttggcttggtgtcttgtgtttaagttggtatgatattgatgcagaccttttgactcagttgcagcagttactcacagaccttccccatgacatgctggatgacgacctctcctctccagagctccagtattcggactgcagcgaggatggcacagacggacagccatataccaatggtcagaagcaggaatttaataaccaagcaaccaatgtaattaaattttcagatcctcaatggaaccattttcagggtcccagttgtcaaggtttggaaccgtataataaagtgacatataaaccttatcagtcttctgcccagaataatggctcaccagcccaggagataacaggaagtgacacattcgaaggcctgcaacaacaatttttaggagctaatgagaactctgcagaaaatatgcagattattcaacttcaggttcttaacaaagcaaaagagagacaactggagaacttaattgaaaagttaaatgaaagtgaacgtcaaattcgatatctgaatcaccagcttgtaataataaaagatgaaaaggatggtttgactctcagccttcgagaatcacagaaactctttcagaatggaaaagaaagagagatacagcttgaagctcaaataaaagcactggagactcagatacaagcattaaaagtcaatgaagaacagatgatcaaaaagtccagaacaactgaaatggctctggaaagcttgaagcagcagctggtggactttcatcattctgaatcacttcaacgagctagagaacagcatgagagcattgttatgggcctcacaaagaagtacgaagagcaagtattgtccttacaaaagaatttggatgccacagtcaccgcacttaaagaacaggttgggatgatttcaaatgagcaactgttatcaacaaggtcagtacaagaggtggctcagctacagttccagctgcagcaagcacagaaggcacatgctatgagtgcaaacatgaacaaggctttgcaagaagaattaacagaactaaaagatgaaatttctctctatgaatctgctgcaaaactaggaatacatccaagtgactcagaaggagaattaaatatagaactcactgaatcgtatgtggatttgggtattaaaaaggtcaactggaaaaaatccaaagttaccagcattgtacaagaagaagacccaaatgaagagctttcaaaagatgagttcattctgaagttaaaggcagaagtacagcgtttgctgggtagcaactcaatgaagcgtcatctggtgtctcagttacaaaatgacctcaaagactgtcataagaaaattgaagatctccaccaagtgaagaaggatgaaaaaagcattgaggttgagactaaaacagatacctcagaaaaaccaaagaatcaattatggcctgagtcttctacttctgatgttgtcagagatgatattctgctgcttaaaaatgaaattcaagttttacaacaacaaaatcaggaacttaaagaaactgaaggaaaactgagaaatacaaatcaagacttatgtaatcaaatgagacaaatggtacaagattttgaccatgacaaacaagaagctgtggataggtgtgaaaggacttatcagcagcaccatgaagccatgaaaactcaaatacgtgaaagcctattagcaaagcatgctttggagaagcagcagctctttgaggcttatgagagaactcatttgcaactgaggtctgagttggataagttgaataaggaggtgactgctgtgcaggaatgttacctagaagtgtgcagagagaaggataatctagaattgactctcaggaagaccactgaaaaggagcaacagactcaggagaagagacagctattggaggaaagagaagaatatgtaagcaaactgcaggtggaacttgaaaaaaagtaccaagatacacttatgatggaaaagagcaagtggctgaaagatcaagaaactgatattaaacagcaagttgaaagtgaagtgatcttagccaaagcacattgggataaggaagagcaagagatcaaagaaaaactcattcaacagcttgaaaaggagtggcagtctaagctggatcaaactataaaggcaatgaaaaagaagaccttagattgtggcagccaaactgaccaagtaaccaccagtgatgttatttccaagaaagagatggcaattatgatagaagagcagaagtgcacaatccagcaaaacttagaacaagagaaggacatagccatcaagggggctatgaagaaactcgaaattgaattggaactcaaacattgtgaaaatattaccaaacaggtagaaatagctgtgcaaaatgctcatcagcgatggctgggagaactaccagagctggcagagtatcaagcacttgtgaaggcagaacagaaaaagtgggaagaacagcatgaggtctctgtgaacaaaaggatatcatttgctgtttctgaagctaaagagaaatggaagagtgagcttgaaaatatgaggaaaaatatacttcctggaaaggaattggaagagaagattcattctcttcagaaggaacttgagttaaagaacgaagaagtccctgtggtcatcagggctgagttagctaaggctcggagtgaatggaac

SEQ ID NO: 131260 - DNA, 981 bp, Homo sapiens
atggctgacagtacctatgatgtgcacagaagattctggtctgtggtgttcttcctggccggtcgtgagaacgcgtctaataacaattggtgccgaattccgggacgagaaaaaactcgggactggcgcaaggaagatccctcattccagaaccagaactgcgggtcgcgagtgaagaggcccgtggtttgtcaatgcctttttcttctcggtggtaaggagaagctgaggggcccgctgcttccccagtacgccctggagtggctcccagtctacgtcggggaatacgggatccacgaaaaccctggactccatacagcccagtgcttccgcactgtcttagaacttgtcaccaagtacaaacggcttcgaatctactggacatggtgttatgactttcaacacgagatctctgactacctgcagggacagatcaaaaaagccagctctgaagcagatgaagaattctcctctgaagaaacagactgggaggaagaagcagctcattatgagaaaaaagggtaccagccagggcatctctgctccaagcggccccccaaacacccgccacctgccatcagcggctggcacagaaaagccacttatgtaagtccattcagccccctttacgactttaacgagtgtgcaggcatactgctgccatctcccatagtaaccatccagatcccctggctctctgagccccacactgccttttgccacatgcagcaggtagagcggatcggcgatatagaggaacggggcaagatcctggtgtccctcatgtacagcacgcagcagggcggcctcattgtgggaatcatccgctgtgtgcacctggccgccatggatgccaacggctactcagacccctttgtcaagctgatgggcggcaccttggaagcatctctccttcaggaaagcacttatggagtcgatgtctgctatgagctcaagatggagtgcgatgcaggaacatga

SEQ ID NO: 131261 - DNA, 2182 bp, Homo sapiens
atggaacgcagggccctcactggccctggggactgggtgacgtcaggggctgggttgaggtggggcggacctggctccctagaacgtcagctccgggtccaagggatcccggttcagacagggaaactgggtcaaggactgccgcaagcgggaaaaggaaacaggaacaggttccagaggcgaatagtcaaaggccaaggaggaacagcgcacaaccaccgcagaaccgaaccaaaaaagccggaagaacacaccagggaaaaagcacagcaaaatagggaaaacaagaaaaacccggcggacctagaaattcaagacagtctatcagaagtaaagtggaaaatagctttacaaggtatgtttggccttgaactttctctagtgttagaagcccttttgttccttttcacatgttatcaagtggttaaggcagggcggattctagatgaaattcaggacaatctatcagaagtaaagcggggagagagagtaggagcaaagagaaaatatggtacacaaaataagtatacaggcctttccaagggtcttgaacccgaggaaaagttaaggttaggtaggaatacctggagagagattagaagaaaaagaggaaaaagggaaaagaagaaagatcaattagcggaggtctctaggaaaaggagcctgtgctcatcgctggatgggctcggggagccagctcttagtagctctgaagcagatgaagaattctcctctgaggaaacagactgggaggaagaagcagctcattatgagaaaaaagggtaccagccaggtaaagtgctagctaatcagttaaggaagccaaaagcggctggcgaaggccagtttgctgattggcctcagggcagtcggcttcaaggtccgccctatgcggagtccccgccctgcgtagtgcgtcagccctgcgcagagaggcagtgcgcagagaggcagtgcgcagactcattcattcccagagaggaacaaaggaaaatacaacaggaatttccggtctttgaaggagccgagggtgggcgtgtccacgctccggtagaatacttacaaattacagaaattgccgagtcggtccgtaaatacggaaccaatgctaattttaccttggtgcagttagacaggcttgccggcatggcactaactcctgccgactggcaaacggttgtaaaagccgctctccctagcatcacgacggttgtgacccgcatcattcgctacggtacttcatcaaccggacagatctccactatcgtagcacaggcaacccttgtggggcagagcacagaggctgtaattcaaaatccattcagcaatggtggcagcccggcggccgaagctgtcagcggggaggcacgatttgcttattttccagcatccagtgtgggcgataccacagctgtgtctgttcaaactacagaccagagcctacaggccggaggccagttctatgtcatgatgacaccccaggatgtgcttcagacaggcacacagaggacaattgcaccccggacacacccctattctccgaaaattgatggaaccagaactcctcgagatgagagaagaagagctcagcacaatgaagtcgtgtcagatttttgtggaacctcccccaatcatgaaagtttttttttggagcgccctaaaaaccggtccgagaaaccagcacaccaacgggggtcacagccacatctcacgcacttcatattccaggctctttttctggctccagatagtgaccaggatgtgatgagagtggctttcactgagtacaagagagaattttcccaggtcactttgggtttctacgtaggcagaaccggccatgaactgtggctcagggagctggaaatgagtcatggaactgcctcagggaccacagtaaaggtcaaggtctgcaggcctgccagcatggctctaaatgggtgtatttctccaggcctctggaaaggcaggacccccccagactgtgactgggaagagtttgggatgtttacagagtaagtttaaaattctcaggggaaccaagttaggtggaacaatttcttgtctttagccaaaaacagtagttctgtagtttgccacctgaatgaggacctgccttctgaaaagggttaccttcagtcttgggctttagcagagtttcacaactcctttcctggatctc

SEQ ID NO: 131262 - DNA, 1144 bp, Homo sapiens
atggaggtaaccacatttgccatgtgcctgattatagttcttgttcctcttcttcttattcttgtgtcatatggtttcattgctgtggctgtactcaagatcaagtctgcagcaggaagacaaaaagcatttgggacctgttcctcccatctcgttgtggtatccatcttctgtgggacagttacatacatgtatatacagccaggaaacagtccaaatcagaatgagggcaaacttctcagtatattttactccattgttactcccagcttgaacccattaatttatacgtgtttgatgtggtttggctgtgtccccacccaaatctcatcttcagttgtagctcccataattcctgcatgggagcatgggagggacccagtgagagctgatattcagaaaatagcaaaaatgatcaatgatagttactttggttggcttatgctccttgggttccctgggaagcctcagctggagatgatcatctctggggttgtctttttcttctatgcaatttctttgatgggaaatatggtccttatcctgctgccattactggataaacatctccaaacccccatatatttctttcttagaaatctggctatcttggatctttgttacaccacaaatatagtcccacagatgttggtcaatgcctggggtaaagacaagaaaatcacttttggtggctgtgcttttcaacttttcactaatgtgacgctatgcacggttgaatgtatgcttctggctgtgatgtcatatgacccattcaatgctgtctgcaagcctctggactatatgaccataatgaacccccaactctgtcaaggcctggtggccatgacctggttaattggtgtcactaattgcatgatactttccccctgtcctgtgagtcttcctcgatgcggagaccaccacctggatcactatttttgtgaaatatctgcaatggtcaaaattgcatgtggggctaccacagtcatggaggaaactgtaagagttaaagaaagaagaaagaaacacgaaacgtggctttgtagtcaaagacaggttttctttacttaaaacctgagaggcttcccggctaatttcggttaggagcactttctcttacagaccctgcacttgatggatcacc

SEQ ID NO: 131263 - DNA, 2466 bp, Homo sapiens; identical to SEQ ID NO: 117659

SEQ ID NO: 131264 - DNA, 327 bp, Homo sapiens
gggaacatcacacatagcagcttgctccatcagagcatgcaggctaagaaggcaatagaaagagttggccagcaagatggaaactgggtgttgacaggggatgttggaaattactattatggacaaggccacccaatgaagcctcaccgaatccgcatgactcataatttgctgctcaactatggtctctaccgaaaaatggaaatctatctcactcaggcagtgacgcatgtgcactttcctcctggtggggtcaaggccgagttcttggacctgatgaggccacctggagttcctcatatcactggtgacctggccctcagctaa

SEQ ID NO: 131265 - DNA, 1582 bp, Homo sapiens
gcgcccacgcgtccggcgggcgggagggcggacggaccgtctgacggtagggacgggaggcgagcaagatggcgcagacgcagggcacccggaggaaagtctgttactactacgacggggatgttggaaattactattagggacgagggccacccaatgaagcctcgaccgaatccgcatgactcataatttgctgctcaactatggtctctaccgaaaaatggaaatctatcgccctcacaaagccaatgctgatgagatgaccaagtaccacagcgatgactacattaaattcttgcgctccatcccgtcccagataacattgtcgggagtaccagcaagcagatgcagagattcaacgttggtgaggactttcccagtattccgatggcctgttttgagttctgtcagttgtctactggtggttctgtggcaaagtgcctgtgaaactttaataagcagcagacggacatcgctgtgaattgggctgggggcctgcaccatgcaaagaagtccgaggcatctggcttctgttacgtcaatgatatcgtcttggccatcctggaactgctaaagtatcaccagagggtgctgtacattgacattgatattcaccatggtgacggcgtggaagaggccttctacaccacggaccgggtcatgactgtgtcctttcataagtatggagagtacttcccaggaactggggacctacgggatatcggggctggcaaaggcaagtattatgctgttaactacccgctccgagacgggattgatgacgagtcctatgaggccattttcaagccggtcatgtccaaagtaatggagatgttccagcctagtgcggtggtcttacagtgtggctcagactccctatctggggatcggttaggttgcttcaatctaactatcaaaggacacgccaagtgtgtggaatttgtcaagagctttaacctgcctatgctgatgctgggaggcggtggttacaccattcgtaacgttgcccggtgctggacatatgagacagctgtggccctggatacggagatccctaatgagcttccatacaatgactactttgaatactttggaccagatttcaagctccacatcagtccttccaatatgactaaccagaacacgaatgagtacctggagaagatcaaacagcgactgtttgagaaccttagaatgctgccgcacgcacctggggtccaaatgcaggcgattcctgaggacgccatccctgaggagagtggcgatgaggacgaagacgaccctgacaagcgcatctcgatctgctcctctgacaaacgaattgcctgtgaggaagagttctccgattctgaagaggagggagaggggggccgcaagaactcttccaacttcaaaaaagccaagagagtcaaaacagaggatgaaaaagagaaagacccagaggagaagaaagaagtcaccgaagaggagaaaaccaaggaggagaagccagaagccaaaggggtcaaggaggaggtcaagttggcctgaatggacctctccagctctggcttcctgctgagtccctcacgtttctttcccc

SEQ ID NO: 131266 - DNA, 495 bp, Homo sapiens
atgaacaataccccagatcaagtaatggagctggtccaatgtgaaaacactgtcttattgcccagcactgaaaggaatagcatcgacatcaacaaaaaggatgtccacaccaaaaccccattggaaggccaccagcatcaaagacgaaaggatcacaactcctggacagcaagggaacaaaactggatggagaatgagtttgacgaattgacagaagtaggcttcagaaggtgggtaataacaaactcctctgagctaaaggagcatgttctaacccaatgcaaggaagctaagaaccttgaaaaaaggttagacgaactgctaactataataaccagtttagagaagaacacaaatgacctgatggagctgaaaaacatagcagaagaactttatgaagcatacacaagtttcaatagtcgaattgatcaagcagaagaaaggatatccaaaaaaggaaggatatcagagattgaagagcaacttatgcaataa

SEQ ID NO: 131267 - DNA, 1854 bp, Homo sapiens
atggggagaaaccagcacaaaaaggttgaaaattccaaaaaccagaacgcctcttctctgaaggatcacaactcctcaccaccaaggaaacaaaactggatggagaatgagtctgacgaactgacagaagtaggcttcagaaggtgggtaataacaaattcctctgagctaaaggagcatgttctaacccaatgcaaggaagctaagaaccttgaaaaaagtcaaatgaatttttggtgtggggaacttatttttcaggttgaagcactcaataagttaaaaactttaaatagtttaatcaaactgaatgccgtgaagttaaacagagccaaagggaaggaggccatgcatacctgtttaaaacagagtgcttaccgggaagccctctatgacatgcagtcacccctgaacccatgtgttatcctctcagaactctatgttgaaaagtgcaaatacatgtattccaaaatgacgcctttgtggctggtatacaataacaaggtatttggtgaggattcagttggagtgatttttaaaaatggtgatgtttccaggaagatcccacttacaatactatgtttatttgacctgactcagacctcacctagcatgaactgcctttttcctggggagtttctcaaaaatactcagaggcatctgtttaacattgtagctgtcttgggggatgacctggaccgagccattgaggaatttacattgtcctgtgctggctactgtgtagcttcttatgtccttgggattggtgacagacatagtgacaacatcatggtcaaaaaaactggccagtgttgtgaggatgcatatctgattttacgacggcatgggaatctcttcatcactctctttgcgctgatgttgactgcagggcttcctgaactcacatcagtcaaagatatacagtatcttaaggactctcttgcattagggaagagtgaagaagaagcactcaaacagtttaagcaaaaatttgatgaggcgctcagggaaagctggactactaaagaaggactgtataaagcgcggatttttgaagtgacggacagaactgtcaggacctgtattggggaggcggttgccgccgctgctgctgacggtgtgacgttctctgttccggtcacaccacatacgttccgccattcctatgcgatgcacatgctgtatgccggtataccgctgaaagttctgcaaagcctgatgggacataagtccatcagttcaacggaagtctacacgaaggtttttgcgctggatgtggctgcccggcaccggtgtgacaatctaaaaacttgtcacacttcacatggatctgtcatggcggaaacagcggttatcaatcacaagaaacgtaaaaatagcccgcgaatcgtccagtcaaacgacctcactgaggcggcatatagtctctcccgggatcaaaaacgtatgctgtatctgttcgttgaccagatcagaaaatctgatggcaccctacaggaacatgacggtatctgcgagatccatgttgctaaatatgctgaaatattcggattgacctctgcggaagccagtaaggatatacggcaggcattgaagagtttcgcggggaaggaagtggttttttatcgccctgaagaggatgccggcgatgaaaaaggctatgaatcttttccttggtttatcaaacgtgcgcacagtccatccagagggctttacagtgtacatatcaacccatatctcattcccttctttatcgggttacagaaccggtttacgcagtttcggcttagtgaaaccaaaagaaatcaccaatccgtatgccatgcgtatatacgaatccctgtgtcagtatcgtaa

SEQ ID NO: 131268 - DNA, 756 bp, Homo sapiens
atgcccactacccgccccacccaacaacaccaagtttgtttccaggcagcagctcagcacagagagactccatttgtttcagagaaagcaagggaagacaagagtctctgcctggtaatccaaagaattattccagatcttgtccaagaccagcaaggtggcaactctggcacctctgaaaaaaaggcagcagccccagtcaggggcttagagataaaacccccatctccctgggacagagcacctgggggaaggggcagatgtgggcacagcgtcagcagacttaaacgtcctggcctgacggctctgaagagagcagcagatctcctagcacgttcgagcagcagatctcagagcgttcgagctctgctaaagagacaaaaggtagataaatctacgaagatggggagaaaccagcacaaaaaggttgaaaattccaaaaaccagaacgcctcttctctgaaggatcacaactcctcaccaccaaggaaacaaaactggatggagaatgagtctgacgaactgacagaagtaggcttcagaaggtgggtaataacaaattcctctgagctaaaggagcatgttctaacccaatgcaaggaagctaagaaccttgaaaaaaggtaccccagaaactatgcccagagaggagacagtggcacagaacaagccaatggaggaatcgtggactgctttccctattctgggcagagttgggtgtacctcatgggcaggccagactctgctgtactctga

SEQ ID NO: 131269 - DNA, 735 bp, Homo sapiens
  misc_feature (1)...(735): n = a,t,c or g
gccccccggtgcaggtctgnnnnnnnnnnnnnnnnnnnnnnnnnnnnnnnnnnnnnnnnnnnnnnnnnnncaacaacaaaagattgctgtctgtaccttcctctggaagcttcgtcccagacgggcacccatcagatgccagccggagctctcctgttgcataaggtgtctgtcgccccttgctgggaggtatctcccagtcaggaggcaaagtnnnnnnnnnnnnnnnnnnnnnnnnnnnnnnnnnnnnnnnnnnnnnnnnnnnnnnnnnnnnnnnnnnnnnnnnnnnnnnnnnnnnnnnnnnnnnnnnnnnnnnnnnnnnnntgaagctgtgcccacagctgccccttctcccaggtgctctgtccctgggagatgggagttttgtttataagcccctgactggggctgctgcctttctttcagagatgccctacacagagaggaggaatctagagaggcagtctggctacagcggctttgctgagctgtggagggctgtgcccagttggatctttcccggcatctttgtttacactgtgaggggaaaacggcccactcaagcctcagtaatgggagatgccccttccccccaccaagctcgagtgtcccaggtcagcttcaggttgctgtgccggcagcgataatttcaagttagtggatcttagcttgctgggctccatgggagtgggatccactgagctacaccacttggctccctggcttcagacgaaa

SEQ ID NO: 131270 - DNA, 1069 bp, Homo sapiens
atgtcaaccgatgttattaggttggtgcaaagcctcactaagcagtcttttgatcacacctttcccatctccaagctcctctacatcttcttccagcagttcaccaccccgctggcttcgaagtcagacaacaagtttggaaaatggcatcatcccaagaagttgagttgcaagtttcctcttgctgagaaaacctccgctggtgatacccaggcaaacagggtctgtagtgtacctccaacaaaccacagcagacctgcagcagacaggcctgttagaaggaaaattaacaagcagaaaacagccacatcaacatcaacaaaaaggacgtccactcagagaccccatccgaaggtcaccaacgtaaaagaccaaaggatcacagctcctcaccagcaagggaacaaaactggatggagaattgagtttgatgaattgacagaagtaggcttcagaaggtgggtaataacaaactcctctgagctaaagaagcatgttctaacccaatgcaaggaagctaagaaccttgaaaaaaggttaggtgaattgctaactagaataactagcttagagaagaacataaatgacctgatggagctgaaaaacacagcacgagaacttcatgaagcatacacaagtatcaatagctgaatcgatcaaggcaggaaggaaagggtattcagagattgaagatcaacttaatgaaataaagcgtgaagacaagattagagaaaaaagaatgaaaaggaatgaacagagcctccaagaaatatgggactatgtgaaaagaccaaacctacatttgattggtatacatgaaagtgacagagagaatggaaccaagctggaaaacacatttcagaatattgtccaggagaacttcaacctagcaagacaagccaacgttcaaattcaggaaatacggagaacaccacaaagatactcctcaagaagagcaatcctaacacatataatcatcagattcacgaaggttgaaatgaaggaaaaaatgttaagggcagccagagagaaggtcgtgttacccacaaagggaagcccatcagactaa

SEQ ID NO: 131271 - DNA, 1173 bp, Homo sapiens
ggcttactgcgacctctggttcctgggctcaggcagttctcctgcctcagcctcccgagtagctgggattgcgggcgcccgccaccgcgcctggctaatttttgtatttttagtagagacggtgtttcagcatgttggccaggctggtctcgaactcctggccataggtgatctgcctgcctcgtcctcccaaagtactgggattacaggcgtgagccactgcacccacccacgcctggctgatgtttttattttactcatcctgactgaggtctgacaatcctagaagctgaagttcccgggcatccttttgtttcttctgactccccttagtgatagattttcttgagatttgggattggatgctcatggccagctgggggctctgtgggaatccggggtggcctactttgcaggcagtcctttcagaatggttcagccttggctttcgctagctacccaggagcgccagccccagcccattttgtgtgtggttctcagcttgcaggtggccaccaaagccaaccccccccactgtcccgattgtgggtccctatgtttgaggatcccggagatgttacggggggcttctcccttcttacaagctcggtcatgcatatatttgatctggcgctgccaggcattctgtaagggagggcttttccatgtcctggaaatggaactggaaaatgtggctggaaacattaatatggctggaaatggaatttgtctgcagccactacttttgaacccatcttccgggcaatcccttctgtcttgccggagggtggaaacttgcaggccttttgggcagcagggaggcagctctggagggagccgctgcctcagcagtttgccccagccacccccactgcctgggccttcatctgggacagggctggggccccgatgcccgtggggttcccgtggccgatggagagttctcgtctgaacaggtggcaaaggctggagggacctggctgggcacccaccgcccccttgcccgcctgcgccgagccctgtctggtccatgccagctgtggagcctgaccctgtccgtggcagagctaggcctgggctacgcctcagaggagaaggtcatcttccgctactgcgccggcagctgcccccgtggtgcccgcacccagcatggcctggcgctggcccggctga

SEQ ID NO: 131272 - DNA, 1227 bp, Homo sapiens
atgcatggtatcacccttcactctccttttaatggcatcacacggatgaaagagggaaagaaatgcatgctgattggtctatgggctgctatgggtgggcctgaaaaaggcatcacaagttcccactccagtctgtgggactgggtgccaagcccccagccttcaggccctccctggcttgaagtaaaaactggaggaacagacaagaacaaagctggcgagaggccatgcagctcaggtggcaaaggcaaacttgaaggctgctgtgggtgtaatgaaggcatcacttcctccaggaaactctctcctactactctaaatgctctcctctttgctctcatgacattctggcacttagcacagtacgctgcaattagactatggcttaagtgttaccagctctgtgccatcttgtctggtgtccaggaagaatcaattcacatagacaaattgaagaatggtaaatgtgggggattttattgctggatggaggtggccctcagcagtatggatgtggagctggaaaggggatggagtgggaagatgatcttcccccggagttcagttgtcccacagccaatctcctctctgaccgtccccagccgaactcttcttgacattcagacactccttttcttctctccttctctgtgtgatcttgagcctgaatggctggacagtgtgcagaaaaatggagagctgttttatttggaattgagtgaggatgaagaagaaagcctccttcctgagacaccaactgtgaaccatgtcaggttcagtgaaaatgagattatcattgaagatgactacaaagaaagaaaaaagtatgaacccaaactcaagcagtttaccaaaattttaagaaggaaaagacttttacccaagcgctgcaataaaaaaaatagcaatgacaatggaccagtatccattctaaagcatcagtccaatcagaagacaggagtcattgtccaacagcgatacaaagatgtgaatgtttatgtaaaccccaaaaagctaactgttatcaaagccaaagagcagctcaagcttctggaagtgctggttggaattattcatcagaccaagtggagctggagaagaaccggaaagcagggtgatggagagaggcttgtggttcatggcctgctgccagggggatctgctatgaagagcggtcaggtactcattgagatcttgattaatgatgacaccttgcgggaaatgtga

SEQ ID NO: 131273 - DNA, 1743 bp, Homo sapiens
ttttttttttttttttttatactacaaacctattttatttatataacttcttatgaagtagattttgtacacatggtaggctaaaaattaaaactgcttttccacaaaactgataaattactagattcttggttctttcatgatatcataacattaaatcattaaaaatataaggcaatttaatgtaaactactagcatttacaaaacagtaaagttataaaaaactgtattacaaggcaaatgcaccaaataccagtgaacatgaaacaggagtgaagtttgctgggagaacattaaaaatcaccttttcagtggggttcacttcacattcatggctgcactggggcctggacacgttcagcaccatgaagcagacacttcgggcaactagggaatgttacttctgtttgactttttttctaaaatgaaaaagcagtctgtgaaatgcgtgttaagaacgatctatctagagtcgcacagtgtccagggccgctgcaagttggactcaagttgtaccccaccctcgttttatttggacaaagtacttcaatttggccactctggaagaatttaattttcttgatatcaactgggctcagaatcagtgttcccatttttgaattttccaacctgtccaatccgtccatttgacaaaatactgggagcggacttctttttggatttcctgtcctcctgtcctttcctcttctttttcttgaaaatatctgtttcttgggccagtctcttttcttcttcctttgctgcctttttttctttaatttgctcctgtaaaaccttgtaattcacataactctttttaggaggcttagcgcccagcataatggcacgttcctgttccaggattctctcctttccttttccataacccgtgataccaaaccggtgcacttctaaacgagctttttctaggttaaattcgtgtgtatccacatctctctccaaaacactaggattagcctgctttgtgttcttgttatgatctggcgtcaattttctttttttattgctgtgaaattctaccacttctacttgttccctattgttctttagggaagagggaggaactgcagcagcaaggatctctggtcctgtgggggtcccagaaggagcacaatgccgctcttctctaagttccttgaagaagctcgaagcgctcttcctctggcctcttatgagagaaccaggtaggggaagatggctctgctgccaaggccgctgaagccatcacatctctcttcttgttttcccttttctttatgatcttcttctgttctgtttcacctttctgtacctccaaagtcgtaaaggttctggagcagagcgtcaagaagtgtcggagaacttttccgcaaatcattttggaggacagccagcgccacccagcttctctcccgcttgtctttttttcctccaaccccctcttcctctcttggttttaacgggtctttttggaatggcagaatgttggtcacccaccttacgctctcaggtgacgatggcgctgaaaaaatatcgcccacaggccgacgatacccgactgctcgccgagttgtcagcgatagccagcaccatacaaattctgaacaggtatcagcaggtagaactgcactgcccagctcatccccagtgcccactcctacactgtccagccgtgtcttcatccacagtacccacgcttgcaatgtccacatccgccctacccagcggtagcctttcctcat

SEQ ID NO: 131274 - DNA, 1739 bp, Homo sapiens
ccgtaaattcacgggtcgtcgatttcgtccaagctccatttcatgagtaagcgtgagagccgttcagtttcctccagctctgctgaagccagcacagaagtagcccaaactcttccctctgctgacagcaaattttaggcaaagtcttgagaaagaagaaattgggtccagaaagggaagtgaggagaatcagatcccagacctttggggagaaggagcaaccgcctctggcacagcccatcagggagaaagagcaggttgagaagagtcctaagctaacagccccaaacaggtgggtgttgctcaactccctgaggcatgtggttgtaaggcagaacccacagaccttgcaggaagaaggctctcggggccatggccagggttcagcatcaacaattgacttacagcgagtgggactttgagcacggatgccggggagccggctcggcttgctgcagagtccctgtgtggacacagcccccaagagtgagtgggaagcctctcctgggggtctggacagaggcaccagttccacacttggggccatcttcatcgtcgtcaacgcgtgcctgggtgcagggttactcaacttcccagcagccttcagcactgcggggggcgtggcagcaggcatcgcactgcagatgggtatgctggttttcatcatcagtggccttgtcatcctggcctactgctcccaggccagcaatgagaggacctaccaggaggtggtatgggctgtgtgtggcaagctgacaggtgtgctatgtgaggtggccatcgctgtctacacctttggcacctgcattgccttcctaatcatcattggcgaccagcaggacaagattatagctgtgatggcgaaagagccggagggggccagcggcccttggtacacagaccgcaagttcaccatcagcctcactgccttcctcttcatcctgcccctctccatccccagggagattggtttccagaaatatgccagcttcctgagcgtcgtgggtacctggtacgtcacagccatcgttatcatcaagtacatctggccagataaagagatgaccccagggaacatcctgaccagtattgaagaatgtcgcaatataatcgtgcagtttggtgttcgggaggtcacagctgcccaggttgcaagggttttgggaatgatggctcgaactcattcaggattaacagatggcattccattacagagtatttctgctccgggcagtgggatctggagtgatgggaaagataaaagtgatggagcacaggcacacacatggaatgtagaagtcttgattgacgttcttaaagaactgaatccaagtttgaatttcaaggaagtaacttatgaactggaccatcctggatttcaaattcgtgacagtaaaggacttcataatgtggtttatggcattcagaggggtttgggtatggaagtgttcccagtagacctcatatatagaccttggaaacatgctgaaggccagggacagtctccctcaattcgccaacttatcatgcatgcaatggcagaatggtacatgagaggggagcagtatgatcaggccaaattgtctcgaatacttgatgtggcccaggacttgaaggccttgtcaatgctgctaaatggtactccatttgcctttgttattgaccttgctgcacttgcttcacgtcgtgaatacctcaaacttgataagtggctcacagataaaattcgagagcatggg

SEQ ID NO: 131275 - DNA, 1184 bp, Homo sapiens
tttcgtcacgtgggccggcggtccagggccggaatggcagcaagctcagagataatcattcaggtcttcgtgagctaaggccaaacaaacaaaaaacacttgctttgatggactgaatactgttattagaagtaaatatggaaaatgaaccagaccatgaaaatgtggaacagagcctctgtgccaagacgagcgaagaagagctgaataagtctttcaatctagaagcttcactttcaaaattctcttacatagatatggacaaggaactggagttcaaaaatgatctgattgatgacaaggagtttgatattcctcaagttgatactcctccaacactggaaagcatactaaatgagactgatgatgaagatgagtcttttgttcttgaggatcctacattgttaaacattgatactattgattctcactcctatgatacttcatctgtggcaagctcagatagtggtgacaggaccaacttaaaaaggaagaagaaattacctgattctttttcacttcatggatcagttatgcgccattcacttttgaagggaatttctgcccagatagtgtctgcagctatcagaatcaagctttgcgactctgtctgggtagcactagtgttggaggtcagtatggcgctatctctgccctcagtatcaacaatgattgctcaagacttctttgtggctttgctaaaggacaggagagtgatgggagtgagaacctgtgaatctagatgtctgttcagtggttccaagggtgaagtctgctgtattgagcctctgcattctaagcctgagttgaaagatcatcccatcacacagttttcattattggccatggcatccttgacaaaaatactggtcattggattgaaaccatttttgattttatggatgacttttccctatggccggatggatccttccagtgtgccactgctggcctggcactttgtagcagtacaaaattatgtgaatcccatgcttgccttctgcagaggagatgttgttcattttctattggatcacactgataaaaccatgttttatctcctgttacagtttttcaaagaaatgtttcaggatgttgattccacatgtttaaaattcccattaaaagctttgctcttgtctgcagctgacctggacacaactgttttggcagccatcaagtag

SEQ ID NO: 131276 - DNA, 412 bp, Homo sapiens
tttcgtcgcggcgcttggggcctttgctgactcgttgggggttccggccccggggaggctgcatctccaacgatagtccaaggagaagtttcactacagagaaacgaaaccggaacctcctgtacgagtatgcgcgcgagggctacagcgcactccctcagctggacatagagcggttctgcgcatgcccagaagaggccgcacacgccctggagctccgcaagggggagctgcgctcggcggacctgcccgcgatcgtgagtgcgcctgcgccggccggggggcgcaaacgtttgctttacggaagaattgtgtttgcaagatgccctccggcagggggcgaacctgtagtaagaattttagttattttccaagttagccaacgtcttgtgcatggcacccacttatgtgg

SEQ ID NO: 131277 - DNA, 1134 bp, Homo sapiens
acccttcgagcgtgtatattatatcgggccttccagaactaaaggaaaaataaagacactgcttgaggccttggtcaatgactaaccaccaccccatgtcgccgggcaacactgattgctggatctaagggtgccggcccttacacgctgaaaccaggtggtcccctcttaccatcacactgcgtgcagagggtgagagagaatggctcacgtgatgaagaggcgggacacagacgacgattgggcgacgaaggactctatcgcggtcaactttcctcaggatctgattggctcgtcacggtcaggttcgctgccttgcaattggtctaaacgcggagtgggcgggacgaagtgccgccttgtccccggtccaagatggctgcgtccatggcgcggcgcttgtggcctttgctgactcgtcggaggttccggccccggggaggctgcatctccaacgatagtccaaggagaagtttcactacagagaaacgaaaccggaacctcctgtacgagtatgcgcgcgagggctacagcgcactccctcagctggacatagagcggttctgcgcatgcccagaagaggccgcacacgccctggagctccgcaagggggagctgcgctcggcggacctgcccgcgatcatctcgacatggcaggagctgaggcagctgcaggagcagatccggagcctggaggaagagaaggcagctgtgactgaggcagtgcgggccctgctggcaaaccaggacagtggtgaagtgcaccaggaccccaagtaccagggtctgcgggcacgtggccgggagatccggaaggagcttgttcacctgtaccccagggaggcccagcttgaggagcagttctacctgcaggcgctgaagctgcccaaccagacccacccagacgtgcccgtcggggatgagagccaggctcgagtgctccacatggtcggagacaagccagttttctccttccaacctcggggccacctggaaattggcgagaaactcgacatcatccgtcagaagcgcctgtcccacgtgtctggccaccggtcctattacctgcgcggggctggagccctcctgcagcacggcctggtcaacttcacattcaacaagcttctccgccgg

SEQ ID NO: 131278 - DNA, 1203 bp, Homo sapiens
ttctttcacacgctctcgtggatctactatcctgcgcaccagggaaggccggtctgtatccaactctttcttcagactttccactggtgagctccgccctgaagctgggtagagagaggcatgccacttctcagggtcccagacaccatcactgtcatatttttcagaaaggcatgaaggcctctgtttggaatgggggagttcttttatatccaagagttcttcttttgtatagcgatgggggcatttggaggcaggaggcttcttcaggtcaaggaaagcatctccactttctgtttcacccatacttctcctatccatggctccttggtctacaatgctctgcacctggaagataaatcggcacaaaattgtcaccgagaacaggaggagggaggccgaatctcccggcccgggcgcttcaagctggagctagcgcaggcccgcagccgtcctccccggcccggcggctcggtccccgccagccagcccgccggctacccgccggccgccttgcgggcctcgcgcccctgcccaccccctgcgggcgccccggcgcccgcgctcacgcacgcgaccccgggagcaatgcgcccgcgccccttctacacccgggagcaccgggcgcgcggtgccccggacccagccgccaccgccgccgacccttactcggtgcctccgccgctcggcggccctttgcctcggccgccgctcccctccccgctgcccgcaccggtacgaggcccggccctaacgtccccaccctcttctgggctcggcctttccggcagtgagcccggcaaggacctcagtcgggttcctccgagcccggtgaaatctgtccgagcctccgcttcctcccctgaaagtgcaggtgatgttgtctacctgcgggtctgtgcgtgcgcggatccaaatcaggggtttcctcctcccggctccgtggcccaggagcggaagggctggtatatgggcgaccttactcccactgagcccgcagggagtaacgcagtaaacaaacctggaagccttccccgcgtgggagtgtggtttactgaatattttaagcctactatcgagacctactgttcagaaaaaaggattcctttcaagatattactggtcattaacaaggcacctggtcaccaaggaactctgatgaagatgtacaaagagattaatgttactttacatgtctgctaa

SEQ ID NO: 131279 - DNA, 394 bp, Homo sapiens; identical to SEQ ID NO: 129353

SEQ ID NO: 131280 - DNA, 3363 bp, Homo sapiens
gtaagggccgctcctcctttgaagaggttttgcgtctctttccgccggtggcgtcggcgctcacgcaggggcgggtcccggtagcgccaggcggtgcagggcgggaaggggattcgtggcgacggcggcggcagggacagcaggagcagtggtgctgtcagcgcggccgtcggagacatgggagacccggggtcggagataatagaatctgtccctccagctggccctgaggcatttgagtcaacaacggatgaaaatgaagacgacattcagtttgtcagtgaaggaccattacgacctgttcttgaatacattgatctggtcagcagtgatgatgaagagcctagcacctcttatactgatgagaatattaaacgtaaagaccatattgattatcagaaggataaagttgctttaactctggctcgtctagcccgccatgttgaagtggagaaacagcagaaagaagagaagaatagagcattcagagaaaaaattgattttcagcatgctcatgggttacaagaattggaatttattcgaggacattctgatacagaagcagcaagactgtgtgtggaccagtggctaaaaatgccaggactcaaaacaggcacaattaattgtggaacaaaaagttcattccgaagaggaggccacacgtgggtgtctgggaaaccaattttatgtcctataatgcactgtaacaaggagtttgacaatgggcaccttctcttaggacatttgaaaaggttcgatcactctccatgtgatccaacaattacactacatggacctttcttcagctcctttgcttgtgtagtatgttataaaaaatttgttactcaacaacaatatagagatcacctttttgataaggaagccacagatgatggacataacaacaaccttcttcctcagattattcagtgttttgcatgtccaaattgcttccttctttttagcagaaaggaggagtgttcaaagcatatgtctggaaagaatcatttccatcagagtttcaaactgggtgataacaaaggaattgcacatccaatatctttcccatcttttgcaaagaaacttttgatctctctgtgcaaagatgttccctttcaagttaagtgtgtggcctgccacaagacactgcgttcccacatggagctcactgcccatttcagagttcattgtcgaaatgctggacctgtagctgtagctgagaagagcattacccaggttgcagagaaattcatattaagaggttattgtccagattgcaatcaagtctttgtggatgaaaccagcacccaaaatcataagcagaattcaggacacaaagtccgagtcattaactcagtggaagaatcagtcttactctattgccacagcagcgaagggaacaaggatccttcttctgacttgcatttattgttggatcaatcaaaattttcatcacttaaaagaaccatgtctattaaagaatctagctcactggagtgcattgccattccaaaaaagaagatgaatttaaaagataaaagccatgaaggtgttgcttgtgtccagaaagaaaaatcagtagttaaaacctggttctgtgaatgcaatcagcgattcccaagtgaagatgcagtagaaaagcatgttttctcagcaaacacaatgggttataaatgtgtggtctgtggaaaggtatgtgatgattcaggggtcattcgtttacacatgagccggattcacggaggggcacatttaaataactttcttttctggtgtcggacatgcaaaaaggagttaacaaggaaagatactatcatggcacatgtgactgaatttcataatggacacagatatttttatgagatggatgaggtagaaggtgaaactttgccatcatcctctacaacattggataatttgactgctaacaagccttcatcagctattactgttattgatcattccccggcaaatagttctccgaggggtaaatggcaatgccggatttgtgaagatatgtttgattcccaggaatatgtaaaacagcactgcatgtctttggcaagccacaagtttcatagatacagctgtgctcactgcagaaagccttttcataagatagaaacattgtaccgacattgccaagatgagcatgacaatgagataaagattaaatacttctgtgggctttgtgatcttatctttaatgtggaagaagcatttctgagtcattatgaggagcaccacagcatagattatgtatttgtgtcagaaaaaactgaaacttcaattaaaaccgaagatgattttccagtaatagagaccagtaaccagttaacttgtggttgccgtgagagttacatctgtaaagtcaacagaaaagaagattatagcagatgtctccaaatcatgctggataaaggaaaactgtggtttcgctgcagtttatgttcggcaacagcacagaatttaaccgacatgaacactcatatccatcaagtgcacaaagaaaagagtgatgaggaggagcagcagtatgtaatcaagtgtggcacctgcaccaaagcatttcatgatcctgagagtgcacagcagcatttccatagaaaacattgcttcttacagaaacccagtgtggctcattttggatctgaaaaatcaaacctgtacaagtttactgctagtgcctcacatacagagagaaaactgaaacaggcaataaactattcaaaaagtttagacatggagaaaggagttgagaatgacctaagctatcagaatatagaggaagaaattgttgagcttccagatttggattacctgcgaaccatgactcatatagtctttgtagattttgataactggtcaaacttttttggtcatctaccagggcatctaaaccaaggaacatttatttggggctttcaaggaggaaacaccaattggaagcctccgctcaactgtaagatttataactacctgaacaggattggatgcttcttccttcatcctcgctgtagtaaaagaaaagatgctgctgattttgccatatgtatgcatgctggccgtctagatgaacaactacccaagcaaattcctttcaccatcctctcaggagatcaaggttttctggagctagagaatcaatttaagaagactcagaggccagctcatatactaaaccctcaccacttagagggagatatgatgtgtgccttgttaaatagcatatctgataccaccaaagaatgtgacagtgatgataacatgggtgccaaaaatacttcaataggagaagaatttatatccacagaagatgtggaattagaagaagctattagaagaagtcttgaggaaatgtaa

SEQ ID NO: 131281 - DNA, 2039 bp, Homo sapiens
  misc_feature (1)...(2039): n = a,t,c or g
gagnggnggcggctgcggcagtagggacagcaggagcagtggtgctgtcagcgcggccgtcggagacatgggagacccggggtcggaaataatagaatctgtccctccagctggccctgaggcatctgagtcaacaacggatgaaaatgaagacgacattcagtttgtcagtacccactggagctcaggggaacttgccaccctgaagggaaggaaacaagactggctggcttcactacttgttgattgcagagccctggagacttcagcaaatataggtggcagccagatagtggttacagcaggccgtagatatggctgcagcgaccaaaaacttagattatatcacccaagtcccttcaaatacctggaaagccttttcaaggtggaggtgtacaaacaagcccaaactgtgaagacaacaataaatacccaactctttgatgccaagacagtgatgaacgaaggaccattacgacctgttcttgaatacattgatctggtcagcagtgatgatgaagagcctagcacctcttatactgatagaatgcctgaatctaaggtgccatcctctgagaatcatcgcccagaaatgtgctctagctgcaatgttcctcttcccattggagatagcagctccttctctgggagttgttccagcagtccagaaaggatagtttctcaaacttcctctgttgagaacccattggagaaccagaaaaatgatcaaaataattcagatactaagatctctgagacagagacccttaaatcatcacagaattttcagactctgccttcatctccacttctggtcccccaagaatctttggcctcttctgaggtcaaagagaatttacgtataagattcttcttcagcttcacagcatggacgggatgccatcctctatctccagacacaagtagctgaaatgtcccgagtgatacgtgatctgcagtccaggagctgttttagatttcatcattctaggccaagtgagaactcctcagttccttgggacatctccacctctaaagaggaaaatttatccacagttgaagaagaaactgattacaaatcaccatcagctgatgacaaagggcagccatctgaccccagccaatctagtttcacaggtcttttgaagagaatggaacaaagaggtgttataaaaagggtgacattacaatctgaagcggagtcatgtgaagggaaacctgattgtgtgacttctaaaaaacgtttggttcctccattgcatcctcttctgagaattgccaccactgaggtttttaaagaccctgctgattgccatccttcttccttcatgggacacagggtatatcctgtggccaaggacacctctcctttccaaccaaacccaccagctgaaggccccattgtagaagcattagaacacagcaaaagaggaaacacaacatcccctctagattctacctcaaaagaaatggaggtcatgggttgtaggttttaccacgctgcctccattgcagcccgagctgctagctacatggcctatatgactcaatatcagcgtaaactctgggaagacatggaagatctggttcatgacccagaatttgatcgtggaaaagcaagatgcataatatctgatggtatggatgcaggcctttggcaactttgtactactagggacataatggactctgtagtcagagttatggccatggccatagactatagacggcaggcctggcttcgacttacatctctcactaagaaaacccaggagaagatctcccacttgccctttgatggtacttccctttttggacaagatgtgaaagctgttgttgcagaagacaacaatataaaagaaaatgactataaagatcacaaatactataatcagcatcgatacttttatagtcatgatcagaaagcacattatcacaatagaggatactccaaaggggattggtacaaacctcgaaaccacccctatagatatagaaagaagggagactctccagaacgccatgggtacaagaattaa

SEQ ID NO: 131282 - DNA, 768 bp, Homo sapiens
atgaggattcatctggagattccgaatggggctgcagcatttgaaaagcagaacaatgataacttccttaaagcatcattgggaaaaaaaccccccggctccctgcccacgcacaacaccgacctagctcctcgcgcctcgccgccccggcagccgccggcgtcgccgccgcttccatctctcgcgggtctccaggacgccgccgcccgagtgctcactctcccgccgctgcgtggccggcgtcaggcccaggcctacctcccctgcccggagggacccgcgcctggtgcccgcctccctgccccggcgctccccaaccgcgcggcgaggagcatgcgcagtgggacagcccggctcggcgggcaccgccggcgaggggcgggaggggccgaagacccgaggactgctgcgaggccgggttgggtaacccgagaggagggttggatatttgacgttgaccgtggtgctgaaagaaaattaagaaagcactggagaaatgctccaccaaaattaaggaataaacttagaaagaaggagacatgggattcaggaaaccaggaattcagcaaaggagagaggaactcccaagaggatgccaaaaggaagttccagtatcacagttttgcactgggcctagagagctaccagtccaaattgggtcaagaagatagaaggcaccaggaacagctatccccaaggacaaaagaaacagtgaaactgattgataatctgaaaaggatgcagaattggacaaagagacattattga

SEQ ID NO: 131283 - DNA, 581 bp, Homo sapiens
ctgctgtgttccacctgtcagtcccacagcagctccccagccacactcaggtcccagtgttctgttacatgagtccagtcactggcattaaccagttacctgtctatcctttccaacaggaaatgaaatttaaaagagacaaggccaccctggaagagccgctgaaagctactattgatgggtcaaggggaaaattgaggacagaaattgacaaagtgccaagcacctatacttgtattaatcacttgttagaatatcatgaagagtcaaactacaaggcagccctctccatactgcttttcctggtcaacctctctttgaatgggagacacatgagggccttgcttgaaatgacgaagatcttcaataaaatttcttgcatgaggaaagaagaagaatggggagaagaagaggaagaacatacatgcaaacaagcatcacctggcatggggaggaacaagccaagcagaccttttaagtccgaaagtcccagcaagtctttagataaggttaaccaaagctgtgggcccagggctaggaaagacttccatgatccctgtgagcaggaccctagtccatag

SEQ ID NO: 131284 - DNA, 3358 bp, Homo sapiens
gagctggagcagccgccaccgccgccgccgagggagccccgggacggcagcccctgggcgcagggtgcgctgttctcggagtccgacccagggcgactcacgcccactggtgcgacccggacagcctgggactgacccgccggcccaggcgaggctgcagccagagggctgggaagggatcgcgctcgcggcatccagaggcggccaggcggaggcgagggagcaggttagagggacaaagagctttgcagacgtccccggcgtcctgcgagcgccagcggccgggacgaggcggccgggagcccgggaagagcccgtggatgttctgcgcgcggcctgggagccgccgccgccgccgcctcagcgagaggaggaatgcaccggccgcgccgccgcgggacgcgcccgccgctcctggcgctgctggccgcgctgctgctggccgcacgcggggctgctgcccaagaaacagagctgtcagtcagtgctgaattagtgcctacctcatcatggaacatctcaagtgaactcaacaaagattcttacctgacccttgatgaaccaatgaataacatcaccacgtctctgggccagacagcagaactgcactgcaaagtctctgggaatccacctcccaccatccgctggttcaaaaatgatgctcctgtggtccaggagccccggaggctctcctttcggtccaccatctatggctctcggctgcggattagaaacctcgacaccacagacacaggctacttccagtgcgtggcaacaaacggcaaggaggtggtttcttccactggagtcttgtttgtcaagtttggcccccctcccactgcaagtccaggatactcagatgagtatgaagaagatggattctgtcagccatacagagggattgcatgtgcaagatttattggcaaccgcaccgtctatatggagtctttgcacatgcaaggggaaatagaaaatcagatcacagctgccttcactatgattggcacttccagtcacttatctgataagtgttctcagttcgccattccttccctgtgccactatgccttcccgtactgcgatgaaacttcatccgtcccaaagccccgtgacttgtgtcgcgatgaatgtgaaatcctggagaatgtcctgtgtcaaacagagtacatttttgcaagatcaaatcccatgattctgatgaggctgaaactgccaaactgtgaagatctcccccagccagagagcccagaagctgcgaactgtatccggattggaattcccatggcagatcctataaataaaaatcacaagtgttataacagcacaggtgtggactaccgggggaccgtcagtgtgaccaaatcagggcgccagtgccagccatggaattcccagtatccccacacacacactttcaccgcccttcgtttcccagagctgaatggaggccattcctactgccgcaacccagggaatcaaaaggaagctccctggtgcttcaccttggatgaaaactttaagtctgatctgtgtgacatcccagcttgcgattcaaaggattccaaggagaagaataaaatggaaatcctgtacatactagtgccaagtgtggccattcccctggccattgctttactcttcttcttcatttgcgtctgtcggaataaccagaagtcatcgtcggcaccagtccagaggcaaccaaaacacgtcagaggtcaaaatgtggagatgtcaatgctgaatgcatataaacccaagagcaaggctaaagagctacctctttctgctgtacgctttatggaagaattgggtgagtgtgcctttggaaaaatctataaaggccatctctatctcccaggcatggaccatgctcagctggttgctatcaagaccttgaaagactataacaacccccagcaatggatggaatttcaacaagaagcctccctaatggcagaactgcaccaccccaatattgtctgccttctaggtgccgtcactcaggaacaacctgtgtgcatgctttttgagtatattaatcagggggatctccatgagttcctcatcatgagatccccacactctgatgttggctgcagcagtgatgaagatgggactgtgaaatccagcctggaccacggagattttctgcacattgcaattcagattgcagctggcatggaatacctgtctagtcacttctttgtccacaaggaccttgcagctcgcaatattttaatcggagagcaacttcatgtaaagatttcagacttggggctttccagagaaatttactccgctgattactacagggtccagagtaagtccttgctgcccattcgctggatgccccctgaagccatcatgtatggcaaattctcttctgattcagatatctggtcctttggggttgtcttgtgggagattttcagttttggactccagccatattatggattcagtaaccaggaagtgattgagatggtgagaaaacggcagctcttaccatgctctgaagactgcccacccagaatgtacagcctcatgacagagtgctggaatgagattccttctaggagaccaagatttaaagatattcacgtccggcttcggtcctgggagggactctcaagtcacacaagctctactactccttcagggggaaatgccaccacacagacaacctccctcagtgccagcccagtgagtaatctcagtaaccccagatatcctaattacatgttcccgagccagggtattacaccacagggccagattgctggtttcattggcccgccaatacctcagaaccagcgattcattcccatcaatggatacccaatacctcctggatatgcagcgtttccagctgcccactaccagccaacaggtcctcccagagtgattcagcactgcccacctcccaagagtcggtccccaagcagtgccagtgggtcgactagcactggccatgtgactagcttgccctcatcaggatccaatcaggaagcaaatattcctttactaccacacatgtcaattccaaatcatcctggtggaatgggtatcaccgtttttggcaacaaatctcaaaaaccctacaaaattgactcaaagcaagcatctttactaggagacgccaatattcatggacacaccgaatctatgatttctgcagaactgtaaaatgcacaacttttgtaaatgtggtatacaggacaaactagacggccgtagaaaagatttatattcaaatgtttttattaaagtaaggttctcatttagcagacatcgcaacaagtaccttctgtgaagtttcactgtgtcttaccaagcaggacagacactcggccag

SEQ ID NO: 131285 - DNA, 1002 bp, Homo sapiens
atggatcttgaagttgagaacaaaactccccagaatcagcacaatcacttaatgagcttgcgaattgaaattatctttgctacagcccaagaactgagtgaaacagagctgtcagtcagtgctgaattagtgcctacctcatcatggaacatctcaagtgaactcaacaaagctgctgtgttccacctgtcagtcccacagcagctccccagccacactcaggtcccagtgttctgttacatgagtccagtcactggcattaaccagttacctgtctatcctttccaacaggaaatgaaatttaaaagagacaaggccaccctggaagagccgctgaaagctactattgatgggtcaaggggaaattttattgaagatcttcgtcatttcaagcaaggccctcatgtgtctcccattcaaagagaggttgaccaggaaaagcagtatggagagggctttgagagagaaaagaacagcgtgtcaagctgtgaacttcttgagatcagaacaggttcattcacccagaaaatgtttatcttcattgtgccacctcggtacttaacctggggcagaggtttggatactggggagtgcaagaggaagggttgggttggagattcttacctgaccctcgatgaaccaatgaataacatcaccacgtctctgggccagacagcagaactgcactgcaaagtctctgggaatccacctcccaccatccgctggttcaaaaatgatgctcctgtggtccaggagccccggaggctctcctttcggtccaccatctatggctctcggctgcggattagaaacctcgacaccacagacacaggctacttccagtgcgtggcaacaaacggcaaggaggtggtttcttccactggagtcttgtttgtcaagtttggtaagcagacccctactggggatggactttggccctcagcccaatgtggtaggatggctagagtccacagggacaggaaggaaggaatgcacacttag

SEQ ID NO: 131286 - DNA, 325 bp, Homo sapiens
atgtgcatgtccgtaaaggctgtagcaaataaaacattacaaagtggccagcagcacccagtagccttgtctgaaagttttgtagcaaatgcttctggtaagacaacccagtctgccacacaggatggattcctggcaaattctagagcacagatttccagcaagttccacagcaggaacaggacatggctaaggcaagaaacagtgacatttaaggatgtggctgttgaccttacccaggaggagtgggagcaaatgaaacctgctcaaagaaacttgtatcgagatgtgatgctggagaactacagcaacctagtcacagtgg

SEQ ID NO: 131287 - DNA, 543 bp, Homo sapiens; identical to SEQ ID NO: 128452

SEQ ID NO: 131288 - DNA, 634 bp, Homo sapiens
tttcgtaaacgtcgctggcgcggagggatggttcggcgctttaggcgtctgtcacagacctatctgcgggtcgccttcacccagcatctcagaaactgcgcgcgggatgaacattcgggtgtttccggcaggtgacgctgccgagtccccgcagcagggggcgagcaagggactcgcggttgacgggacacggatcctctaaggcccagagtgtcccgagtagcggcagtggggagtgctcagggtacgctaatgatctgtgtcttgtaaagagcatattgctgggcttacatccgtttatcttgtttgactgttattttaatagcttggtgttctcaagagtctgccctttccgaggaagaagaggatacaaccaggcctcttgaaacagtgacatttaaggatgtggctggtgaccttacccaggaggagtgggagcaaatgaaacctgctcaaagaaacttgtatcgagatgtgatgctggagaactacagcaacctagtcacagtgggctgtcaagtcaccaaaccggatgtgatattcaagttggagcaagaagaggagccctgggtgatggaggaagaaatgtttgggaggcactgtccagaacccagaagaggagagaactgctgtg

SEQ ID NO: 131289 - DNA, 531 bp, Homo sapiens; identical to SEQ ID NO: 128451

SEQ ID NO: 131290 - DNA, 1188 bp, Homo sapiens
atgcttcctgccccttccctggtagtgggtgtggagggggtgactgcccagcttctgcagcgccagcgacttcctccaccttgttcccgccctgcagggtctgagcacctccctcatgcagacagagccccggctcccatgttcaccatgctgagaaagacctgcgggggacagcaggaggacagccggggaatgggcccgcacttgcccaggaggctggctgctggctggttcctcttccagaagtccgtgcagatcctgtcctctggctttgccttgcctaagacccagtctgcaccaaggctgagtccctggacttctggagagagagggctgtccctttgtgccctacaagtacagtgtgtgggcgcctcccctgggccctgcacaggttctgtggcaccggcagcatgcgggaagaggcagagctcgtgcatgcccgacctcgctcctcacggctccctgggcagcagcgccctggcagttggaactggaaggcttatcagagtccacgcagccccaccgccctccccactctcggggtcagttgtgtccaacaatttagctgctacaacccaggtagcaaaagtcaagctaaaattccaggctgccttccccaacccagaaattgaaaacaaacttgcaaaatgtgagcccagcagagcaagatctacagcactgacccagatgactgatgacccgacatcctcaagcccagcttcagggcccactacaaggccctactactgcttcactgccccaagcccacctgtggaattgaacatagagtttatcctaaacggagtcacctggatcagcgcctgggcttttattggtgttttgtctgcaatgggctttggccacgtaaatgtgaacaaaatgagcatacgagttgaatggatcacagcatttactattgctgctgggagagctgcaactggttatctagcttacaaaagattttatgacaaagatcatcagaataaagctatgatgaaccttcacatccagaaagacaaccccaagatagtacatgcttttgacatggaggatttggaagataaagctgtgtactgccattgctggaggtataaaaagttcccattctgtgatgggtctcacacaaaacacaacgaacagactggagacaacgtgggacctctgatcatcgagaaaaaagaaacttaa

SEQ ID NO: 131291 - DNA, 851 bp, Homo sapiens
  misc_feature (1)...(851): n = a,t,c or g
atcgagaccatagagcactgtggnggaattccccgccgcggcgcctgcgcggtagcatcgcggagtcggtgctttagttcgccgctggcatcctttacttttaccgggcgtgcgagtcccgattgagctcggtatcctagtgcacacgccttgcaagcgacggcgccatgagtctgacttccagttccagcgtacgagttgaatggatcgcagcagttaccattgctgctgggagcagctgcaattggttatctagcttacaaaagattttatgttaaagatcatcgaaataaagctatgataaaccttcacatccagaaagacaaccccaagataagacatgcttttgacatggagggatttgggagataaagctgtgtaactgccgttgttggaggtccaaaaagttcccattctgtgatggggctcacacaaaacataacaaagaagactggagacaatgtgggccctctgatcatcaagaaaaaagaaacttaaatggacacttttgatgctgcaaatcagcttgtcgtgaagttacctgattgtttaattagaatgactaccacctctgtttgattcacctttcgctggattctaaatgtggtatattgcaaactgcagctttcacatttatggcatttgtcttgttgaaacatcgtggtgcacatttgtttaaacaaaaaaaaaaaaaaaaaaggaaaaaccaacctcatggcctgtgggttattttggtcttgtaaggatccatttctttaaaatactgacatatagagttgtaccttatatagaatatagttgtatcttgaagtcaacatattaaattattctcaaaattaaaaaaaaaaaaa

SEQ ID NO: 131292 - DNA, 454 bp, Homo sapiens
  misc_feature (1)...(454): n = a,t,c or g
tgcgctggggcacccgnccggnntnnacgctcgacgatttcgtgctaaacctggtgcggctgctatcccgctgcgaggcgatggcagcggagaaacgggacccggacgagtggcgcctggagaagcaaaccggcctctgaggtgatcaatgaatattcctggaaggtggattttctgaaggggatgctgcaagccgagaagctgacctcctcctcagagaaagcactggccaaccagttcctggcccctggccgtgtgccaaccacagccagagagcgagtgcccgccacaaagacggtgcatctgcagtcacgggcgcggtacaccagcgagatgcggagtgagccactaggcacggactctgcagagcctgagatggacgtaaggaagagaacgtgagtgtctgcggccctggggcagtagtggcaattgggcggtgcggcagggacggagg

SEQ ID NO: 131293 - DNA, 303 bp, Homo sapiens
ccagcttggcacgagggccaaccacagccagagagcgagtgcccgccacaaagacagtgcatctgcagtcacgggcgcgggacaccagcgagatgcggagtgagctactaggcacggactctgcaggtgagtcaccatgaacacaacaggacttgagggccagctgactaggacaagacatgtatccttgctgccccggggcctccatgccgagactccatgccctgactccaacaggagcatcaccaaactacacctggaggaagagccaggacagaggaaatggccccgagaggaaacaaa

SEQ ID NO: 131294 - DNA, 813 bp, Homo sapiens
ttatcttcccacatttctgcagacctcctcctcagagaaagcactggccaaccagttcctggcccctggccgtgtgccaaccacagccagagagcgagtgcccgccacaaagacggtgcatctgcagtcacgggcgcggtacaccagcgagatgcggagtgagctactaggcacggtagggctccttccctggtccctgggaatcccttggacaggaataggggttctatgcttgtaggcagccagaaccacaatactgtcagatacaggaaccctaagggggtccagcaatctcttccctgggtcatcacacaaggtgagatgctgggctggggcgagaacggcgctgtgccggcgtgcgtagcggggtttccgccgcgtgggggccaaagcgccgggcgtgtctctcaggggatcacggcatctcaagatactgacgttgatgacatcggccaagacgccgtttccagataaagccacagtcacaggttccagaacacgctcctctccctttgcccacagcctcagatccaccaggcactcgcctcggtgcccttctgagagcaggctgagtccagggggccaaaggctggggttcccttcatctgtcctgaactgtagcaagtgcagctggcagctggcagcgtgcatggggttttcattctgatcgtctgacgcgtcaaatgggaaacctgttatgaacccaagtacaactgggacagcccgtatcccgctcttagaatttaggccggaaatggcttgaaccccggactcaaattttccagtgaccaagatcattccacggcactccat

SEQ ID NO: 131295 - DNA, 890 bp, Homo sapiens
tttttttttttttttttgggcgggggtctttatttgagtttaggcatgattcgaatgaagaggatcaagctaatgaagatgaagcagacgataatgagcatggcccagagcagccagttgactgacttctgcgtgtgctgctccagccgttctgattccgttcttcagtttctccaggttctggtccgccattttcagtgagtgtgacagggtctggttgtccttcttgatgacactctgggcggccaggggtattggtcttgaagctcccgggccagtcctaagcatctcttccgccagcttttcctggaggttctgatgtcgctgcaggacgaggtcttagctcagctgccgactgcttctcactcactgggctggggaccctggccactccagttctcttccttacgtccaatctcaagcttctgcaagagtccgtgcctaagtagctcaattccgcatcttcgctggtgtaccgcgcccgtgactgcagatgcaccgtctttgtggcgggcactcgctctctggctgtggttggcacacggccaggggccaggaactggttggccagtgctttctctgaggaggaggtcagcttctcggcttgcagcatccccttcagaaaatcccaccttccaggaatattcattgatcacctcagaggccggtttgctggaaggcaggaagaagaaaaacaaaacctcgcgtggaccttcagggcctgcaacatgtcctctagggctcccacgtacttctccaggcgccactcgtccgggtcccgtttctccgctgccatcgcctcgcagcgggatagcagccgcaccaggtttagctccagcctcgacgccgccattatcgcccggccctacaccaccccttccgccacgaaa

SEQ ID NO: 131296 - DNA, 1377 bp, Homo sapiens
atggtaaggagggatgagggagcagaagtggaggagtgtcaacagtcagaaaatgcacctgcagccggatctggccatctcacagtgggacagcagcagcaggtccttcggagcagcagcacctccgacatccccgagccgctgtgctcagattcttctcagggtcaaaaggcagaaaacacacagaattcgagttcttcagagcctcagcctattcaagagaataaaggacatgtgaagagagaacatgaaggaataacaatcttagttcgaagaagcagcagccctgctgaattggatttgaaagatgatttgcagcagacacaaggaaaatgtagggaaagacagaagagtgaaagtaccaacagtgacacaactctgggctgtaccaatgaggcagagctgtccatgggcccatggcagacctgtgaggaagacccagaactgaatactcccacagatgttgtggctgatgctgatgcccgtcattggttacaactgagtcccaccgatgcttcaaatttaacagatagcagcgagtgcctcacagatgactgtagtataatcgccggggggagcctcactggttggcacccagactctgctgctgtgttatggcgaagggtcttggggatcctcggagatgtgaataacatccagtcacccaagatccatgccagagttttctgctatctctatgaactctggtacaaactagcaaaggcggcgacactgccaaatgaatataaggaaggcaaactacaagcctacaggctgatctgtgccatgatgaccagacgccaggacgttctgccaaactcagatttcctggtgcatttttaccttgtgatgcacctgggattaaccagcgaggatcaggcaaaacaggaagtgtgcacaccttgccttgccagtgctgctgaatgtgtatgggtagactctgcagtcagcgtgcatcccagagcccacgtgcagtcattagggaagccctgctccctagctacatccctagggtgcagagaagcagctggagaaacagcgcaactccagttagcaccacagcctccagcagaggcagttatactatctctggaacattaccctgaaaaccaccccctgaccctcaaaggagccatggctggccccactcaaggagagtcagagcacagacctgctcaaccctatccccacctgttgacacaactggaacttctcccatgcgaattcagcatgaatgtacctacagatagccctcctggaacaattcacggtggctgcatcctcacagaagcactctccaagtttaggcttgcacaagaggcagagtcacaattcctttctatatggaacatcaacatccctcatccctacagatga

SEQ ID NO: 131297 - DNA, 6192 bp, Homo sapiens
atggttttggatgaccttccaaacttagaagacatctatacttccttgtgttcatcaacaatggaagactcagagatggattttgactctggactagaagatgatgacacaaaaagtgatagtatcttagaggattccacaatttttgtggccttcaaaggaaatatagatgataaagacttcaaatggaaattagatgcaatattgaaaaacgtgcccaatttgttacacatggagtccagcaagctaaaagtacagaaggtggagccctggaacagcgtgcgtgtgacattcaacatcccccgggaagcagcggagcggctacggatccttgctcagagcaacaaccagcagcttcgggatttagggattctctccgttcagattgaaggggaaggtgctattaacctggctttggctcagaaccgaagccaagatgtgagaatgaatggacccatgggagctggaaattcagttaggatggaggcgggatttcctatggcaagtggtccaggaataataaggatgaacaaccctgccactgttatgatacccccgggtggaaatgtgtcatcttccatgatggcaccaggccccaatccagagctgcagcccaggactcctcgccctgcttctcagtcagatgcaatggatccactcctctctgggctccatatacagcagcaaagtcatccctcaggatctttagctcccccacatcacccaatgcagcctgtctctgtgaacagacaaatgaacccagctaattttccccagctgcagcagcagcagcaacaacaacaacagcagcagcagcagcagcagcagcaacaacagcaacagcagcaacaacagttgcaggcaagacccccacagcaacatcagcagcaacagccacagggaattcgaccccagtttactgccccaactcaggtgcctgttcctccaggctggaaccagctgccttctggagcccttcaacctcctccagcccagggttctctgggcacaatgactgcaaaccaagggtggaagaaggctcccttgcccggcccaatgcaacagcaactccaggcaagaccatccttagccacggtacagacgccttcccaccctccccctccatatccctttggcagccagcaagcctcacaagcccacacaaactttcctcagatgagcaacccaggccagttcacagctcctcagatgaagagtttgcagggagggccctctagggtcccaactcccttgcagcagccccacctcaccaacaagtctcctgcctcctcaccctcctccttccagcagggatcccctgcatcctccccaacggttaaccaaactcagcagcagatgggaccaaggccacctcaaaataacccacttccccagggatttcagcagcctgtcagctctccgggtcggaatcctatggttcaacagggaaatgtgccacctaacttcatggtgatgcagcagcaaccaccaaaccaggggccacagagtttacatccaggcctaggaggaatgcctaaacgcctcccacctggcttctcagcaggacaggccaatccgaactttatgcaaggtcaggtgccttcgaccacagcaaccacccctgggaattcaggagcccctcagctgcaagcaaatcaaaatgtccagcatgcaggtggtcaaggagctggtcctcctcaaaaccagatgcaggtgtcccacgggccgccaaatatgatgcagcccagcctcatgggaattcatggcaacatgaacaatcagcaggctggtacttctggggttcctcaagtgaacctcagcaacatgcaaggccagccccagcagggcccaccatctcagctgatgggcatgcaccagcaaatcgtgccctcccagggccagatggtccagcaacaaggaaccttgaaccctcagaaccctatgatcctttcaagggcccagcttatgccacagggccagatgatggtgaaccccccgagccaaaatcttgggccctcgccccaaaggatgaccccacccaagcagatgctttcccagcagggcccacaaatgatggcgccacataaccagatgatggggcctcaggggcaggttttgctccaacagaacccaatgatagagcagattatgaccaatcaaatgcaggggaataagcagcagtttaacactcagaaccagtccaatgtcatgccgggaccagcccagataatgaggggaccaactccgaacatgcaaggaaatatggtgcagtttacgggacagatgtcaggacagatgctgccccagcaagggcctgtgaacaacagtccatctcaggttatgggcattcagggacaggtcctgcggccaccagggcccagcccacacatggcccagcagcatggtgatcctgctactacagcaaataacgatgtcagtttatctcagatgatgcctgatgttagcattcaacaaaccaacatggtcccccctcatgtgcaggccatgcagggaaacagtgcctcgggaaaccacttctcaggccatgggatgtctttcaatgcacctttcagtggagctcccaatggaaatcagatgtcctgtggtcaaaatccaggcttcccagtcaataaggatgtcacgctaacgagcccattgttggtcaacttattgcagagtgacatatctgcaggccattttggggtaaacaataagcaaaataataccaacgcaaataaaccgaagaagaagaaaccccctcggaagaagaaaaatagtcagcaagatctaaacaccccagatactcgcccagctggtctggaagaggctgatcagccaccgttgcctggagaacaaggaattagcttggataactcaggccctaaactgccagaattttcaaaccggccaccaggttatccttctcaaccagttgaacagaggccacttcagcagatgcctcctcaactcatgcagcatgtggcacccccaccacagccaccacagcagcagccacagccacaactgcctcagcagcagcagccaccacctcccagtcagccacagtctcagcagcagcagcagcagcagcaacaaatgatgatgatgctcatgatgcagcaggatcccaaatcagttaggcttccagtctctcaaaatgtccatcctccaaggggccccctgaaccccgactcccagagaatgcccatgcaacagagtggcagtgtgcctgtcatggtcagtctgcaaggacctgcctccgtgccaccatcacctgataaacaaagaatgccaatgcctgtgaatactcccttgggaagcaattcaaggaaaatggtctatcaggagagcccgcagaatccttccagctcgccactggcggagatggcctcactccctgaagcaagtggcagtgaagcaccatctgtcccaggaggcccaaacaacatgccttcacatgtagtacttccccagaatcagttaatgatgacagggccaaaacctggaccatcgcccctttcagcaactcaaggtgcaactccccagcaaccccctgtaaattccctgcccagctctcacggccaccacttcccaaatgtggctgcgccaacccagacatctaggcccaaaacaccaaacagagccagccccagaccctattatcctcagacacccaacaaccgccctcccagcacagaaccttcagaaatcagtctgtcaccagaaagactcaatgcctccatagcaggactcttccctccacagattaatattcctttacctcctaggccaaatttaaacaggggctttgatcaacaaggcctaaatccaacaactttgaaggccatcgggcaagcaccttcaaatcttaccatgaatccttccaattttgctaccccacaaactcacaaattagattctgtggtagtgaattctggaaagcagtctaattctggagcaacaaaacgggcaagtccaagcaacagtcgcaggtctagtcctgggtccagtaggaaaaccactccaagccctgggaggcaaaattcaaaagcccctaaacttactctggcctctcagacaaatgcagccctattgcagaatgtggagttgccgagaaatgtattggtcagtcccactcctctggccaatccccctgtacctgggagctttcctaacaacagtgggctgaatcctcagaattctactgtgtctgtggctgcagttgggggtgttgttgaggataacaaggagagcttgaatgtgcctcaggacagtgattgccagaattcccagagtaggaaggaacaggtaaacattgaactaaaagcagtccctgcccaagaagttaaaatggttgtccctgaagatcagtccaaaaaggatgggcagccttcggatcctaacaaacttcccagtgtcgaagagaacaaaaatttggtgtctcctgctatgagggaagcaccaacatcgttaagtcaacttcttgacaactctggagctcccaatgtgacaattaaaccccctgggcttacagatctggaagtaacacctccagtagtttctggggaggacctcaaaaaagcatctgtcattcccacactgcaggatctgtcttcttctaaagaaccttctaattccctaaacttacctcacagtaatgagctgtgttcatcccttgtgcatcccgaattgagtgaggtcagttctaacgttgcaccaagcatccctccagtaatgtcaagacctgttagctcttcctccatttccactcccttgcccccaaatcaaataactgtatttgtcacttccaatcccatcacaacttcagctaacacatcagcagctttgccaactcacttgcagtctgcattgatgtcaacagttgtcacaatgcccaatgcgggtagcaaggttatggtttctgagggacagtcagctgctcagtctaatgcccggcctcagttcattacacctgtctttatcaattcatcctcaataattcaggttatgaaaggatcacagccaagcacaattcctgcagccccactgacaaccaactctggcctgatgcctccctctgttgcagttgttggccctttacacatacctcagaacataaaattttcttctgctcctgtaccgcctaatgccctctccagtagtcctgctccaaacatccagacaggtcgacctttggtccttagctcacgagccacccctgttcagcttccttcccctccttgtacgtcttctccagttgtcccttctcatccccctgtgcagcaagtgaaagaattgaatccagatgaggctagccctcaggtgaacacctcagcagatcagaacactcttccctcttcacagtcaaccacaatggtttctccccttttgaccaatagtccagggtcctctggcaaccggcgaagcccagtctcgtctagtaagggcaaaggaaaagtggacaaaattggccaaattttgttgaccaaggcatgtaagaaagttacaggctctcttgagaaaggggaagaacaatatggtgcagatggagagactgaaggccaagggctagacaccacagctccggggctcatgggaacagagcagttatccacagagctggacagtaaaaccccaacgcccccagcacccactctgctaaaaatgacctctagccctgtgggcccgggcactgcctcagcaggacccagcttacctggcggtgctctccccaccagtgtacgctcgatagtaaccactctggtaccctccgagctcatctccgccgtaccgaccacaaaaagcaatcatggtggcatagcatctgagtcacttgcgggtggcctagtggaggagaaggtgggatcccatccagaacttctacccagcatagccccgtcgcagaatttagtctcaaaggaaacttcaaccacagcactgcaggcctctgttgccagaccagagctggaggtaaatgctgccatagtctctggacaaagcagtgagcccaaagagatagttgaaaagtccaaaatcccaggccgaagaaactcccgaactgaagagccaactgtggcctctgaaagtgtggaaaatggacatcgtaaacgatcttctcgacctgcttcagcctccagctctactaaagacataaccagtgcggtgcaatccaagcgaagaaaatccaagtaa

SEQ ID NO: 131298 - DNA, 8280 bp, Homo sapiens
atggttttggatgaccttccaaacttagaagacatctatacttccttgtgttcatcaacaatggaagactcagagatggattttgactctggactagaagatgatgacacaaaaagtgatagtattttggaggattccacaatttttgtggccttcaaaggaaatatagatgataaagacttcaaatggaaattagatgcaatattgaaaaacgtgcccaatttgttacacatggattcggagacagcagcaaaagggaaaaataccgaagtgcgtcaattcgatcaatcggcgattaaaaatattgagtctgcaaaaggacgtgatgtgtgggacagctggccgctgcaaaacgctgacggaacagtagctgaatacacgggctatcacgttgtgtttgctcttgcgggaagccggaaagacgctgatgacacatcaatctacatgttttatcaaaaggtcggcgacaactcaatcgacagctggaaaaacgcgggccgtgtctttaaagacagcgataagttcgacgccaacgatccgatcctgaaagatcagacgcaagaatggtccggttctgcaacctttacatctgacggaaaaatccgtttattctacactgactattccggtaaacattacggcaaacaaagcctgacaacagcgcaggtaaatgtgtcaaaatctgatgacacactcaaaatcaacggagtggaagatcacaaaacgatttttgacggagacggaaaaacatatcagaacgttcagcagtttatcgatgaaggcaattatacatccggcgacaaccatacgctgagagaccctcactacgttgaagacaaaggccataaataccttgtattcgaagcccaacacggggaacagaaaacggattcccaaggcgaagaatctttatttaacaaagcgtactacggcggcggcacgaacttcttccagtccagcaagctaaaagtacagaaggtggagccctggaacagcgtgcgtgtgacattcaacatcccccgggaagcagcggagcggctacggatccttgctcagagcaacaaccagcagcttcgggatttagggattctctccgttcagattgaaggggaaggtgctattaacctggctttggctcagaaccgaagccaagatgtgagaatgaatggacccatgggagctggaaattcagttaggatggaggcgggatttcctatggcaagtggtccaggaataataaggatgaacaaccctgccactgttatgatacccccgggtggaaatgtgtcatcttccatgatggcaccaggccccaatccagagctgcagcccaggactcctcgccctgcttctcagtcagatgcaatggatccactcctctctgggctccatatacagcagcaaagtcatccctcaggatctttagctcccccacatcacccaatgcagcctgtctctgtgaacagacaaatgaacccagctaattttccccagctgcagcagcagcagcaacaacaacaacagcagcagcagcagcagcagcagcaacaacagcaacagcagcaacaacagttgcaggcaagacccccacagcaacatcagcagcaacagccacagggaattcgaccccagtttactgccccaactcaggtgcctgttcctccaggctggaaccagctgccttctggagcccttcaacctcctccagcccagggttctctgggcacaatgactgcaaaccaagggtggaagaaggctcccttgcccggcccaatgcaacagcaactccaggcaagaccatccttagccacggtacagacgccttcccaccctccccctccatatccctttggcagccagcaagcctcacaagcccacacaaactttcctcagatgagcaacccaggccagttcacagctcctcagatgaagagtttgcagggagggccctctagggtcccaactcccttgcagcagccccacctcaccaacaagtctcctgcctcctcaccctcctccttccagcagggatcccctgcatcctccccaacggttaaccaaactcagcagcagatgggaccaaggccacctcaaaataacccacttccccagggatttcagcagcctgtcagctctccgggtcggaatcctatggttcaacagggaaatgtgccacctaacttcatggtgatgcagcagcaaccaccaaaccaggggccacagagtttacatccaggcctaggaggaatgcctaaacgcctcccacctggcttctcagcaggacaggccaatccgaactttatgcaaggtcaggtgccttcgaccacagcaaccacccctgggaattcaggagcccctcagctgcaagcaaatcaaaatgtccagcatgcaggtggtcaaggagctggtcctcctcaaaaccagatgcaggtgtcccacgggccgccaaatatgatgcagcccagcctcatgggaattcatggcaacatgaacaatcagcaggctggtacttctggggttcctcaagtgaacctcagcaacatgcaaggccagccccagcagggcccaccatctcagctgatgggcatgcaccagcaaatcgtgccctcccagggccagatggtccagcaacaaggaaccttgaaccctcagaaccctatgatcctttcaagggcccagcttatgccacagggccagatgatggtgaaccccccgagccaaaatcttgggccctcgccccaaaggatgaccccacccaagcagatgctttcccagcagggcccacaaatgatggcgccacataaccagatgatggggcctcaggggcaggttttgctccaacagaacccaatgatagagcagattatgaccaatcaaatgcaggggaataagcagcagtttaacactcagaaccagtccaatgtcatgccgggaccagcccagataatgaggggaccaactccaaacatgcaaggaaatatggtgcagtttacgggacagatgtcaggacagatgctgccccagcaagggcctgtgaacaacagtccatctcaggttatgggcattcagggacaggtcctgcggccaccagggcccagcccacacatggcccagcagcatggtgatcctgctactacagcaaataacgatgtcagtttatctcagatgatgcctgatgttagcattcaacaaaccaacatggtcccccctcatgtgcaggccatgcagggaaacagtgcctcgggaaaccacttctcaggccatgggatgtctttcaatgcacctttcagtggagctcccaatggaaatcagatgtcctgtggtcaaaatccaggcttcccagtcaataaggatgtcacgctaacgagcccattgttggtcaacttattgcagagtgacatatctgcaggccattttggggtaaacaataagcaaaataataccaacgcaaataaaccgaagaagaagaaaccccctcggaagaagaaaaatagtcagcaagatctaaacaccccagatactcgcccagctggtctggaagaggctgatcagccaccgttgcctggagaacaaggaattaacttggataactcaggccctaaactgccagaattttcaaaccggccaccaggttatccttctcaaccagttgaacagaggccacttcagcagatgcctcctcaactcatgcagcatgtggcacccccaccacagccaccacagcagcagccacagccacaactgcctcagcagcagcagccaccacctcccagtcagccacagtctcagcagcagcagcagcagcagcaacaaatgatgatgatgctcatgatgcagcaggatcccaaatcagttaggcttccagtctctcaaaatgtccatcctccaaggggccccctgaaccccgactcccagagaatgcccatgcaacagagtggcagtgtgcctgtcatggtcagtctgcaaggacctgcctccgtgccaccatcacctgataaacaaagaatgccaatgcctgtgaatactcccttgggaagcaattcaaggaaaatggtctatcaggagagcccgcagaatccttccagctcgccactggcggagatggcctcactccctgaagcaagtggcagtgaagcaccatctgtcccaggaggcccaaacaacatgccttcacatgtagtacttccccagaatcagttaatgatgacagggccaaaacctggaccatcgcccctttcagcaactcaaggtgcaactccccagcaaccccctgtaaattccctgcccagctctcacggccaccacttcccaaatgtggctgcgccaacccagacatctaggcccaaaacaccaaacagagccagccccagaccctattatcctcagacacccaacaaccgccctcccagcacagaaccttcagaaatcagtctgtcaccagaaagactcaatgcctccatagcaggactcttccctccacagattaatattcctttacctcctaggccaaatttaaacaggggctttgatcaacaaggcctaaatccaacaactttgaaggccatcgggcaagcaccttcaaatcttaccatgaatccttccaattttgctaccccacaaactcacaaattagattctgtggtagtgaattctggaaagcagtctaattctggagcaacaaaacgggcaagtccaagcaacagtcgcaggtctagtcctgggtccagtaggaaaaccactccaagccctgggaggcaaaattcaaaagcccctaaacttactctggcctctcagacaaatgcagccctattgcagaatgtggagttgccgagaaatgtattggtcagtcccactcctctggccaatccccctgtacctgggagctttcctaacaacagtgggctgaatcctcagaattctactgtgtctgtggctgcagttgggggtgttgttgaggataacaaggagagcttgaatgtgcctcaggacagtgattgccagaattcccagagtaggaaggaacaggtaaacattgaactaaaagcagtccctgcccaagaagttaaaatggttgtccctgaagatcagtccaaaaaggatgggcagccttcggatcctaacaaacttcccagtgtcgaagagaacaaaaatttggtgtctcctgctatgagggaagcaccaacatcgttaagtcaacttcttgacaactctggagctcccaatgtgacaattaaaccccctgggcttacagatctggaagtaacacctccagtagtttctggggaggacctcaaaaaagcatctgtcattcccacactgcaggatctgtcttcttctaaagaaccttctaattccctaaacttacctcacagtaatgagctgtgttcatcccttgtgcatcccgaattgagtgaggtcagttctaacgttgcaccaagcatccctccagtaatgtcaagacctgttagctcttcctccatttccactcccttgcccccaaatcaaataactgtatttgtcacttccaatcccatcacaacttcagctaacacatcagcagctttgccaactcacttgcagtctgcattgatgtcaacagttgtcacaatgcccaatgcgggtagcaaggttatggtttctgagggacagtcagctgctcagtctaatgcccggcctcagttcattacacctgtctttatcaattcatcctcaataattcaggttatgaaaggatcacagccaagcacaattcctgcagccccactgacaaccaactctggcctgatgcctccctctgttgcagttgttggccctttacacatacctcagaacataaaattttcttctgctcctgtaccgcctaatgccctctccagtagtcctgctccaaacatccagacaggtcgacctttggtccttagctcacgagccacccctgttcagcttccttcccctccttgtacgtcttctccagttgtcccttctcatccccctgtgcagcaagtgaaagaattgaatccagatgaggctagccctcaggtgaacacctcagcagatcagaacactcttccctcttcacagtcaaccacaatggtttctccccttttgaccaatagtccagggtcctctggcaaccggcgaagcccagtctcgtctagtaagggcaaaggaaaagtggacaaaattggccaaattttgttgaccaaggcatgtaagaaagttacaggctctcttgagaaaggggaagaacaatatggtgcagatggagagactgaaggccaagggctagacaccacagctccggggctcatgggaacagagcagttatccacagagctggacagtaaaaccccaacgcccccagcacccactctgctaaaaatgacctctagccctgtgggcccgggcactgcctcagcaggacccagcttacctggcggtgctctccccaccagtgtacgctcgatagtaaccactctggtaccctccgagctcatctccgccgtaccgaccacaaaaagcaatcatggtggcatagcatctgagtcacttgcgggtggcctagtggaggagaaggtgggatcccatccagaacttctacccagcatagagctggaggtaaatgctgccatagtctctggacaaagtgagcccaaagagatagttgaaaagtccaaaatcccaggccgaagaaactcccgaactgaagagccaactgtggcctctgaaagtgtggaaaatggacatcgtaaacgatcttctcgacctgcttcagcctccagctctactaaagggattcaggttccctcttccaggtatttactggaggagaaggggagggggatcatagggtacccatttctccccagcaacctagaaagaaagagaggcctgtgggagaaaatgaaaagaggccccctgaaggccctgaacctggataggaacaatttgcagattgagacagtgggagtcctggactcctactcaggactgctggctagccatactgagcagggtgtgaaatacaaggccagaggcaaggtgaagactgagctgtcagccttgggatggcttcaccccatggctgcctcgttccctagattccctccatcttctccctctaactcacgtctcacagtcctcttctacatactgtacctttccaggcctaagcagctccacagagtaccgcccccaaggcagaaggaaggggagactaaaagcaaaaccctgagcccttactggagggcaatgacagcagcccaggctgcacaggctctacctggagtgagggtgaagggtgaatgggttcagaggcagattagaggatcagagatggggaaattgagggtgtcggggaaggaacggctatcacccaacctcacacgctttaagaagggaggtttcggtgtccagcccgaggagtcggaggagcccgacagggatcgggatcggcaaggggttcgtggcgcggccggtggacgctcagtagttgaactggcgctggcacggctggtagatgaagctgctctggttcttggaccggcgcggacggctctcgcgggctcggttctgccgctgcaccgccttggcgctcagcgcgtggcgctctgcccgctgccgggcccgctgcagccgccgcacctggcccgccttctccagcagcgccgcccgcgctgggagaggagcggcgtggcgcgcggcccgcggctcgcggcgggcgggcgtcaattccctgtgaggacagagccaggctcggtcaagccggattggggtgcccgacgcccttcttgtgggtaccaacccggaggtgcctcctcggttctagcccttaacaggccatctgcccttagaatgacttcacaggcccaggagacagacccaggcctcacccggcaggtcaatgatgagccagccgtccacttcatcctcctccgacacgaaggcgcgggggcagtcggggtcttcggggggcgagggggtgctgaagaagaggctggagaggcgctggaacatggttgcaaagagaaagtaggggatcagaggcctgaccccagcccctggataagcctaggaaatcgccgatccccctgcagccccctttggattgcagcgtctcacccagggcccagccccgacacagcggctaccgggtcacgggaggacaagcgacccgagcctgtgggggcgctcggcgggcttgagaaaagagggacatccccaacccccggttcccggggagcatctgggaatgtagagaagttagtgaagctgacgtga

SEQ ID NO: 131299 - DNA, 1177 bp, Homo sapiens
tcccgtgtcgacgatttcgaggcgctccaaggcccgcccgggagggccggggccgcgctcagaattttgatttggctgctgggctgctaccttgaaatccaagccctaaaaatgccagcttctttggacttagaagatgacctggataaatgataaaaattaagaaagagattttgaagttttcttattgtcctcttggcatatgcttctggaataatattcaccatggttttggatgaccttccaaacttagaagacatctatacttccttgtgttcatcaacaatggaagactcagagatggattttgactctggactagaagatgatgacacaaaaagtgatagtattttggaggattccacaatttttgtggccttcaaaggaaatatagatgataaagacttcaaatggaaattagatgcaatattgaaaaacgtgcccaatttgttacacatggattcggagacagcagcaaaagggaaaaataccgaagtgcgtcaattcgatcaatcggcgattaaaaatattgagtctgcaaaaggacgtgatgtgtgggacagctggccgctgcaaaacgctgacggaacagtagctgaatacacgggctatcacgttgtgtttgctcttgcgggaagccggaaagacgctgatgacacatcaatctacatgttttatcaaaaggtcggcgacaactcaatcgacagctggaaaaacgcgggccgtgtctttaaagacagcgataagttcgacgccaacgatccgatcctgaaagatcagacgcaagaatggtccggttctgcaacctttacatctgacggaaaaatccgtttattctacactgactattccggtaaacattacggcaaacaaagcctgacaacagcgcaggtaaatgtgtcaaaatctgatgacacactcaaaatcaacggagtggaagatcacaaaacgatttttgacggagacggaaaaacatatcagaacgttcagcagtttatcgatgaaggcaattatacatccggcgacaaccatacgctgagagaccctcactacgttgaagacaaaggccataaataccttgtattcgaagcccaacacggggaacagaaaacggattcccaaggcgaagaatctttatttaacaaagcgtactacggcggcggcacgaacttcttcc

SEQ ID NO: 131300 - DNA, 450 bp, Homo sapiens
atgacctggatacatgataaaaatttagaaagagattctggttttcttattggccccttggcgtacgcttctggaataatattcaccagggttttggatgaccttccaaacttagacgacatctatatttccttgtgttcatcaacagtggaagactcagagatggattttgactctggactagaagatgatgacacaaaaagacagaaaaatgaagcccagaggaacaccagggcctgtgtggagtctgtggtattgatggcagttttaaagcatggccacagcttctttggcactcctattgaaaggcaaagcccatgtcccctgtccttgtatctggaactacacaatagtgacttgtctgccgtgtcgccttcagggaatggggaaaaggaaatgaccactcttattttgaggaaggttcagcatgagggcaaggtcattgaataa

SEQ ID NO: 131301 - DNA, 468 bp, Homo sapiens
atgggtataacatcggcaggtatgcaaagcagagatgcagagtgcggggaacgaatcttcaccagaacggtggaggaggagctgacgcacctccagaagaaattaaaagggacagaggacgagctggataaatattccgaggacatgaaggacgcgcaggagaagctggagctcacggagaagaaggcctccgacgcggggagagccgcagggggaggaggaagaggaggaggagaaggcggcgcctcccagcgctttctccaaataagtcccgaaaaggggcactttccagcagctgtggccagcggtgccgacgtcaggccatcccccagcggtgctgacgtcggcgaattgtctgccttgcgctccacggctcatgcaccaggcttaatagaccatgaggtaattatccccgattgtgggaaattcgcctcatccaatgcaacaacgcggaggaagcatgagtaa

SEQ ID NO: 131302 - DNA, 3911 bp, Homo sapiens
cccacgcgtccgggccggggctcaagatggctttagccgggctctgcgccctgctcgcctgctgctgggggccggcggcggtgctggccacggccgccggcgacgtggatccatccaaggagctggagtgcaagctcaaaagcatcacggtgtcggcactgcccttcctgcgcgagaacgacctgagcatcatgcacagcccctcggcctcggagcccaagctcctcttctcggtgcgcaacgacttcccgggagaaatggtcgtggtggacgacctggagaacacggagctgccctacttcgtgctggagatctcagggaacacagaggatatccctttggtgcgctggaggcagcagtggctggagaatggcactttgctttttcacattcatcaccaagatggtgccccaagccttcctggacaagaccccactgaagaaccccaacatgagtcggcagaagaggagctgaggatcctccacatctcagtcatgggtggcatgatcgctctgctgctgtccatcttgtgcctggtgatgatcctgtatactcgccggcgctggtgcaaacgccgccgggtcccgcagccccagaagagtgccagtgctgaggcagccaatgagattcactacattccttctgtgctgatcggcgggcacggacgggagagcctgcgcaatgcccgcgtgcagggccacaactccagtggcaccctgagcatccgggagacacctatcctggacggctatgagtatgacatcactgatctgcgccaccatctgcagagggagtgcatgaacggaggggaggactttgccagccaggtcacgcgcaccctcgactccctgcagggctgcaatgaaaagtcggggatggacctcacaccaggaagtgacaatgccaagctgtcactgatgaacaagtataaagataatattatagccactagccctgtggactccaaccaccagcaagccacccttctctctcacacctccagcagccagagaaagcggatcaacaacaaagcaagagctggttccgccttcttgaaccctgaaggggattctggcacagaggcagaaaacgacccccagctgaccttttacacggatccttcaaggagcaggaggcgtagtagagtgggttctccccgaagtcctgtgaataagaccaccttgaccctgatcagcatcaccagctgtgtgattggcctcgtgtgctcctctcacgtcaactgccctctcgttgtcaagatcaccctgcatgtccctgagcacctgattgctgatgggagccgcttcatcttgctggaggggagccagctggatgccagtgactggctgaaccctgcccaagtggttctcttctctcagcagaactccagcggaccctgggccatggacctctgtgcccggcggctcctggacccctgtgaacaccaatgtgaccccgaaactggggaatgcctctgctatgaaggctacatgaaggatccagtacataagcacctttgcattcggaacgaatgggggacaaaccaggggccatggccttacacaatatttcagcgaggctttgacctggttttgggagagcagccctctgataaaatatttagattcacctacactcttggggagggcatgtggttgcccctcagcaagagctttgtgattccaccagccgaactggccatcaatccatcagcaaagtgcaagacggacatgactgtgatggaggatgctgtggaggtcagagaggagctgatgacttcatcctccttcgacagcctggaggttctcttagattcctttgggccggtgcgcgactgcagcaaagataacgggggctgcagtaagaatttccgctgtatttcagatcgcaagctggactccactggttgcgtgtgcccatctggactcagtcccatgaaggacagctctggctgctatgaccgccacatcggggtggactgttccgacggcttcaacggcggctgtgagcagctgtgcctccagcagatggcgcccttcccggacgaccccaccttgtataacatcctcatgttctgtgggtgcatcgaggactacaagcttggtgtggatggacgctcttgccaactcatcacggagacctgtccagagggaagtgactgtggggaaagcagggagcttcccatgaaccagaccctctttggggagatgttctttggttacaacaaccattccaaggaagtggctgccggacaggtgctgaaaggaacattcaggcaaaacaactttgctcgtggtttagaccagcaactgccagatggtcttgtggtggccactgtgcccctggagaatcaatgcctagaggagatctcggagcccacccctgaccctgacttcctgactgggatggtgaacttcagtgaagtgtctgggtaccctgtgctgcagcactggaaggtccggtctgtgatgtaccacatcaaactcaaccaagtggccatctctcaggccctcagcaatgctctccactcgctggatggggctacatctcgtgcagattttgtggcgctgttggaccagttcggcaaccattacatccaggaagctatctacggctttgaggagtcctgttctatctggtacccaaacaagcaggtccagcggcgactctggctggagtatgaagacatcagtaaaggcaactccccatcagatgagtctgaggagcgggaaagagaccctaaggtgctgacattcccagaatacatcaccagcttgtcagactccggcaccaagcgcatggcggctggagtccgcatggagtgccagagcaagggacgatgcccctcgtcctgccccctgtgtcatgtgacatccagccctgacacccctgctgagccggttctgctggaggtgaccaaagcagcccccatctatgaactagtgaccaacaaccagacccagaggctcttgcaggaggctaccatgagctctctctggtgctcagggactggagatgtcatcgaggactggtgtcgatgtgactccactgcttttggagctgatggactccccacctgtgcgcctctcccacagcctgtgctgagactctccacggttcacgagcccagcagcactcttgtggtcctggagtgggaacactcagagccaccaatcggggtgcagattgtagattacctcctccgtcaagagaaagtcactgacaggatggaccactccaaagtggagacagaaacagtgctgagctttgtggacgacatcatctctggagcaaagtctccttgtgcaatgccatctcaggtgccggacaagcagctcaccaccatctctctgatcatacgatgcctggaacctgacaccatttacatgttcacgctgtggggagtggacaacacaggacggcgctccaggccaagcgacgtgatcgtgaagaccccatgccccgtggtggatgatgtcaaggctcaagaaatagcagacaagatctacaatctcttcaatggctacactagtgggaaggagcagcagaccgcctacaacaccctcctggatctgggttcccccaccttacaccgggtcctctaccactataaccagcactatgagagttttggggaattcacctggcgatgtgaggatgagttaggtcccaggaaagctggtctcatcctttcccagcttggggacctcagcagttggtgcaatggactccttcaggaacccaagataagcttgcggcgcagctcactcaagtacctggggtgccgctacagcgagatcaaaccctacggacttgactgggcggagctcagccgggacctcaggaagacgtgtgaggagcagaccctgagtatcccctacaacgactatggggacagcaaagagatctag

SEQ ID NO: 131303 - DNA, 1873 bp, Homo sapiens
gcttaccctttttacacaaagggcaaaagtgacacctcagagtactaagtctctagatagtggcccttttgttccttttgaccgatcaaatgaagagaaaatggcttataaagaagagccaagagaaatgactggccctccagcttgggctccctggctgtttgtatgtgcaagaaggcagtgctcagggtcagcaaggtggttatatgagtcacacccttgtggacttagaatcatagaatgtcaaagttacaacaaaattttcaagttcatcgacacagatcctccttgttcagacgagaaaactcaaatcaaggcaactcattcaagacgaaactggctaattggtacaagtggcgaggaagaagatgaaaaacttggtcccatcctaattctcacctgtgcctttggtgttcatcttctagagatctcagggaacacagaggatatccctttggtgcgctggaggcagcagtggctggagaatggcactttgctttttcacattcatcaccaagatggtgccccaagccttcctggacaagaccccactgaagaaccccaacatgagtcggcagaagaggagctgaggatcctccacatctcagtcatgtttgttcattggaaggaaggagtaaagaaggaaaaaaagaaaggagaggaggctggaggaaggaaagatttccaagtagtggaacaggaaagtttcaaagaaaaggaagggctgcagagacaaattgaaatttatcctttccacaaacactcacaccctaacttagataactcagctcttcatcctccagtgcatatggttcaaaagcaagagagcatgagaccattaggagaagcactgttagccagaagaggaagagcgcagagagcagaagcaggaggaagaggaggagaaatgagaggatactacacgcagctcagactcctgctcacaagactagggcgacagtcccgtcctggcaacctggctgctcttgtcaccacccgcggttttcgcatctggccactccacactgcttctcacttcacagtggtcagcgctctgtccagacattacctaactcatcagacacacggccttcctgcaagagagcagaaaccagcagaaggagagctatcggtgagagaggaagccagggtgatgatggggaagcacgaggctctttttaacaatcagcttctgtgggaactaataagattcactccctggaggcagcaggaaaagagccacaagcaacgtgaccatgggcatccaaatgacagaggcatggaggaaacgacagccccagctacagcagaattcacagggactacagccccctcatttttaaaaacagaaagccaaggcccagcaacaggaagtggcttgccaaaaattgtgcagcaaagtgaaaagctgggggggacaatgtttctgctagaatcaggtttcagcagggcacctctagagagaagaaacagaactttaggtttaattccaagagcccctttggtctgttggacacagaaaaacgtaagagaaaaggtagtggcattttcattgactcctaggggaagaggagaagataaaagtaagagagagagaaagagaggaagagagagaggagaggaagggggggtggagaggaagacagagaggaagagggagagggagaggaagagagagagagagggagaggaagagagagagggagacaggaagagagagcgggagataggaagagggagaggaagagagagagggagaggaagagcaagagagggaggaagagagagaaagaagaaggaggaggaagagaagaagaaggaggaggaagagaagaagaaggaggaggaggaagaggagaaggaggatgaataa

SEQ ID NO: 131304 - DNA, 669 bp, Homo sapiens
atgctggcttcaggtatgacccagcacagtcccagctgtgacagctacagagaaagttcccttctgcttgagaaaagcagagagaagaataaaggagactttgttctgcagcagagcgtttctgggactaccttgggccagagagacgcctgctatcctgaaaatttcctgctacctgagccagcagaggggcacctgcagcagcagccagacaccaaggctgtgctgaacaggaaggtcctccgcactggtaccctttatatcgctgagagccacctgtcttggttagatagctctggattaggattctcactggaataccccaccattagtttacttgcattatccagggaccaaagtgactgtctaggagaacatttgtatgctacggtgaatgacaaatttgaagaatccaaagaatctgttgctgatgaagaagaggaagacagtgatgatgttgaacttattactgaatttatatttgtacctagtgataaatcagcactgggggcaatgttcactgcaatgtgtgaatgccaggccttgcatccagatcctgaggatgaggatgaggatgactacgatggagaagaatatgatgtggaagcacatgaacgaggaaaaggggacatccctaaatcttacacctatgaaggattatcccattaa

SEQ ID NO: 131305 - DNA, 635 bp, Homo sapiens
ttcccgggtcgacgatttcgtcgggcggtgtggtgcacgcattgctgtgctccaactccctcagggcctgtgttgccgcactctgctgctatgagcttcctcaaaagtttcccgccgcctgggccagcggaggggctcctgcggcagcagccagacactgaggctgtgctgaacgggaagggcctcggcactggtaccctttacatcgctgagagccgcctgtcttggttagatggctctggattaggattctcactggaataccccaccattagtttacatgcattatccagggaccgaagtgactgtctaggagagcatttgtatgttatggtgaatgccaaatttgaagaagaatcaaaagaacctgttgctgatgaagaagaggaagacagtgatgatgatgttgaacctattactgaatttagatttgtgcctagtgataaatcagcgttttaatttccttgttcagtggaggcaatgttcactgcaatgtgcgaatgccaggccttgcatccagatcctgaggatgaggattcagatgactacgatggagaagaatatgatgtggaagcacatgaacaaggacagggggacatccctacattttacacctatgaagaaggattatccca

SEQ ID NO: 131306 - DNA, 2799 bp, Homo sapiens
atggcggctcagccgaggggcggggactacagaggattcttcctgctctccatcctcctggggaccccctgggaagcctgggcaggacgtattctctactccgtgtcggaggagacggacaaagggtcctttgtgggagacatcgccaaggacctggggctggagccccgggagctggcggagcgcggagtccgcatcatctccagaggtaggacgcagcttttcgccctgaaccagcgcagcggcagcttggtcactgcgggcaggatagaccgggaagagatctgcgctcagagtgcgcggtgtctggtaaactttaacatcctgatggaagataaaatgaatctttaccctatagacgtggaaataatagatattaatgacaacgttccaagattcttgacggaagaaataaatgtaaaaataatggagaatacagctcctggggttcggtttccgttaagcgaggctggggatccagatgtgggcacgaactccctccagagttaccagctcagccccaatcgccacttctccctggctgtgcaaagtggagacgatgaaactaagtacccggaactggtgctggagcgggtgctggaccgggaggaagagcgggttcaccacctggtcctcacagcctctgatggcggcgacccgccccgatccagcaccgcccacatccaggtgacagtggtggatgtgaatgaccacacgcctgtcttctctctgcctcagtaccaagtaactgtccccgagaatgtgccagtgggtacaagactgctcacggtacatgctatcgacctggacgagggagtcaatggggaagtgacatattcttttcggaaaataactcctaaacttccaaagatgtttcatctgaactcgcttacaggagaaatatcaactttagaaggattagattatgaagaaactgccttctatgaaatggaggttcaggctcaagatggtcctggtagtctgacaaaggcaaaagtactgatcacagttttagatgtaaatgataatgctccagaagtgactatgacgtctttaagtagctcaatccctgaagacacacctcttgggacagtcattgctcttttctacctacaagacagagattctggaaagaatggtgaggtgacctgcaccattccagaaaacctaccttttaaattagaaaaatcaatagataattattatagattggtcacaaccaaaaacttggaccgggaaacactctctttgtataacatcacactgaaagccacagatggtggaactcctcccttgtccagggaaactcacatattcatgcaggtggcagacaccaacgataacccacccaccttcccccactcatcctactcagtctacatcgctgagaacaaccccagaggggcctccattttcttagtgactgcacaggaccacgacagtgaggataatgcccagatcacttattccttggccgaagacaccatccagggggctccagtgtcctcctatgtctccataaactctgacactggagtcctgtacgcgctgcaatcctttgattatgagcagttgagagaactacaactaagagtgactgcacatgacagcggggacccgcctctcagcagcaacatgtcactgagcctgttcgtgctggaccagaatgacaacccgcccgagatcctgtacccggccctccccacagatggttctactggcatggagctggcaccccgctccgcagagcccggctacctggtgaccaaggtggtggcggtggacaaagattcaggccagaacgcctggctgtcatacctcctgcttaaggccagcgagccaggactctttgcggttgggctgtacacgggcgaggtgcgcacggctcgggccctgctggacagagatgccctcaagcagagcctcgtggtggccgtccaggaccacggtcagcctcctctgtcagccaccgtcacactcaccgtggctgtggctgacagcatccccgaagtcttggccgacctgggcagccttgagccctccgacggtccttacaactatgacctcacgttgtacctggtggtggcggtggccacagtctcctgcgtcttcctagccttcgtcctcgtactgctggcgctcaggctgcggcgctggcacaagtcacgcctgctgcaggcttcagaaggtggcttggcgaacgtgcccacctcgcactttgtgggcatggacggggtgcaggctttcctgcagacctattcccatgaggtctccctcaccgcggactctcggaagagtcacctgatcttcccccagcccaactatgtagacatgctcatcagccaggagagctgtgagaaaaatgattctttgctaacatccgtagattttcaggaatgtaaagaaaacctgccaagtattcagcaagccccgcccaacacggactggcgtttctctcaggcccagagacccggcaccagcggctcccaaaatggcgatgacaccggcacctggcccaacaaccagtttgacacagagatgctgcaagccatgatcttggcgtccgccagtgaagctgctgatgggagctccaccctgggagggggtgccggcaccatgggattgagcgcccgctacggaccccagttcaccctgcagcacgtgcccgactaccgccagaatgtctacatcccaggcagcaatgccacactgaccaacgcagctggcaagcgggatggcaaggccccagcaggtggcaatggcaacaagaagaagtcgggcaagaaggagaagaagtaa

SEQ ID NO: 131307 - DNA, 2395 bp, Homo sapiens
atggagatcagaggggcactcgatctgcgaaaaaggcaagttctaatattccttgttttgctgggattgtctcgggcaggtactgaatctgcacactattctgtggcagaggaaacagaaattggctcttttgtggctaatctagcgagggacctagggctgggggtggaggagctgtcttcacgtgaagcccgggtagtgtctgatgataataaaaagtatttgcaccttgatttgctgactgggaatttgctcctaaatgagaaactagaccgagacgagctgtgtggctccaccgagccctgtgtgctgcattttcaggtggttttggaaaaccctttacagttttttcggtttgagctgtgtgtcaaagacataaatgatcactcccctacatttctagacaaggaaatacttattaaaatatcagaaggtaccactgttggagctacctttctaatggagagtgctcaagatttggatgtcggaagcaacagtctccaaaactacacaattagccccaattctcacttctacattaaaattcccgacagtagtgacagaaagatatacccagagctggtcctagatagagctttagattatgaacaggaagctgaactcagattaacactcacagcagtggatggtggatccccgcccaagtctgggacaactttggttctcatcaaggtgttggacatcaatgataatgcccctgagtttcctcagagtctctatgaggtgcaagtccccgaggacagaccccttggctcctggattgccaccatctcagctaaggatctggatgcaggaaactatggaaaaatatcttacacatttttccatgcatcagaagatattcgtaaaacatttgaaattaatccaatatctggggaagttaatttgagatcacccctggattttgaagtaatacagtcctacactataaatattcaggcaacagatggtgggggtctttcaggaaaatgcacccttctagttaaagttatggatataaacgacaacccaccagaagtgaccatatcgtcgattacaaagagaattccagagaatgcctcagagaccctagtagctctttttagtatcctagaccaagactctggagacaatgggaggatgatttgctctattcaagataacctcccttttttcctgaaaccgaccttcaagaactttttcactctagtttctgaaaaagcactggacagagagagccaagccgagtacaacatcacgatcaccgtcacagacttggggacacccaggctgaaaaccgagtacaacataaccgtgctgctctctgacgtcaatgacaacgcccccaccttcacccaaacctcctacaccctgttcgtccgcgagaacaacagccccgccctgcacatcggcagcgtcagcgccacagacagagactcaggcaccaacgcccaggtcaactactcgctgctgccgccccaggaccggcacctgcccctcgcctccttggtctccatcaacgcggacaatggccacctgtttgccctcaggtcgctggactacgaggccctacaggagttcgagtttcgcgtgggcgccacagaccgcgggtccccggcgttgagcagcgaggcgctggtgcgcgtgctggtgctggacgccaacgacaacttggcccttcgtgctgtacccgctgcagaacggctccgcgccctgcaccgagctggtgccccgggcggccgagccgggctacctggtgaccaaggtggtggcggtggacggcgactcgggccagaacgcctggctgtcgtaccagctgctcaaggccacggagcccgggctgttcggtgtgtgggcgcacaatggggaggtgcgcaccgccaggctgctgagcgagcgcgacgcggccaagcacaggctggtggtgcttgtcaaggacaatggcgagcctcctcgctcggccaccgccacgctgcacgtgctcctggtggacggcttctcccagccctacctgcctctcccggaggcggccccggcccaggcccaggccgacttgctcaccgtctacctggtggtggcgttggcctcggtgtcttcgctcttcctcctctcggtgctcctgttcgtggcggtgcggctgtgcaggaggagcagggcggcctcggtgggtcgctgctcggtgcccgagggtccttttccagggcatctggtggacgtgagcggcaccgggaccctgttccagagctaccagtacgaggtgtgtctgactggaggttcagagaccggcgagttcaagttcttgaagccgattaccccccacctcccgccccataggggtgggaaagaaatagaggaaaattctactctccccaatagctttggatttaattattga

SEQ ID NO: 131308 - DNA, 1285 bp, Homo sapiens
tttcgttaaactcaagcctctatcctgctggattctgagctccccttcctaagacagaggggtccacccggatacacccgcattctgaagcacttcccgagatcggcgcctaagcaagagaagcaggacgactatggcggctcagccgaggggcggggactacagaggatccttcctgctctccatcctcctggggaccccctgggaagcctgggcaggacgtattctctactccgtgtcggaggagacggacaaagggtcctttgtgggagacatcgccaaggacctggggctggagccccgggagctggcggagcgcggagtccgcatcatctccagaggtaggacgcagcttttcgccctgaaccagcgcagcggcagcttggtcactgcgggcaggatagaccgggaagagatctgcgctcagagtgcgcggtgtctggtaaactttaacatcctgatggaagataaaatgaatctttaccctatagacgtggaaataatagatattaatgacacgttccagattcttgacggaagaaataaatgtaaaaataatgtgatgaataccccaggcctcctgggggttcgtttccagatatacccagagctggtcctagatagagctttagattatgaacaggaagctgaactcagattaacactcacagcagtggatggtggatccccgcccaagtctgggacaactttggttctcatcaaggtgttggacatcaatgataatgcccctgagtttcctcagagtctctatgaggtgcaagtccccgaggacagaccccttggctcctggattgccaccatctcagctaaggatctggatgcaggaaactatggaaaaatatcttacacatttttccatgcatcagaagatattcgtaaaacatttgaaattaatccaatatctggggaagttaatttgagatcacccctggattttgaagtaatacagtcctacactataaatattcaggcaacagatggtgggggtctttcaggaaaatgcacccttctagttaaagttatggatataaacgacaacccaccagaagtgaccatatcgtcgattacaaagagaattccagagaatgcctcagagaccctagaccggcacctgcccctcgcctccttggtctccatcaacgcggacaatggccacctgtttgccctcaggtcgctggactacgaggccctacaggagttcgagtttcgcgtgggcgccacagaccgcgggtccccggcgttgagcatactaacaaataactaa

SEQ ID NO: 131309 - DNA, 276 bp, Homo sapiens
atgcagaagagcctgggaggtatctatgaagatggagggaagccacctgtcccttgcctgcgtgtctccaaagccctggaccccaagagcactgggcgcaagtacttcctgccccaggtagtggtgactgtgaacccccagtccagcagcacacagtgggaggtggccccggagaagggagaggaactggagctgtcagtggagagtccctgtgagctgcgggaacctgagccctcgcccttctcctctaagaggaccatgtatgagacagaggag

SEQ ID NO: 131310 - DNA, 607 bp, Homo sapiens
ctggcaagggggcatcctgggctctgatcccaccccaccccttacttccccaaacctgctgcagacagcctgtttccgggaggagcgggatgtgctcgtgaaaggggacagccgttgggtgaccactctgcactatgccttccaagacgaggagtacctgtaccttgtgatggactactatgctggtggggacctcctgacgctgctgagccgcttcgaggaccgtctcccgcccgagctggcccagttctacctggctgagatggtgctggccatccactcgctgcaccagctgggttatgtccacaggtggagccccaaccccgctgccctgcccaaccccgctgccctgcccaacccctgccagctgtgctggggacagctgatgtcagctgagcactcatcatgtgccaggcacttctctgggtgcctcatccgtgtgcttccttggaatcataccaaagagccctctgtggcaggggctgctgctgtgtccggcctgcagctgaggggggatgtcaagccagacaacgtcctgctggatgtgaacgggcacattcgcctggctgacttcggctcctgcctgcgtctcaacaccaacggcatg

SEQ ID NO: 131311 - DNA, 4055 bp, Homo sapiens
  misc_feature (1)...(4055): n = a,t,c or g
tcacagtcctgagagcagctctgaggcttgggctgccctggagcggaagctccagtgtctggagcaggagaaggtggagctgagcaggaagcaccaagaggccctgcacgcccccacagaccatcgggagctggagcagctacggaaggaagtgcagactctgcgggacaggctgccagagatgctgagggacaaggcctcattgtcccagacggatgggcccccagctggtagcccaggtcaggacagtgacctacggcaggagcttgaccgacttcaccgggagctggccgagggtcgggcagggctgcaggctcaggagcaggagctctgcagggcccaggggcagcaggaggagctgcttcagaggctacaggaggcccaggagagagaggcggccacagctagccagacccgggccctgagctcccagctggaggaagcccgggctgcccagagggagctggaggcccaggtgtcctccctgagccggcaggtgacgcagctgcagggacagtgggagcaacgccttgaggagtcgtcccaggccaagaccatccacacggcctctgagaccaacgggatgggaccccctgagggtgggcctcaggaggcccaactgaggaaggaggtggccgccctgcgagagcagctggagcaggccccacagccacaggcggagtggtaaggaggaggctctgtgccagctgcaggaggaaaaccggaggctgagccgggagcaggagcggctagaagcagagctggcccaggagcaggagagcaagcagcggctggagggtgagcggcgggagacggagagcaactgggaggcccagctcgccgacatcctcagctggtgggaccaccagtggaaggcgcggcgactgcagaagatggaggcctcggccaggctggagctgcagtcagcgctggaggccgagatccgcgccaagcagggcctgcaggagcggctgacacaggtgcaggaggcccagctgcaggctgagcgccgtctgcaggaggccgagaagcagagccaggccctgcaacaggagctcgccatgctgcgggaggagctgcgggcccgagggccagtggacaccaagccctcaaactccctgattcccttcctgtccttccggagctcagagaaggattctgccaaggaccctggcatctcaggagaggccacaaggcatggaggagagccagatctgaggccggagggccgacgcagcctgcgcatgggggctgtgttccccagagcacccactgccaacacagcctctacagaaggtcttcctgctaagggatggggcatggggccctgggaggccttgggtaatggctgtccccctccccagcccggctcacacacgctgcgcccccggagcttcccatccccgaccaagtgtctccgctgcacctcgctgatgctgggcctgggccgccagggcctgggttgtgatggtcctagatctgaggtgacaacctcccagctggcagtgccgcccaccacgtgcactgtgctgctgctggcagagagcgagggggagcgggaacgctggctgcaggtgctgggtgagctgcagcggctgctgctggacgcgcggccaagaccccggcccgtgtacacactcaaggaggcttacgacaacgggctgccgctgctgcctcacacgctctgcgctgccatcctcgaccaggatcgacttgcgcttggcaccgaggaggggctctttgtcatccatctgcgcagcaacgacatcttccaggtgggggagtgccggcgcgtgcagcagctgaccttgagccccagtgcaggcctgctggtcgtgctgtgtggccgcggccccagctctgtgaacgaggtgctggagtcaatggagtcaccgctggagctggtggaaggcttcgtgggctccatcgaggtggccgtgccctgggctgctctgctcaccgaccactgcacagtgcgcgtgtccggcctccagctcaccttgcagccccgccggggtccagcgccaggggctgccgactcacagagctgggcctcatgcatgaccacaagcctgcagctggcccaggagtgtctgcgggatgggctaccggagccctctgagccaccacagcccctggaggggctggagatgtttgcccagaccattgagactgtgcttcggaggatcaaagtgaccttcctggacactgtcgtgagggtggagcactctccgggtgatggggaacgtggtgtggccgtcgaggtccgtgtgcagagactggagtactgtgatgaggcagtgcgggacccaagccaggcgccgccggtggacgtgcatcagccgcctgccttcctgcacaagctgctgcagctggcaggggtccgcctgcactacgaggagctcccggcacaggaagagcctccagagccccccttgcagatcggcagctgctcagggtacatggagctgatgttggaggtggcgggacagctgggctccctgcacctgctcctgaccccgaggcagctccagcaacttcaggaactgctcagcgccgtgagccttacagaccacgagggcctggctgacaagctgaacaagagccgcccgctaggtgccgaagacctgtggctgattgagcaggacctgaaccagcagctgcaggcaggggcagtggctgagcccctcagcccagacccccttaccaacccccttctcaacctggataacactgacctcttcttctccatggctggcctcacaagcagtgtggcctcagccctctctgagctctccctctccgatgtagacctggcctcctctgtgcgcagcgacatggcctcccgccggctctctgcccaggcccacccagctggaagagaagggctaacgggcacagccgtgcagctgtcctgggagctgcggacgggcagtcggggccggcnnacaaccagcatggaagtgcacttcgggcagctggaggtgctggagtgtctgtggccccggggcacctctgagcctgagtacacggagagccgaccccggcgctcagttgcctgccattgccactcagaactggccctggacctggccaacttccaggcggacgtggagctgggggccctggaccggctggccgccctactgcgcctggccaccgtacctgctgagcctccagccggcctgctgcactgcctgtccccggcctcctcaccgacaagtagggtggaccctttgtctctggctttctctgcccaccaaggtatctatgaagatggagggaagccacctgtcccttgcctgcgtgtctccaaagccctggaccccaagagcactgggcgcaagtacttcctgccccaacccaattccttcccaaaacctggggctaatccaggcctggaaagtgcctgggagtggctggagttgcccttcctggagacagcctgtttccgggaggagcgggatgtgctcgtgaaaggggacagccgttgggtgaccactctgcactatgccttccaagacgaggagtacctgtaccttgtgatggactactatgctggtggggacctcctgacgctgctgagccgcttcgaggaccgtctcccgcccgagctggcccagttctacctggctgagatggtgctggccatccactcgctgcaccagctgggttatgtccacagggatgtcaagccagacaacgtcctgctggatgtgaacgggcacattcgcctggctgacttcggctcctgcctgcgtctcaacaccaacggcatggtggattcatcagtggcagtagggacgccggactatatctcccctgagatcctgcaggccatggaggagggcaagggccactacggcccacagtgtgactggtggtcgcttggagtctgcgcctatgagctgctctttggggagacgcccttctatgctgagtccttggtggaaacctacggcaagatcatgaaccacgaggtctggacaccaggctctgggcttccagagggggcagtgggacccctgagtctgtgtggttggaagtaccggcag

SEQ ID NO: 131312 - DNA, 1784 bp, Homo sapiens
cctctcctcctacaccggcctacccatctgggcccaagagctgcactcacactcctacaacgaaggacaaactgtccaggtcggagggatcacgagacacagaacctggaggggtgtgcacgctggcaggtggcctctgcggcaattgcctcaccctgaggacatcagcagtcagcctgctcagagcgggggtgctggagcgcgtgcagacacagctcttccggagcagccttcaccttctctctgggatcagtgtccggctggccgacgtggcatttgctgaccgaatgctcatagaggttgacccccacagggtcacgcaggactcggacactgccctggaaacatggatggacaagggcttttggccacaggtgtgggtgtcctgttggaggagggcttgtttggagaagggaggctggctgggggagaaacccggatcccgctgcatctccgcgcctgtgggtgcatgtcgcgtgctcatctgttgcacacagctcactcgtatgtcctgcactggtaatgtagtttggctggatgaaatgacagccacacgagcacttatcaatatgagctccctgcctgcacaggataagatcagaagcagggatgccagtgaggacaagtcagctgagaaaaggaaaaaagacaagcaggaagacagttcagatgatgatgaagctgaagaaggagaggttgaagatgagaactcaagtgatgtagaggtagaagaggagtctttgttaagaaacgatcttcgtccagctaacaaacttgctaaaggaaataggttattcatgagatttgctacaaaagatgacaaaaaggaacttggagcagccagaagaagtcagtattacatgaaatatgggaatccaaattatggaggcatgaaaggaattcttagcaattcatggaagcgaagatatcattcccgtcgtattcagcgggacgtgatcaagaagagagccctgattggggatgacgttggcttgacgtcgtataaacatcgacattctgggctagtgaatgttcccgaggaacccattgaagaggaggaagaggaggaggaggaggaagaggaagaggaagaagaagaccaggacatggatgcagatgacagagtggtggtagagtaccacgaggagctcccggctctcaagcagccccgggagcggagcgcgtctagacgatccagtgccagcagctcagactcagatgaaatggactatgatctagaactgaaaatgatttccacgccttcaccaaagaaaagcatgaaaatgactatgtatgctgacgaagtggaatctcagttgaaaaatattaggaactccatgagggcagatagtgtatcttcaagcaatatcaaaaaccgaattggtaacaaattaccacctgagaaatttgcagatgtccgacatctattagatgagaaacgtcagcactcccgtccacggccaccagtcagcagtactaaatcagatatacgccagcggttaggaaaaagaccacattctccggaaaaggcttttagtagtaaccccgtcgttcggagagagccctcttctgatgtgcatagtaggctaggtgttcccaggcaggatagtaaaggcctctacgccgatactcgggagaagaaatcaggtaatttatggactcgcctaggatctgcacccaagaccaaagaaaagaatacgaagaaagtggatcacagggcgcctggcgctgaggaagacgaactgtatgcggccgctgtagaggatccaagaatcggtactggg

SEQ ID NO: 131313 - DNA, 1275 bp, Homo sapiens
atggtcagatatgtacccaactgtgacagcgagggagaaagcaatgaattctttaaatggtacagatcctatcgtgtggacatttggaggaggacagcaattgaggaggccttcatgaaggagagagacacctgtaagctgaccctcgaagccatgaagaacagaggagagatccacctgggcaaagacagaaaagctctccaagtcttcactcgacccaggaagtccagctggcttgatctctcaccagcactttgggaggcccaggaagcaattgaaaagaaagagcagcgagccaagcgcttccattttcgatcggaagtaaatcttgcccaaagaaatgtagccttggaccgagacatgatgaagaaagcaatccccaaggtgagactggagacaatctatatttgcggagtagatgagatgagcacccaagatgtcttttcctattttaaagaatatcctccagctcacatcgaatggttggatgatacctcctgtaatgtagtttggctggatgaaatgacagccacacgagcacttatcaatatgagctccctgcctgcacaggataagatcagaagcagggatgccagtgaggacaagtcagctgagaaaaggaaaaaagatgacaaaaaggaacttggagcagccagaagaagtcagtattacatgaaatatgggaatccaaattatggaggcatgaaaggaattcttagcaattcatggaagcgaagatatcattcccgtcgtattcagcgggacgtgatcaagaagagagccctgattggggatgacgttggcttgacgtcgtataaacatcgacattctgggctagtgaatgttcccgaggaacccattgaagaggaggaagaggaggaggaggaggaagaggaagaggaagaagaagaccaggacatggatgcagatgacagagtggtggtagagtaccacgaggagctcccggctctcaagcagccccgggagcggagcgcgtctagacgatccagtgccagcagctcagactcagatgaaatggactatgatctagaactgaaaatgatttccacgccttcaccaaagaaaagcatgaaaatgactatcaatatcaaaaaccgaattggtaacaaattaccacctgagaaatttgcagatgtccgacatctattagatgagaaacgtcagcactcccgtccacggccaccagtcagcagtactaaatcagttatcgtcagcatcagcatcagcatcatcccaacagttaggaacgcttag

SEQ ID NO: 131314 - DNA, 576 bp, Homo sapiens
ttcccgtcccacggtcccggcgtcacccctccggcgcccagtccccgtcccggaactcccgggcctgtcctgggcccccggtctgtgcactccgctcgccgcagcgcccggcccgggcgtcacccgccggccccatgaggagggacgtgaacggagtgcccaagagcaggtttgagatgttctcaaatagtgatgaagctgtaatcaataaaaaacttcccaaagaactcctgttacggatattttcttttctagatgttgttaccctgtgccgctgtgctcaggtctccagggcctggaatgttctggctctggatggcagtaactggcagcgaattgacctatttgatttccagagggatattgagggcacagtagtggagaatatttcaaaacgatgtgggggctttttacgaaagttaagttctcgtggatgtcttggaattggagacaatgcattaagcctgggcaacaagcgaaaaactctcaaaaaaaagaaaagaaaagaaatagacccagaagtgactgaaatagaactgaacaataaggagtttaaaaatagcagttacaagccag

SEQ ID NO: 131315 - DNA, 1020 bp, Homo sapiens
atggggctgggcccggtcttcctgcttctggctggcatcttcccttttgcacctccgggagctgctgctgagccccacagtcttcgttataacctcacggtgctgtcctgggatggatctgtgcagtcagggtttcttgctgaggtacatctggatggtcagcccttcctgcgctatgacaggcagaaatgcagggcaaagccccagggacagtgggcagaagatgtcctgggaaataagacatgggacagagagaccagggacttgacagggaacggaaaggacctcaggatgaccctggctcatatcaaggaccagaaagaaggcttgcattccctccaggagattagggtctgtgagatccatgaagacaacagcaccaggagctcccagcatttctactacgatggggagctcttcctctcccaaaacctggagactgaggaatggacagtgccccagtcctccagagctcagaccttggccatgaacgtcaggaatttcttgaaggaagatgccatgaagaccaagacacactatcacgctatgcatgcagactgcctgcaggaactacggcgatatctagaatccggcgtagtcctgaggagaacagtgccccccatggtgaatgtcacccgcagcgaggcctcagagggcaacatcaccgtgacatgcagggcttccagcttctatccccggaatatcatactgacctggcgtcaggatggggtatctttgagccacgacacccagcagtggggggatgtcctgcctgatgggaatggaacctaccagacctgggtggccaccaggatttgccgaggagaggagcagaggttcacctgctacatggaacacagcgggaatcacagcactcaccctgtgccctctgagctcgtgagcctgcaggtcctggatcaacacccagttgggacgagtgaccacagggatgccacacagctcggatttcagcctctgatgtcagctcttgggtccactggctccactgagggcacctag

SEQ ID NO: 131316 - DNA, 1110 bp, Homo sapiens
atggggctgggcccggtcttcctgcttctggctggcatcttcccttttgcacctccgggagctgctgctggtgagtggcgttcctggcggtcctcggcggagcgggagcagcgggacgtttccgggggtcgggagattagggtctgtgagatccatgaagacaacagcaccaggagctcccagcatttctactacgatggggagctcttcctctcccaaaacgtggagactgaggaatggacagtgccccagtcctccagagctcagaccttggccatgaacgtcaggaatttcttgaaggaagatgccatgaagaccaagacacactatcacgctatgcatgcagactgcctgcaggaactacggcgatatctagaatccagcgtagtcctgaggagaagagtgccccccatggtgaatgtcacccgcagcgaggcctcagagggcaacatcaccgtgacatgcagggcttccagcttctatccccggaatatcacactgacctggcgtcaggatggggtatctttgagccacgacacccagcagtggggggatgtcctgcctgatgggaatggaacctaccagacctgggtggccaccaggatttgccaaggagaggagcagaggttcacctgctacatggaacacagcgggaatcacagcactcaccctgtgccctctgggaaagtgctggtgcttcagagtcattggcagacattccatgtttctgctgttgctgctgctgctgctgctatttttgttattattattttctatgtccgttgttgtaagaagaaaacatcagctgcagagggtccaggtgagaaaagcgggcagtttctggagatgctcctgatgactgacagattcacagcagaacagaaaggactgggaagggatggaggtgggacatctggcactgaccttcaggggctgaccctgtgggggaacatctgccctgaagagttggagccttcatgtgatgacacagagctgaagtgtgatattcgggaggggatagagagtgcttggaggttttctgattttgaagaatcccagtcagtcaggttctggcgtaaagtgactgctggggaggtgtggactgaatga

SEQ ID NO: 131317 - DNA, 1378 bp, Homo sapiens
ctactcgaagctggtccctgctttaggctgcgctcccgcgtgctccccattttctgggccccaggtcccgccttctaaatctccccaggtctccagcccactggaattttctcttccaagcgtggccccgccctctccgctcgtgattggccctaagttccgggccccagtttcattggatgagcggtcgggggaccgggccaggtgactaagtttccgcggcgccttctccccggccactgcttgagccgctgagagggtggcgacgtcggggccatggggctgggcccggtctttctgcttctggctggcatcttcccttttgcacctccgggagctgctgctggtgagtggcgttcctggcggtcctcggcggagcgggagcagtgggacgtttccgggggtcgggtgggtagcggcgagcgctgtgcggtcagggcggggctcctgtgccctgtcggtggcgcagggagctggacgcggcccgttaccgccacacttcagccctgcttccccgtcacttttcagtcctcctcgggatcgcgcatcacctgcactttctggtctcctcctgctctttctctcctcgcgtctcctccgcttcctctcacttttcggacaaaccagtccttctgaggcccatgggttcccgggctgcctccggggctgctcctgtgaatggcattcgagtgcccttccaacgcgggcattgaagcagccacaacccccggtgctccggggcggtctcagtccctggagttctgtcctctcccggaccgtctccactacacctgttgggatctctctagcatgaaatgctccagaggcagtcatgccataagcttggatcctccagccattgggtgtgagggtcttagcccggtctaaatgagcactgaattctagagagaccaagggaccgtctaagttctgaattctgagtcctgaatcctggaagttggcttctggccagggagcaggtgttactgcctctgatccacaaaagcagccccacagctcaagttgctcttctggatttctcccctctcctggttcctggccaggcaaatcttcactgctttgttagcccatccatttgctcaaccagatttttcaaatatgtatgttttcctccttttcccattgtactcagtggaaggaatggtctaaattacctaatcagcaattcctggaaaccaagccaccatgtacatacaatcttatacgttaatgtcacatacaagaaagaaaatgcagaggtaccagtagtggctacctaagcagtgtaatgtagaggtaataaaaacgaattgttggatagtatctatctatgccatgagtaaaatacatatcaataaattacaacttctaagaaaat

SEQ ID NO: 131318 - DNA, 1411 bp, Homo sapiens
ttcctgggtcgacccacgcgtccgcttctccccggccactgcttgagccgctgagaggttgtctacgtcggggccatggggctgggcccggtcttcctgcttctggctggcatcttcccttttgcacctccgggagctgctgctgagccccacagtcttcgttataacctcacggtgctgtcctgggatggatctgtgcagtcagggtttcttgctgaggtacatctggatggtcagcccttcctgcgctatgacaggcagaaatgcagggcaaagccccagggacagtgggcagaagatgtcctgggaaataagacatgggacacagagaccagggacttgacagggaacggaaaggacctcagggatgaccctggctcatatcaaggaccagaaagaaggcttgcatttccctccaggaagatttagggtctgtgagatccatgaagacaacagcaccaggagctcccagcatttctactacgatggggagctcttcctctcccaaaacgtggagactgaggaatggacagtgccccagtcctccagagctcagaccttggccatgaacgtcaggaatttcttgaaggaagatgccatgaagaccaagacacactatcacgctatgcatgcagactgcctgcaggaactacggcgatatctagaatccagcgtagtcctgaggagaagagtgccccccatggtgaatgtcacccgcagcgaggcctcagagggcaacatcaccgtgacatgcagggcttccagcttctatccccggaatatcacactgacctggcgtcaggatggggtatctttgagccacgacacccagcagtggggggatgtcctgcctgatgggaatggaacctaccagacctgggtggccaccaggatttgccaaggagaggagcagaggttcacctgctacatggaacacagcgggaatcacagcactcaccctgtgccctctgggaaagtgctggtgcttcagagtcattggcagacattccatgtttctgctgttgctgctgctgctgctgctatttttgttattattattttctatgtccgttgttgtaagaagaaaacatcagctgcagagggtccagagctcgtgagcctgcaggtcctggatcaacacccagttgggacgagtgaccacagggatgccacacagctcggatttcagcctctgatgtcagctcttgggtccactggctccactgagggcgcctagactctacagccaggcggctggaattgaattccctgcctggatctcacaagcactttccctcttggtgcctcagtttcctgacctatgaaacagagaaaataaaagcacttatttattgttgttggaggctgcaaaatgttagtagatatgaggcatttgcagctgtgccatatt

SEQ ID NO: 131319 - DNA, 2335 bp, Homo sapiens; identical to SEQ ID NO: 126932

SEQ ID NO: 131320 - DNA, 1448 bp, Homo sapiens
ctagctggttgttttgcccattagttgatgcagtttcttcatagtttcgatgttctttataatttggtatgtttttgccatggttggtaccagttgtttcttttcatgtttagtgttttccctcaggagctcttgtaaggcaggcctggtggtgacaaagtctctcagcatttgcttgtctgtaaaggattttgtttctcctttgcttatgaagcttagtttggctggatatgaaattctgggttgaaaattcttttctttaagaatgttgaatattaacccccactgtcttctggcttgtagggtttctgcagagagatctgctgttagtctgatgggattccctttgtgcatatcccgacctttctctttggctgcccttaacattttttccttcatttcaaccttggtgaatctgatgattatttctcttggggttgctcttctcgaggagtatctttgtggtattctctgtatttcctgaattggaatgttggcctgtcttgctaggttggggaagttttcctggataatacgctgaagagtgttttccaacttggttccattctccccgtcactttcaggtacaccaatcaaatgtagatttggtcttttcacatagtcccatatttcttggcggctgtgttcgttcctttttattcttttttctctaatcttgtcttctctctttatttcattaaattgatcttcaatcactgatatcctttcttccacttgatcgatttgccttttttcacagttcttagcttccttgcattgggttacaacatgctcttttagcttggaggagtttattattacccaccttctgaagcctacttctgtcagttcgtcaaactcattctccatcaagttgcatttccttgctggcaaggagttgtgatccttaagtttatatgagtccttatgtgttaggtaagtttctcgaaggcagcagatagttggttggtgaattcttatccattctgcaattctgtattttttaagtggagcatttaggcagagctggttttctggttccttctcatttgggtaggctctgtcagagggaaggtcttgggctgaaggctgttgttcagattcttttgtcccacatggtgtttccttgatgtagtactctcccccttttcctatggatgtggcttcctcaaaatcctcaaacatttgacttctctcaggctcttctttttcagatctgtcatcagtcaagggtttgagggctttggggaggtatacaacttggtcttcacagtattcaatttgagcattggaatactgatgatagggcctagtagacacagctgtcatcagggccccaggaatccctgacacatccttcgtcagtgggtggagctttccctcaggatcttcaataactccagccagaggctcagggacaaaattcagatctccctgggcctgagccc

SEQ ID NO: 131321 - DNA, 5121 bp, Homo sapiens
tcagtaagtctggggcatggcctgagattctgcatttctctcaagctcccaggtaatgctgatgctgctggttggaggaggagcctgggcttggaacacccttgctgtccatcccagctcagctgtcagttgtttctgttgcatgagcagaaaaacattcttttctttctgcctaataattttcaaaaaactctcaaatacatgggcaagcacatcaagtttggctttactagcagaaagcaaatttaattccagcatacaaatctcaggataaattatttccccttgagtgaggttttcgagtaagtcatttggactgcttgatgcactgaaaccttctgtttcagactttaagtctaccccttttcttcgaattttaggaactctgtactccaattctctatattccggctttgttccatattcctcttcctgcttattagtctgccagctccaggaccaccctgttagcagtttggtgtctacttgtgggttccagccaccaatcacagcatcgtccttcactgatggctgcttcccacatctctgcctaaatctatgtcccactccgaggcactcagcactgatgctgatcattcctaaatgcagattttggtgaaatgggggcaacaggaatgttcttcctttctcttgagggggagaacagcaatcttgggttcgtgtgggaggagaagctccacagaagaggtgttgctgggtctgagccttgaaggtaggtgagaagccctcatctgagtgggaaggaccttgtgtcatgcagagctcatcatcctgggtttcgccatcttcaggattgctttcactatctgcttcgtaaccttcttcttcaactaaaagtttaaaactacaacactgagaatcctcagcttcttctgaaaaatcaccaggctgggatgacaattcttctgcagattgatgactcttctcagtcatagcatcattatgttcaaaatctgctgaataattcccgagggcaactcgaagcagggcatcaaataaaggctttgctagttgtgtttcaatcacctttgactgggaaagatggtccctcatttcaaataatatactttccacagacaagttctgattaggtaactccaattccatcttctgttgactagttctggcaccatgaagacaaatggccagaagggcttccaaaagtcgtatactttgaagtgaggtctcactttcttgacttgtaaatagctttgcttcctcgggagcggcttcagtagctgaaacttcttccacatttatggaagaaatatgctgtaactctaatttacctaaactgtcagcactcttttttagactacctagttctgatggtatggggtcactttttatagccaaagataataaatcttccttcatagttctcttaggttgagaaattctgtttaaatcctggttttcatttacacttgtatctccctccttttttccttgctcctctttgtgacttctgaacagtttctgtattatcataaatattaacttatggcatactcggaaaccaccaagcctataaaactgtttctggaacactgaactcaacatgtagatccaacgacacatagaccaaatgtctgctgcttggtgcatatgttcaggagaaggcaagacaaggctctcgagagatatacatggcagcatatgacttaaaggctcgctggctgtgctgtcatagccagaagtatcttctgagtcattggccgactccctgtcagactctgcttctttacttacgcataaaaaagccacacagaggaataggtttattgtgttgatatgaacatcttggttaacagtcttccgtctctttggataagcttctttgaggccagcataaaattggctgagactatgtccagaggacaactccttctgttcaatgtctatcccatcaatatctggaactgaggcatctttctgttgctcccctaggctgattatcagagtttcaaatgcttttagagaatgacttcgaataccatttaagcaatttaattcgattatttgacttactccattacaactcaaaaacaaatctcttattaccctccgaatgtagcattcactgcgctgagagcttttccccaggaagttgggctttgctctcacctggtcacctttcaggaatcccaaaaatacagggtctgttttcccctgttgggatggagtctcggccggctgagaggctgcctgcaagcctggctcagaagcagaagagtctcccagcacagagtttagaggagtctcaacagaggcaggggcagctgcagagggagaagggagaacactaggcttggatgagggagttgaggcaataggggtgcttggaggaggagaagcttgagatccacagtgtgagagtgatgcgagggaaggcagtggaggcggcggcggaggagctgctggccctgaggtaggcggtggagacactggatatgttacagagtcaaccagcccattgggtgctagagtgcttacaatagtgcctgatgtgtagtaattaatcactgtaggtgttagccagattatcatcatcatcatcatgctggatttaagcaggataggcagagtttttacataaatctgaagcacgtcctgaggcaagcactggttatgatggctacatacatgactttgagctgaagtaacgcttaggtgttgacaatgatgtgctaattcaactcctctttggagcacaggattaaatatgtaattatataatttccactgaacaactatattgcctttctggattaaattgcaaatgtgatttgcaatctgtatactatgtaatctgtcttcttcaaaaacaaagttctgataagcctttaaagcatcccatttccacaacaaatcttcagatccactgctgggcaggatcccttgaaatctgtaagaaggactggataaacttgaggagagttcagcatcacataagtttccctgcagtgtctcttctaattgggctagttggtcagagtcaacagtacaaatattacaagctgcttttttaatttttggtgatatctctgctcctcctaactgatccaaaataagtttgttaaggatattcaatatatgctgctgaaaatttttcagtgctggcaatttaaaagcatggagcaaaggaatgattacagatttgggatccatacaacagcatattccaatgttatgaacacccgataggatctggacacaagtgctgctcaaggaagcctgctgtagtaagcgcaagcactgatgggcacacactgcaatgcaacagcaccgctcaggataataaacatctccatctgcagtctcttcaaatgggtttttggaaacctggtttttaaaagccgaaaccagaagacctgagagatctcggtgatgatgcataaaatgagaatattcacatcgtctgtgcctttttcttgtacacatcgaatgatgaagttgctctgatttcacttttttgacagtgctcattattttcatcacactatttattagggctttcaaatgctctgaggcctcgggaggaactccatctcttaaaaccagccattccatttgaagaactgctgtttcaaataaattaaatccatgatgctgaatgaattcttgaaccaaatccatggcttgactgaagtagaagggatttgaagctgcactttgaagacaacagatcagaatctgaagaactccttccaaaagctcaggtaaaagaagggctctatgacgatactttgaaaacacaaaatcttcctgaacctcctgcagtgttttcttttgtcttggtgcaaaagggtcaggctgcttttctaggcatattctaatttttaaagctgctctaagcaattcagttaaatttttcctaagattttctggcatcatctctgcagtactaacatctactgacagaagatgcaacactgttcgaaagagcatcctttgaatcaaagccaccggttcttcggtccaacctgcagaaactactcgactctccaagttgtcgctcagactgcagcagtccccaaagcctgctaggaattcagttagtgtgggcactacactggctgctaaaggagaattatgattcaaggtaacgtcaaacttacaaactttttctaataaagataacaaaacatgacataagtcaaatggagaattgttcatgttactgataacagacaaggcagctggctcacttaaaatgtcagtgtttgacccctgtcttggaataatctctctggaattttccaaagccatagcatctggaggagtctgttctttggttgctaagcggtcaagtttagctttggggtggtcttgtttaggaaacgatgttaaaaaatgatgcagcagatggggccttctatgcttattcattgctatgcctttttcatctgaattggcttctgaatctgaggtggagagctgtgtctttcttgcatctcttacagaatagcgatgggtaattttacgctgtcgtctgctttttcgaaaaacatttacttttgcagaaacctgactagacagggcacttccttctaaatgtaatttttcctgagtggatctttgtgaacttgagttcttttctttggtcaggattatatctgctgagagcggtaggttaaaatctttctctggtccctccctgattagcttaatatctaacctcctgaattctttgtcaggtaaatcagggatttcttcttggtttggatctattgctggtgaacagggttggttttctggttccttctcatttgggtaggctctgtcagagggaaggtctagggctgaagactgttgttcagattcttttgtcccacggggtgttcccttgatgtagtatactcctccttttcctatggatgtggcttcagattgcaaatggctgttgttgtcgtcgtcgtcgtcttcgtcgtcgtcgtcgtcgtcgtcgtcgtcgtcgtcgtcgtcttcttcttcttcttcttcttcttcttcttcttcttcttcttcttcttcttcttcttctctcttcttcttcttcttctctcttcttcttcctcttcttcttcctcttcttcttctattattatactttaagtt

SEQ ID NO: 131322 - DNA, 1524 bp, Homo sapiens
ttaccagggttggttttctggttccttctcatttgggtagcctctgtcagagggaaggtctagggctgatggctgttgttcagattcttttgtcccacggggtgttcccttgatgtagtactctcccccttttcctatgggtgtgtcttcctgtgagcctagctgtagtgattgttgtctctcttctgggtctagccactcagtgagtctacttggctcttggcttctactgggggggtgtgtgcacagagtcctgtgatgtgagccatctatgggtctctcagccgtggataccagcgcctgttcttcagcttctccagtgggggtgtgtgtttgggagaggcggggttctccctttcccacttccgcagttggggcacccacggtatttggcaagggggtcttccaggtccatgctgttttggttactgtagccttgtagtatagtttgaagtcaggtagtgtgatgcctccagctttgttcttttggcttaggattgacttggtgatgcgggctctttttttattccacatgaactttaaagtagttttttccaattctgtgaagaatgatggtggtattttgatggggattgcactaaatttgtagattgcttttggcagtatggtcattttcacaatattgatttcacccatccatgagcatgggatgtgtttccatttgtttgtgtcgtctatgatttctttcagcagtgttttgtaggtttccttgtagaggtctttcgactccttggttaggtatattcctaagtattttatttttttgtttgcagctattgtaaaaggggttgagttcttgacttgattatctgcatggtcactgttggtgtatagaagagctactgatttgtgtacattaatctcgtatctggaaaatttgctgaattcttttatcagttctaagagctttctggaggagtcctggtccttctgtctcatggctcttaagattctttccttcaccttaacattggataacctgatgacgaagtgcctaggcaaagatctttttgtgatgaatttcctgggtgttctttgtgcttcatgtgtttggatgtctaggtctctagcaaggccagagaagttttccttgattattcccccaaatatgttttccgagcttttagaattctcctcttcctcaggaacacagggttggttttctggtgccttctcatttgggtaggctctgtcagagggaaggtctagggccgaaggctgttgttcagattcttttttcccacagggtgttcccttgatgtagtactctcccccttttcctgtggatgtggcttcatgtgagccaaactgcagtgattgctctctcttctgggtctggccacccagagagtctgcctggctctgggctggtattggcacttgtctgcacagagtcctgtgataccaaccatctgtgggtctctcagccatggttaccagtgcctgttccggtggaggtggcggggtggggggtgcaatggactctgtgaggcttcttagcat

SEQ ID NO: 131323 - DNA, 479 bp, Homo sapiens
ctcgacggagatatttcacctgacttgattcaaggggtcttggctggccattaacaaataatgtcagtttcagtatcctactgcactgaattgcaaaggaaaggtcagaactatcaaaaattgttataagatctccatcttcatctttatactttattgttacttcatcattactcagaagttttcctctgaaaactcgttgcatcattagcactaattcatcataagtaatatcttcattatgaataggaattcgccgaatatcctccccaagttgagctttgatgattagcttcccacttagatccaactgtccgttcatggtggactccaggatgttctatatatacaactctagagaaagaccaggacgcatgcgcgacggcgcgaggcgcagggctggctgggtcccggctgcctaggccgaagagtccctgctttctcactggatgacgggatttaggaagcgtgagacgaaa

SEQ ID NO: 131324 - DNA, 600 bp, Homo sapiens
tcagcctcgcagcacctttcctccagccaagaagataagctctccaaaaatgttttctggatggccaactggtgttgggggctggccctttgctttaggcatggcaaataatcgacctctcttactaaacgttttctctaaagtatgaaagacagagctgatgacatagggttttttttctggttccttctcatttgggtaggctccgtcagagggaaggtctagggctgaaggctgttgttcagattcttttgtcccactgggtgttcccttgatgtagtactctccccgttttcctatggatgtggcttcctggccctgggctggtactggaggttgtctgcacagagtcctgtgatgtgaactgtctatgggtctcttagctgtggatactagtgcctgttctggtggaggtggcggggtggggggtacaatggagtccgtgagggttcttagctttggtggtttaatgctctctttttgtgctggttgacctccttccttaccaccaccctccttgagctgcacgaatgccttccagtctggagagactagacccgaagacatctgacaggatggagcaagggtagttgcacaaat

SEQ ID NO: 131325 - DNA, 4152 bp, Homo sapiens; identical to SEQ ID NO: 126382

SEQ ID NO: 131326 - DNA, 2175 bp, Homo sapiens
atggtcaacaataacgacaaaaaccacttaaagttggacagacgtctactgcaaccaactctcaaaaagtttagaacagcgcactacgccccgcccattggcgagaaacggaaatacccgctttcgaaaaaaccggaagtgcgtggtcacgccccgcgcatgcgtgcatcggggcagctcacgcttcctaaatcccgtcatccagtgagaaagcagggactcttcggcctaggcagccgggacccagccagccctgcgcctcgcgccgtcgcgcatgcgtcctgggaagccgcatccataggaaaagggggagagtactacaacaagggaacatcatgtgggacaaaagaatctgaagaacagccttcatccctagaccttccctctgacagagcctacccaaatgagaaggaaccagaaaaccgtggtaatatgacaaaacaagactccttaatatcccccaaaaatcacactagctcaccagcaatgggtccaaaccaagaagaaatccctgatttatctgagaaagaattcaagaggcaggggggtcttcctggacccctgagagtgcaaagatgcctcggtcagcagctgcgacaaggcaactgcaactgcacccagggagctcccacccgggccactgagaagagggtggggctcccgcttgccccccggtcccgctggctcagtggagtgtgtagccctgggccgtgcctcctcacagcctggagtgggagcttcagatcgtgggccctgggcctggccattggaaacgtcaggctcggcggtcaccttgatgtggagcagatcctgaggacgcagcctcaggtgactcggagcagagactgttccccaggcgcaggaacttggcgccgtcggcgggttgggcgcggtggccacgttgctggctgggtcctcgaagcgggcactgctcccacttcccaccccggtcccctgaagcgtgaccccagctctacatctcgggcctggctcccacgttccatgtgcaagtgtggcaccgctccagacccagttcctcctggggaccctctctgcttgctcttccttgcccgactgcactgctctccctccgattacaccaagacatgcggctttgtagtttatcaaaatgacaagcttttccaatcaaaaacttttacagctaaatcggattttagtcaaaaaattatctcaagcaaaactgatgaaaatgagcaagatcagagtgcttctgttgacatggtctttagtccaaagtacaaccaaaaagaatttcaactctattcctatgcctgtgtctattggaatttgtcagcgaaggactgggacacatatggctgtcaaaaagacaagggcactgatggattcctgcgctgccgctgcaaccatactactaattttgctgtattaatgactttcaaaaaggattatcaatatcccaaatcacttgacatattatccaacgttggatgtgcactgtctgttactggtctggctctcacagttatatttcagattgtcaccaggaaagtcagaaaaacctcagtaacctgggttttggtcaatctgtgcatatcaatgttgattttcaacctcctctttgtgtttggaattgaaaactccaataagaacttgcagacaagtgatggtgacatcaataatattgactttgacaataatgacatacccaggacagacaccattaacatcccgaatcccatgtgcactgcgattgccgccttactgcactattttctgttagtgacatttacctggaacgcactcagcgctgcacagctctattaccttctaataaggaccatgaagcctcttcctcggcatttcattcttttcatctcattaattggatggggagtcccagctatagtagtggctataacagtgggagttatttattctcagaatggaaataatccacagtgggaattagactaccggcaagagaaaatctttctcaccaaaaacgttcattcctcccgtctagcaagaatctgcaaacacaaagctttcatctctgaagggagcccactctggctcttggcctctctgttcactgaacatagactctggaccccatggccacttccttctcatatgtcaagaaaaatgagagacatccacattctccatgagaagggcccagactcctattga

SEQ ID NO: 131327 - DNA, 1030 bp, Homo sapiens; identical to SEQ ID NO: 121005

SEQ ID NO: 131328 - DNA, 2604 bp, Homo sapiens
atgggagattttaacaccccactgtcaacattagacagatcaacgagacagaaagttaacaaggatatccaggacttgaactcagctctacaccaagcggacctaatagacatctacagaactctccaccccaaatcaacagaatatacattcttttcagcaccacaccacacctattccaaaattgaccacatagttggcagtaaagcactcctcagcaaatgtaaaagaacagaaattataacaaactatctctcagaccacagtgcaatcaaactagatctcaggattaagaaactcactgaaaaccgcgcaactacatggaaactgaacaacctgctcctgaatgactactgggtacataacgaaatgaaggcagaaataaagatgttctttgaaaccaatgagaacaaagacacaacataccagaatctctggaacacattcaaagcagtgtgtagagggaaatttatagcactaaatgcccacaagagaaagcaggaaagatctaaaattgacagcctaacatcacaattaaaagaacttgagaagcaagagcaaacacattcaaaagctagcagaaggcaagaaataactaaaatcagagcagaactgaaggtcatagagacacaaaaagcccctcaaaaaatcagtgaatccaggagctggttttttgaaaagatcaacaaaattgatagactgctagcaagacgaataaagaagaaaagagagaagaatcaaatagatgcaataaaaaatgataaagcggatatcaccaccgataccacagaaatacaaaaaaatctagaagaaatggataaattcctcgatacatacaccctcccaagactaaaccaggaagaagttgaatctctgaatagaccaataacaggctctcaaattgaggcaataattaatagcttaccaaccaaaaaaagtccaggaccagatggattcactgctgaattctaccagaggtacaaggaggaactgcattatcctgataaccaacgcctggtggagacaacaaaaaaagagaattttagaccaatatccctgatgaacattgatgcaaaaatcctcaataaaatactggcaaaccgaatccagcagcacatcaacaagcttatacaccacgatcaagcaggcttcatccctgggatgcaaggctggttcagcatacacaaatcaataaacgtaatccagcatataaacagaagcaatgacaaaaaccacatgatcatctcaatagatgcagaaaaggcctttgacaaaattcaacagcccttcgtgctaaaaactctcaataaattaggtattgatggcacgtatctcaaaataataagagctatctatgacaaacccacagccaatatcatactgaatggccaaaaactggaagcattccctttgaaaactggcacaagacagggatgccctctctcaccactcctattcaacatagtattggaagttctggccagggcaatcaggcaggagaagaaaataaatgttattcagttaggaaaagaggaagtcaaattgtccctgtttgcagatgacatgattgtatatctagaaaaccccatcatctcagcccaaaatcttcttaagctgataaggaacttcagcaaagtctcaggatacaaaatcaatgtgcaaaaatcacaagcattcttatacaccaataacagacaaacagagagccaaatcatgagtgaactcccattcacaattgcttcaaagagaataaaatacctaggaatccaacttacaagggacatgaaagacctcttcaaggagaagtacaaaccactgcccaacaaacaaatggaagaacattctatgctcatgagtaggaagaatcaatattgtggaaatggcaatacagcccaagaattggaaaaaactactttaaagttcatatggaaccaaaaaagagcccgcattgccaagtcaatcctaagccaaaagaacaaagctggaggcatcacggtacctgacttccaactatactacaaggctacagtaaccaaaacagcatggtactggtaccaaaacagagatatagaccaatggaacagaaaagagccctcagaaataatgccacatatctatgactctctcatctttggcaaacctgacaaaaacaagcaatggggaaaggattccctatttaataaatggtgctgggaagactggctagccatatgtagaaagctgaaactggatcccttccttacaccttgtacaaaaatcaactcaagatgggttaaagacttaaatattagacctaaaaccataaaaaccctagaagaaaacctaggcaataccattcaggacataggcatggccaaggacttcatgtctaaaacaccaaaagcaatggcaacaaaagccaaaattgacaaatgggatctaattaaactaaagagcttctgcacaagaatagcaaaggaacctaccatcagcgtgaacaggcaacctacagaatgggagaaaatgtttgcaatctgctcatctgacaaaggggtaatatccagaatctacagtgacctcaaacaaatttacaagaaaaaaataaccccattaacaagtgggtga

SEQ ID NO: 131329 - DNA, 3042 bp, Homo sapiens
atgggagactttaacaccccactgtcaacattagacagatcaacgagacagaaagtcaacaaggatacccaggaattgaactcagctctgcaccaagcagacctaatagacatctacagaactctccaccccaaatcaacagaatatacatttttttcagcaccacaccacacctattcgaaaattgaccacatacttggaagtaaagctctcctcagcaaatgtaaaagaacagaaattataacaaactatctctcagaccacagtgcaatcaaactagaactcaggattaagaatctcactcaaagcctctcaactacatggaaactgaacaacctgctcctgaatgaatactgggtacataacgaaatgaaggcagaaataaagatgttctttgaaaccaacgagaacaaagacacaacataccagaatctctgggacgcattcaaagcagtgtgtagagggaaatttatagcactaaatgcccacaagagaaagcaggaaagatccaaaattgacaccctaacatcacaattaaaagaactagaaaagcaagagcaaacacattcaaaagctagcagaaggcaagaaataactaaaatcagagcagaactgaaggaaatagagacacaaaaaacccttcaaaaaatcaatgaatccaggagctggttttttgaaaggatcaacaaaattgatagaccgctagcaagactaataaagaaaaaaagagagaagaatcaaatagacacaataaaaaatgataaaggggatatcaccactgatcccacagaaatacaaactaccatcagagaatactacaaacacctctacgcaaataaactagaaaatctagcagaaatggataaattccttgacacatacactctcccaagactaaaccaggaaggagttgaatctctgaatagaccaataacaggagctgaaattgtggcaataatcaatagtttaccaaccaaaaagagtccaggaccagatggattcacagccgaattctaccagaggtacaaggaggaactggtaccattccttctgaaactattccaatcaatagaaaaagagggaatcctccctaactcattttatgaggccagcatcattctgataccaaagccgggcagagacacaaccaaaaaagagaattttagaccaatatccttgatgaacattgatgcaaaaatcctcaataaaatactggcaaaccgaatccagcagcacatcaaaaagcttatccaccatgatcaagtgagcttcatccctgggatgcaaggctggttcaatatatgcaaatcaataaatgtaatccagcatataaacagagccaaagacaaaaaccacatgattatctcaatagatgcagaaaaagcctttgacaaaattcaacaacgcttcatgctaaaaactctcaataaattaggtattgatgggacatatttcaaaataataagagctatctatgacaaacccatagccaatatcatactgaatgggcaaaaactggaagcattccctttgaaaactggcacaagacagggatgctctctctcaccgctcctattcaacatagtgttggaagttctggccagggcaattaggcaggagaaggaaataaagggtattgaattaggaaaagaggaagtcaaattgtccctgtttgcagacgacatgattgtatatctagaaaaccccattgtctcagcccaaaatctccttaagctgataagcaacttcagcaaagtctcaggatacaaaatcaacgtacaaaaatcacaagcattcttatacaccaacaacagacaaacagagagccaaatcatgagtgaacttccattcacaattgcttcaaagagaataaaatacctaggaatccaacttacaagggatgggaaggacctcttcaaggagaactacaaaccactgctcaaggaaataaaagaggatacaaacaaatggaagaacattccatgctcatgggtaggaagaatcaatatcgtgaaaatggccatactgcccaaggtaatttacagattcaatgccatccccatcaagctaccaatgcctttcttcacagaattggaaaaaactactttaaagttcatatggaaccaaaaaagagcccgcatcgccaagtcaatcctaagccaaaagaacaaagctggaggcatcacactacctgacttcaaactatacgacaaggctacagtaaccaaaacagcatggtactggtaccaaaacagagatatagatcaatggaacagaacagagccctcagaaataacgctgcatacctacaactatctgatctttgacaaacctgacaaaaacaagcaatggggaaaggattccctatttaataaatggtgctgggaaaactggctagccatatgtagaaagctgaaactggatcccttccttataccttatacaaaaatcaattcaagatggattaaagatttaaacgttagacctaaaaccataaaaaccctagaagaaaacctaggcattaccattcaggacataggcatgggcaaggacttcatgtccaaaacaccaaaagcaatggcaacaaaagccaaaattgacaaatgggatctaattaaactcaagagcttctgcacagcaaaagaaactaccatcagagtgaacaggcaacctacaacatgggagaaaatttttgcaacctactcatctgacaaagggctaatatccagaatctacaatgaactcaaacaaatttacaagaaaaaaacaaacaaccccatcaaaaagtgggcgaaggacatgaacagacacttctcaaaagaagacatttatgcagccaaaaaacacatgaaaaaatgctcaccatcactggccatcagagaaatgcaaatcaaaaccactatgagatatcatctcataccagttagaatggcaatcattaaaaagtcaggaaacaacaagtgctggagaggatgtggagaaataggaacacttttacactgttgggacatggatgaaattggaaagcatcattctcagtaa

SEQ ID NO: 131330 - DNA, 1383 bp, Homo sapiens
atgggagactttaacaccccactgtcaacattagatagatcaaagagacagaaagttaaaaaggatatccaggaactaaactcagctctgcaccaagtggacctaatagacatctacagaactccgtaccccaaatcaacagaatatacattcttttcagcacaacaccacacctattccaaaactgaccacatagttggaagtaaagaactcctcagcaaatgtaaaagaacagaaattataacaaactgtctctcagaccacagtgcaatcaaactagaactcaggattaagaaactcactcaaaaccgctcaactacatggaaactgaacaacctgctcctgaatgactactgggtacataacgaaatgaaggcagaaataaagatgttctttgaaaccaacgagaacaaagatacaacatatcagaatctcagggacacattaaaagcagtgtgtagagggaaatttgtagcactaaatgcccaccagagaaagcagaaaatatctaaaattgacaccctaacatcacaattaaaagaactagaaaagcaagagcaaacacattcaaaagctagcagaaggcaagaaataactaagatcagagcagaactgaaggaaatagagacacaaaaaacccttcaaaaaatcaatgattccaggagctgggcaatcaggcaggagaaggaaataaaaggtattcaattaggaaaagaggaagtccaattgtccctgtttgcagatgacatgattgtacatctagaaaaccccattgtctcagcccaaaatctccttaagctaataggcaacttcagcaaagtctcaggatacaaaatcaatgtgaaaaaatcacaagcattcttatacaccaataacagacaaacagagagccaaatcatgagtgaattcccattcacaattgcttcaaagagaataaaatacctaggaatacaacttacaagggatgtgaaggacctcttcaaggagaactacaaaacactgctcaatgaaatcaaagaggatacaaacaaatggaagaacattccatgctcatgggtaggaagaatcaatattgtaaaaatggccatactgcccaaggtaatttatagattcaatgccatctccatcaagctaccaatgactttcttcacagaattgggaaaacctactttaaagttagtatggaaccaaaaaagagtccgcattgccaagtcaatcctaagccaaaagaacaaagctggaggcatcatgctacctgacttcaaactatactacaaggctacagtaaccaaaacagcatggtactggtaccaaaacagagatatagaccaatggaacagaacagagccctcagaaataatgccgcatattacaaccatctga

SEQ ID NO: 131331 - DNA, 993 bp, Homo sapiens
atgggagattttaacaccccactgtcaacattagacagatcaacgagacagaaagttaacaaggatatccaggacttgaactcagctctacaccaagcggacctaatagacatctacagaactctccaccccaaatcaacagaatatacattcttttcagcaccacaccacacctattccaaaattgaccacatagttggcagtaaagcactcctcagcaaatgtaaaagaacagaaattataacaaactatctctcagaccacagtgcaatcaaactagatctcaggattaagaaactcactgaaaaccgcgcaactacatggaaactgaacaacctgctcctgaatgactactgggtacataacgaaatgaaggcagaaataaagatgttctttgaaaccaatgagaacaaagacacaacataccagaatctctggaacacattcaaagcagtgtgtagagggaaatttatagcactaaatgcccacaagagaaagcaggaaagatctaaaattgacagcctaacatcacaattaaaagaacttgagaagcaagagcaaacacattcaaaagctagcagaaggcaagaaataactaaaatcagagcagaactgaaggtcatagagacacaaaaagcccctcaaaaaatcagtgaatccaggagctggttttttgaaaagatcaacaaaattgatagactgctagcaagacgaataaagaagaaaagagagaagaatcaaatagatgcaataaaaaatgataaagcggatatcaccaccgataccacagaaatacaaaaaaatctagaagaaatggataaattcctcgatacatacaccctcccaagactaaaccaggaagaagttgaatctctgaatagaccaataacaggctctcaaattgaggcaataattaatagcttaccaaccaaaaaaagtccaggaccagatggattcactgctgaattctaccagaggtacaaggaggaactg

SEQ ID NO: 131332 - DNA, 2494 bp, Homo sapiens
acagatcaacgagacagaaagtcaacaaggatacccaggaattgaactcagctctgcaccaagcggacctaatagacatctacagaactctccaccccaaatcaacagaatatacatttttttcagcaccacaccacacctattccaaaattgaccacatagttggaagtaaaactctcctcagcaaatgtaaaagaacagaaattataacaaactatctctcagaccacagtgcaatcaaactagaactcaggattaagaatctcactcaaagccgctcaactacatggaaactgaacaacctgctcctgaatgactactgggtacataacgaaatgaaggcagaaataaagatgttctttgaaaccaacgagaacaaagacaccacataccagaatctctgggacgcattcaaagcagtgtgtagagggaaatttatagcactaaatgcctacaagagaaagcaggaaagatccaaaattgacaccctaacatctcaattaaaagaactagaaaagcaagagcaaacacattcaaaagctagcagaaggcaagaaataactaaaatcagagcagaactgaaggaaatagagacacaaaaaacccttcaaaaaatcaatgaatccaggagctggttttttgaaaggatcaacaaaattgatagaccgctagcaagactaataaagaataaaagagagaagaatcaaatagacacaataaaaaatgataaaggggatatcaccaccaatcccacagaaatacaaactaccatcagagaatactacaaacacctctatgcaaataaactagaaaatctagaagaaatggatacattcctcgacacatacactctcccaagactaaaccaggaagaagttgaatctctgaatagaccaataacaggctctgaaattgtggcaataatcaatagtttaccaaccaaaaagagtccaggaccagatggattcacagccgaattctaccagaggtacaaggaggaactggtaccattccttctgaaactattccaatcaatagaaaaagagggaatcctccctaactcattttatgaggccagcatcattctgataccaaagccgggcagagacacaaccaaaaaagagaattttagaccaatatccttgatgaacattgatgcaaaaatcctcaataaaatactggcaaaccgaatccagcagcacatcaaaaagcttatccaccatgatcaagtgggcttcatccctgggatgcaaggctggttcaatatacacaaatcaataaatgtaatccagcatataaacagagccaaagacaaaaaccacatgattatctcaatagatgaagaaaaagcctttgacaaaattcaacaacccttcatgctaaaaactctcaataaattagagaataaaatacctaggaatccaacttacaagggatgtgaaggacctcttcaaggagaactacaaaccactgctcaaggaaataaaagaggacacaaacaaatggaagaacattccatgctcatgggtaggaagaatcaatatcatgaaaatggccatactgcccaaggtaattatagattcaatgccatccccatcaagctaccaatgactttcttcacagaattggaaaaaactactttaaagttcatatggaaccaaaaaagagcccgcatcgccaagtcaatcctaagccaaaagaacaaagctggaggcatcacactacctgacttcaaactatactacaaggctacagtaaccaaaacagcatggtactggtaccaaaacagagatatagatcaatggaacagaacagagccctcagaaataatgccgcatatctacaactatctgatctttgacaaccctgagaaaaacaagcaatggggaaaggattccctatttaataaatggtgctgggaaaactggctagccatatgtagaaagctgaaactggatcccttccttacaccttatacaaaaatcaattcaagatggattaaagatttaaacgttagacctaaaaccataaaaaccctagaagaaaacctaggcattaccattcaggacataggcatgggcaaggacttcatgtccaaaacaccaaaagcaatggcaacaaaagccaaaattgacaaatgggatctaattaaactaaagagcttctgcacagcaaaagaaactaccatcagagtgaacaggcaacctacaacatgggagaaaattttcacaacctactcatctgacaaagggctaatatccagaatctacaatgaactcaaacaaatttacaagaaaaaaacaaagaaccccatcaaaaagtgggcgaaggacatgaacagacacttctcaaaagaagacatttatgcagccaaaaaacacatgaaaaaatgctcatcatcactggccatcagagaaatgcaaatcaaaaccactatgagatatcatctcacaccagttagaatggcaatcattaaaaagtcaggaaacaacag

SEQ ID NO: 131333 - DNA, 502 bp, Homo sapiens; identical to SEQ ID NO: 118354

SEQ ID NO: 131334 - DNA, 3192 bp, Homo sapiens; identical to SEQ ID NO: 118064

SEQ ID NO: 131335 - DNA, 1257 bp, Homo sapiens
atgggagactttaacaccccactgtcaacattagacagatcaacgagacagaaagttaacaaggatacccaggaattgaactcagctctgcaccaagcggacctaatagacatctacagaactctccaccccaaatcaacagaatatacatttttttcagcaccacaccacacctattccaaaattgaccacatagttggaagtaaagcgctcctcagcaaatgtaaaagaacaaaaattataacaaactgtctctcagaccacagtgcaatcaaactagaactcaggattaagaaactcactcaaaactgctccactacatggaaactgaacaacctgctcctgaatgactactgggtatgtaacgaaatgaaggcagaaataaagatgttctttgaaaccaacgagaacaaagacaaaacataccagaatctctgggacacattcaaagcagtgtgtagagggaaatttatagcactaaatgcccacaagagaaagcaggaaagatccaaaattgacaccctaacatcacaattaaaagaactagaaaagcaagagcaaacacattcaaaagctagcagaaggcaagaaataactaaaatcagagcagaactgaaggaaatggagacacaaaaaacccttcaaaaaattaatgaatccaggagctggttttttgaaaagatcaacaaaattgatagaccgctagcaagactaataaagaagaaaagagagaagaatcaaatagatgcaataaaaaataataaaggggatattaccactgatcccacagaaatagaaactaccatcagagaatactacaagcacctctacacaaataaactagaaaatctagaagaaatggataaattccttgacacatacaccctcccaagactaaaccaggaagaagttgaatctctgaatagaccaataacaggctctgaagttgtggcaataatcaatagcttaccaaccaaaaaaagtccaggaccagatggattcacagccgaattccatcagaggtacaaggagaagctgataagcgaacttttgccaatgccaaatcatacagcattaaagaagcagactcaagacctctcagactgtaaagctatgtttttatactatcagtctgtatcagttcagactgctataataaattaccacagactgagaggcttaaacaacagaaatttatttctcacagttttggagtattcaagcctgagatcagggtgtgaacatagtcgggttctg

SEQ ID NO: 131336 - DNA, 3139 bp, Homo sapiens
atgggagactttaacaccccactgtcaacattagacagatcaacgagacagaaagtcaacaaggatacccaggaattgaactcagctctgcaccaagcagacttaatagacatctacagaactctccaccccaaatcaacagaatatacatttttttcagcaccacaccacacctattccaaaattgaccacatagttggaagtaaagctctcctcagcaaatgtaaaagaacagaaattataacaaactatctctcagaccacagtgcaatcaaactagaactcaggattaagaatctcactcaaagccgctcaactacatggaaactgaacaacctgctcctgaatgactactgggtacataacgaaatgaagacagaaataaagatgttctttgaaaccaacgagaacaaagacaccacataccaaaatctctgggacgcattcaaagcagtgtgtagagggaaatttatagcactaaatgcctacaagagaaagcaggaaagatccaaaattgacaccctaacatcacaattaaaagaactagaaaagcaagagcaaacacattcaaaagctagcagaaggcaagaaataactaaaatcagagcagaactgaaggaaatagagacacaaaaagcccttcaaaaaatcaatgaatccaggagctggttttttgaaaggatcaacaaaattgatagaccgctagcaagactaataaagaaaaaaagagagaagaatcaaatagacacaataaaaaatgataaaggggatatcaccaccgatcccacagaaatacaaactaccatcagagaatactacaaacacctctacgcaaataaactagaaaatctagaagaaatggatacattcctcgacacatacactctcccaagactaaaccaggaagaagttgaatctctgaatagaccaataacaggctctgaaattgtggcaataatcaatagtttaccaaccaaaaagagtccaggaccagatggattcacagccgaattctaccagaggtacaaggaggaactggtaccattccttctgaaactattccaatcaatagaaaaagagggaatcctccctaactcattttatgaggccagcatcattctgataccaaagccgggcagagacacaaccaaaaaagagaattttagaccaatatccttgatgaacattgatgcaaaaatcctcaataaaatactggcaaaccgaatccagcagcacatcaaaaagcttatccaccatgatcaagtgggcttcatccctgggatgcaaggctggttcaatatacgcaaatcaataaatgtaatccagcatataaacagagccaaagacaaaaaccacatgattatctcaatagatgcagaaaaagcctttgacaaaattcaacaacccttcatgctaaaaactctcaataaattaggtattgatgggacgtatttcaaaataataagagctatctatgacaaacccacagccaatatcatactgaatgggcaaaaactggaagcattccctttgaaaactggcacaagacagggatgccctctctcaccgctcctattcaacatagtgttggaagttctggccagggcaatcaggcaggagaaggaaataaagggtattcaattaggaaaagaggaagtcaaattgtccctgtttgcagacgacatgattgtttatctagaaaaccccattgtctcagcccaaaatctccttaagctgataagcaacttcagcaaagtctcaggatacaaaatcaatgtacaaaaatcacaagcattcttatacaccaacaacagacaaacagagagccaaatcatgagtgaactcccattcacaattgcttcaaagagaataaaatacctaggaatccaacttacaagggatgtgaaggacctcttcaaggagaactacaaaccactgctcaaggaaataaaagaggacacaaacaaatggaagaacattccatgctcatgggtaggaagaatcaatattgtgaaaatggccatactgcccaaggtaatttacagattcaatgccatccccatcaagctaccaatgactttcttcacagaattggaaaaaactactttaaagttcatatggaaccaaaaaagagcccgcatcgccaagtcaatcctaagccaaaagaacaaagctggaggcatcacactacctgacttcaaactatactacaaggctacagtaaccaaaacagcatggtactggtaccaaaacagagatatagatcaatggaacagaacagagccctcagaaataatgctgcgtatctacaactatctgatctttgacaaacctgagaaaaacaagcaatggggaaaggattccctatttaataaatggtgctgggaaaactggctagccatatgtagaaagctgaaactggatcccttccctacaccttatacaaaaatcaattcaagatggattaaagatttaaacgttagacctaaaaccataaaaaccctagaagaaaacctaggcattaccattcaggacataggcgtgggcaaggacttcatgtccaaaacaccaaaagcaatggcaacaaaagccaaaattgacaaatgggatctaattaaactaaagagcttctgcacagcaaaagaaactaccatcagagtgaacaggcaacctacaaaatgggagaaacttttcgcaacctactcatctgacaaagggctaatatccagaatctacaatgaactcaaacaaatttacaagaaaaaaacaaacaaccccatcaaaaagtgggcgaaggacatgaacagacacttctcaaaagaagacatttatgcagccaaaaaacacatgaagaaatgctcatcatcactggccatcagagaaatgcaaatcaaaaccactatgagatatcatctcacaccagttagaatggcaatcattaaaaagtcaggaaacaacaggaaggaggaaaaaggtgctagagatataaacaaacaattcacagaagaagcaacactgatggctaatcaacctatgaaaaggtgtttaaccttcccagcaatcacagagaggcaaacacctgctctttcaccccagccacatggaatctttttggtcaacctgataaaagcatttattg

SEQ ID NO: 131337 - DNA, 1779 bp, Homo sapiens; identical to SEQ ID NO: 122763

SEQ ID NO: 131338 - DNA, 3156 bp, Homo sapiens; identical to SEQ ID NO: 124193

SEQ ID NO: 131339 - DNA, 3325 bp, Homo sapiens; identical to SEQ ID NO: 124194

SEQ ID NO: 131340 - DNA, 3145 bp, Homo sapiens
atgggagactttaacaccccactgtcaacattagacagatcaacgagacagaaagtcaacaaggatacccaggaattgaactcagctctgcaccaagcagacctaatagacatctacagaactctccaccccaaatcaacagaatatacatttttttcagcaccacaacacacctattccaaaattgaccacatacttggaagtaaagctctcctcagcaaatgtaaaagaacagaaattataacaaactatctctcagaccacagtgcaataaaattagaactcaggattaagaatctcactcaaaaccgctcaactacatggaaactgaacaacttgctcctgaatgactactgggtacataacgaaatgaaggcagaaataaagatgttctttgaaaccaatgagaacaaagacacaacataccagaatctctgggacacattcaaagcagtgtgcagagggaaatttatagcactaaatgcccacaagagaaagcaggaaagatctaaaattgacaccctaacatcacaattaaaagaactagaaaagcaagagcaaacacattcaaaagctagcagaaggcaagaaataactaaaatcagagcagaactgaaggaaatagagacacaaaaaacccttcaaaaaattaatgaatccaggagctggttctttgaaaggatcaacaaaattgatagaccactagcaagactaatgaagaaaaaaagagagaagaatcaaatagatgcaataaaaaatgataaaggggatatcaccaccaatcccacagaaatacaaactaccatcagagaatactataaacacctctacgcaaataaactagaacatctagaagaaatggataaattcctcaacacatacactctcccaagacaaaaccaggaagaagttgaatctctgaatagaccaataacaggatctgaaattgtggcaataatcaatagcttactgaccaaaaagagtccaggaccagatggattcacagccgaattctaccagaggtacaaggaggaactggtaccattccttctgaaactattccaatcaatagaaaaagagggaatcctccctaactcattttatgaggccagcatcatcctgataccaaagccaggcacagacacaaccaaaaaagagaattttagacaaatatccttgatgaacattgatgtaaaaatcctcaataaaatactggcaaacagaatccagcagcacatcaaaaagcttatccaccatgatcaagtgggcttcatccctgggatgcaaggctggttcaatatacgcaaatcaataaatgtaatccagcatataaacagagccaaagacaaaaaccacatgattatctcaatagatgcagaaaaagcctttgacaaaattcaacaacccttcatgctaaaaactctcaataaattaggtattgatggtacgtatttcaaaataataagagctatctatgacaaacccacagccaatatcatactgaatgggcaaaaactggaagcattccctttgaaaactggcacaagacagggatgccctctctcaccgctcctattcaacatagtgttggaagttctggccagggcaatcaggcaggagaaggaaataaagggtattcaattaggaaaagaggaagtcaaattgtccctgtttgcagacgacatgattgtttatctagaaaaccccattgtctcagcccaaaatctccttaagctgataagcaacttcagcaaagtctcaggatacaaaatcaatgtacaaaaatcacaagcattcttatacaccaacaacagacaaacagagagccaaatcatgggtgaactcccattcacaattgcttcaaagagaataaaatacctaggaatccaacttacaagggatgtgaaggacctcttcaaggagaactacaaaccactgctcaaggaaataaaagaggacacaaacaaatggaagaacattccatgctcatgggtaggaagaatcaatatcgtgaaaatggccatactgcccaaggtaatttacagattcaatgccatccccatcaagctaccaatgactttcttcacagaattggaaaaaactactttaaagttcatatggaaccaaaaaagagcccgcatcaccaagtcaatcctaagccaaaagaacaaagctggaggcatcacactacctgacttcaaactatactacaaggctacagtaaccaaaacagcatggtactggtaccaaaacagagatatagatcaatggaacagaacagagccctcagaaataatgccgcatatctacaactatctgatctttgacaaacctgagaaaaacaagcaatggggaaaggattccctatttaataaatggtgctgggaaaactggctagccatatgtagaaagctgaaactggatcccttccttacaccttatacaaaaatcaattcaagatggattaaagatttaaacgttagacctaaaaccataaaaaccctagaagaaaacctaggcattaccattcaggacataggcgtgggcaaggacttcatgtccaaaacaccaaaagcaatggcaacaaaagacaaaattgacaaatgggatctaattaagctaaagagcttctgcacagcaaaagaaactaccatcagagtgaacaggcaacctacaacatgggagaaaattttcgcaacctactcatctgacaaagggctaatatccagaatctacaatgaactcaaacaaatttacaagaaaaaaacaaacaaccccatcagaaagtgggcgaaggacatgaacagacacttctcaaaagaagacatttatgcagccaaaaaacacatgaagaaatgctcatcatcactggccatcagagaaatgcaaatcaaaaccactatgagatatcatctcacaccagttagaatggcaatcattaaaaagtcaggaaacaacagtcaggtggaacattcaggaggccctgagctaaacattgccagcagcaaggtcacaactgccagaacagccaaggccactcctgctcagcacagagaaggcagccaagcagatttcttggagcagctgccaagagagtctgcccagtgtgatggagaaagagccccacgtgtggagcacctgccag

SEQ ID NO: 131341 - DNA, 1098 bp, Homo sapiens
atgataatgggagactttaacaccccactgtcaacattagacagatcaacgagacagaaagttaacaaggatatccaggaattgaactcagctctgcaccaagcggacctaatagacatctacagaactctccaccccaaatcaacagaatataccttcttctcagcatcacacctcacttattccaaaattgaccacatagttggaagtaaagcactcctcagcaattgtaaaagaacagaaattataacaaactatctctcagaccacagtgcaatcaaactagaactcaagattaagaaactgactccaaaccgctcaactacatggaaactgaacaacctgctcctgaatgactactgggtacataacgaaatgaaggcagaaataaagatgttctttgaaaccaacgagaacaaagacacaacataccagaatctctgggacacattcaaagcagagtgtagagggaaatttatagcactaaatgcccacaaaagaaagcaggaaagatctaaaattgacaccctaacatcacaattaaaagaactagagaagcaagagcaaacacattcaaaagctagcagaaggcaagaaataactaagatcagagcagaactgaaggaaatggagacacaaaaaaacccttcaaaaaaatcaatgaatccaggggctgaaaaaattcttggaaaagctttgttttatagaactctcttgagcaagagcaaatttgttttctccgcaaaattaaaggtattgagaaagggtcaaactccagtgccttcaggcataaggctagcaaaacaattgtcatataataagaaacacttgtgttgcagctcagaaaatgataccctcaaatatgccgctttaaaactcaaactgagagcacctggaaagcagcaaatgcagctccggcttgggcccctccggcggtgcccggccggtaccgtgaagccgccgctcgggcttcggtgtagttgccccggacacggcgggacgccctccccgggtattcggtacccacgtgcattttgctgccgccgatctccgttcgatgcgaagcttcgcaactccgagttcgcgaggcgcatctga

SEQ ID NO: 131342 - DNA, 3229 bp, Homo sapiens; identical to SEQ ID NO: 128659

SEQ ID NO: 131343 - DNA, 1205 bp, Homo sapiens; identical to SEQ ID NO: 121025

SEQ ID NO: 131344 - DNA, 986 bp, Homo sapiens
atgggagactttaacaccccactgtcaacattagacagatcaacgagacagaaagtcaacaaggatacccaggaattgaactcagctctgcaccaagcagacctaatagacatctacagaactctccaccccaaatcaacagaatatacatttttttcagcaccacaccacacctattccaaaattgaccacatacttggaagtaaagctctcctcagcaaatgtaaaagaacagaaattataacaaactatctctcagaccacagtgcaatcaaactagaactcaggattaagaatctcactcaaagctgctcaactacatggaaactgaacaacctgctcctgaatgactactgggtacataacgaaatgaaggcagaaataaagatgttctttgaaaccaacgagaacaaagacatgacataccagaatctctgggacacattcaaagcagtgtgtagagggaaatttatagcactaaatgcccacaagagaaagcaggaaagatccaaaattgacaccctaacatcacaattaaaagaactagaaaagcaagagcaaacacattcaaaagctagcagaaggcaagaaataactaaaatcagagcagaactgaaggaaatagagacacaaaaagccattcaaaaaatcaatgaatccaggagctggggtcctccaggcaactgccagcagaattaccgtaatagtgagagtggcgaaaagagtgctcccgaaggccaggcccaacacgcagggcctacggaaggaaaagttcccaccttcctatatgtgggcaaggaaaagttcccaccttcctacctcctgacaaggaaaagttcccaccttcctacatgcggagaccctatatgcggggagaagtgctggagggtacccacaaccagtgggcaagggaacaaggcagaccagtggggcggagtaggtatcggggatacagaccatgattctgcagggaccctctgccaaag

SEQ ID NO: 131345 - DNA, 3172 bp, Homo sapiens
atgggagactttaacaccccactgtcaacattagacagatcaatgagacagaaagtcaaaaaggatacccaggaattgaactcagctctgcaccaagcagacctaatagacatctacagaactctccaccccaaatcaacagaatatacatttttttcagcaccacaccacacctattccaaaattgaccacatacttggaagtaaagctctcctcagcaaatgtaaaagaacagaaattataacaaactatctctcagacggcagtgcaatcaaactagaactcaggattaagaatctcactcaaaaccgctcaactacatggaaactgaacaacctgctcctgaatgactactgggtacctaacgaaatgaaggcagaaataaagatgttctttgaaacccaacgagaacaaagacacaacataccagaatctctgggacacattcaaagcagtgtgtagagggaaatttatagcactaaatgcccacaagagaaagcaggaaagacccaaaattgacaccctaacatcacaattaaaagaactagaaaagcaagagcaaacacattcaaaagctagcagaaggcaagaaataactaaaatcagagcagaactgaaggaaatagagacacaaaaaacccttcaaaaaattaattaatcccagagctggttttttgaaagggtcaagaaaatagatagaccactagcaagactaataaagaaaaaaagagagaagaatcaaatagatacaataaaaaatgataaaggggatatcaccaccaatcccacagaaatacaaactaccatcagagaatactacaaacacctctacgccaataaactagaaaatctagaagaaatggataaattccttgacacatacactctcccaagactaaaccaggaagaagttgaatctctgaatagaccaataacaggatctgaaattgtggcaataatcaatagcttaccaaccaaaaagagtccaggaccagatggattcacagccaaattctaccagaggtacaaggaggaactgcatataaacagagccaaagacaaaaaccacatgattatctcaatagatgcagaaaaggcctttgacaaaattcaacaacgcttcatgctaaaaactctcaataaattagtgttggaagttctggccagggcaattaggcaggagaaggaaataaagggtattcaattaggaaaagaggaagtcaaattttccctgtttgcagacgacatgattgtatatctagaaaaccccattgtctcagcccaaaatctccttaagctgataagcaacttcagcaaagtctcaggatacaaaatcaatgtacaaaaatcacaagcattcttatacaccaacaacagacaaacagagagccaaatcatgagtgaactcccattcataattgcttcaaagagaataaaatacctaggaatccaacttacaagggatgtgaaggacctcttcaaggagaactacaaaccactgctcaaggaaataaaagaggatacaaacaaatgcaagaacattccatgctcatgggtaggaagaatcaatatcgtgaaaatggccatactgcccaaggtaatttacagattcaatgccatccccatcaagctaccaatgcctttcttcacagaattggaaaaaactactttaaagttcatatggaaccaaaaaagagcccgcatcgccaagtcaatcctaagccaaaagaacaaagctggaggcatcatgctacctgacttcaaaccatactacaaggctacagtaaccaaaacagcatggtactggtaccaaaagagagatatagatcagtggaacagaacagagccctcagaaataacgccgcatatctacaactatctgatctttgacaaacctgagaaaaacaagcaatggggaaaggattccctatttaataaatggtgctgggaaaactggctggccatatgtagaaagctgaaactggatcccttccttacaccttatacaaaaatcaattcaagatggattaaagacttaaacgttagacctaaaaccataaaaaccctagaagaaaacctaggcaataccattcaggacataggcatgggcaaggacttcatgtctaaaacaccaaaagcaatggcaacaaaagacaaaattgacaaatgggatctaattaaacttaagagcttctgtacagcaaaagaaactaccatcagagtgaacaggcaacctacaaaatgggagaaaattttcacaacatactcatctgacaaagggctaatatccagaatctacaatgaactcaaacaaatttacaagaaaaaaacaaacaaccccatcaaaaagtgggcaaaggatatgaacagacacttctcaaaagaagacatttatacagccaaaagacacatgaaaaaatgctcatcatcactagccatcagagaaattcaaatcaaacccacaatgagatactatctcacaccagttagaatggcgatcattaaaaagtcaggaaacaacagggctgaatgtggttggagtattgttgaagggcctccaaaagtaaatattgtgaccccactccaggatgcaattgaacaagatgaagaaaacaacgacaaacatgtagctgtaacagaagccgaaagtgttccagattctcaggcaggggtgatgtgcaagctccaggaaagagatgaaatcggacgaattgaactagtccagaagctggcaaaagaaaactatcagtttttgcagacggacaaaaaagaacaggagaagtctgaacacggcgaatggatgtacctccgagtctctgcagaaggaaataaccaccatatctggaacaaggagcagcagaaagcagtggcattccagctggctcacttcagtttttggtctctagaggtgtacacttcttggcgagtgagatttgcggggagcgagtcctcaccacacactgtggaatgcatcaccctggatttattgtcctcctgctctgaatgggatgcagccagtgggaagcatcggcaagagatcagagggtggaaggagagaaagaatgaaagcccttgtatggctttcccaaaccagacaggccatccagaactaaaaaccggctatgctagaacttttgactctcactttggcctagacctccctgttgcctga

SEQ ID NO: 131346 - DNA, 2148 bp, Homo sapiens
atggaagatcaagtgaatgaaatgaagcaagaagagaagtttagagaaaaaagaataaaaagaaatgagcaaagcctccaagaaatatgggactatgtgaaaagaccaaatctatgtctgattggtgtacctgaaagtgatggggagaatggaaccaagttggaaaacactctgcaggatattatccaagagaactttcccaaactagcaaggcaggccaacattcaaattcgggaaatacagagaatgccacaaagatactcctccagaagagcaactccaagactcataattgtcagattcatcaaagttgcaattaaggaaaaaatgttaagggcagccagagagaaaggtcgggttacccacaaagggaagcccatcagactaacagctgatctctcggcagaaactctacaagccagaagacagtggggaccaatattcaacattcttaaagaaaagaattttcaacccagaatttcatatccagccaaattaagcttcataagtgaaggagaaataaaatcctttacagacaagcaaacgacagatcaacgaagacagaaagttaacaaggatatccaggaattgaactcagctctgcaccaagtggacctaatacacatctacagaactctccaccccaaatcaacagaacatacattcttctcagcaccatgccgtacttattccaaaattgaccacatagttggaagtaaaggactcctcagcaaatgtaaaagaacagaaattataacaaactgtctctcagaccacagtgcaatcaaactagaactcaggattaagaaactcactcaaaactgctcaactacatggaaactgaacaacctgctcctgaatgcctactgggtacataacgaaatgaaggcagaagtaaagatgctctttgaaaccaacgagaacaaagacacaacataccagaatctctgggacacattcaaagcagtgtggagagggaaatttatagcactaaatgcccacaagagaaagcaggaaagatccaaaattgacaccctaacatcacaattaaaagaactagagaagcaagagcaaacacattcaaaagctagcagaaggcaagaaataactaagatcagagcagaactgaaggaaatagagacacaaaaaacccttgaaaaaatcaatgaatccaggagctggttttttgaaaagatcaaaaaaattgataaaccgctagcaagactaataaagaagaaaagagagaagaatcaaatagatgcaataaaaaatgataaaggggatatcaccaccaatcccacagaaatacaaattaccatcagagaatactataaacacctctatgcaaataaactagaaaatctagaagaaatggataaattcctcgacacatacaccctcccaagactaaatcagcaaaaagttgaatctctgaatagaccaacaactggctctgaaattgaggcaataattaatagcttaccaaccaaaaaaggcccggatcagatggattcacagctgaattctaccagagatgcagaaaaggcctttgacaaaattcaacaaagcttcatgctaaaaactctcaataaattaggtattgatgggatgtatctcaaaataataagagctgtctatgataaacccacagccagtatcatactgaatgggcaaaaactggaagcattccctttgaaaactgacacaagacagggatgccctctctcaccactcctattagtgttggaagttctggccagggcaatcaggcaggagaaggaaataaagggtattcaattaggaaaagaggaagtcaaattgtccctgtttgcatatgacgtgattgtatatctagaaaaccccactgtctcagcccaaaatctccttaagccgataggcaacttcagcaaagtctcaggatacaaaatcaatgtgcaaaaatcacaagcattcttatacaccaataacagacaaacagagagccgaatcatgagtgaactcccattcacaattgcttcaaaaagagtaaaatacctaggaatccaacttacaagggacatgaaggacctcttcaaggagaactacaaaccactgctcaatgaaataaaagaggatacaaacaaacggaagaacattccatgctcatag

SEQ ID NO: 131347 - DNA, 1419 bp, Homo sapiens
atggagttgaaaaccacagcacgagaactacgtcatgaatgcacaaggctcagtagtcgatgtgatcaactggaagaaagggtatcagcgatggaagacgaaatgaaagaaatgaagcaagaagagaagtttagagaaaaaagaataaaaagaaatgaacaaagcctccaagaaatatgggactatgtgaaaagaccaaatctacatctgattggtgtatctgaaagtgacagggagaatggaaccaagttggaaaacactctgcaggatattatccaggagaacttccccaatctagcaaggcaggccaacattcaaattcaggaaatacagaaaacgccacaaagatactcctcgagaagagcaactccaagacacataattatcagattcaccaaagttgaaatgaaggaaaaaatgttaagggcagccagagagaaagacagatcaaagagacagaaagtcaacaaggatatccaggaatcaaactcacctctgcaccaagcggacctaatagacatctacagaactctccgccccaaatcaacagaatatacattcttttcagcaccacaccacacctattccaaaattgaccacatagttggaagtaaagcactcctcagcaaatgtaaaagaacagaaattataacaaactgtctctcagaccacagtgcaatcaaactagaattcaggattaagaaactcattcaaaaccactcaactacatggaaactgaacaacctgctcctgaatgactactgggtacataacgaaatgaaggcagaaataaagatgttctttgaaaccaacgagaacaaagacacaacataccagaatctctgggacacagtcaaagcagtgtgtagagggaaatttatagcactaaatgcccacaagagaaagcaggaaagatccaaaattgacaccctaacatcacaattaaaagaactagagaagcaagagcaaacacattcaaaagctagcagaaggcaagaaataactaagatcagagcagaactcaaggaaatagagacacaaaaaacccttcaaaaaattaatgaatccaggagctggttttttgaaaagatcaacaaaattgatagaccaccagcaagactaataaagaagaaaagagagaaggatcaaatagacgcaataaaaaatgataaaggggatatcaccaccgatcccacagaaatacaaactaccatcagagaatactataaacacctctacgcaaataaaccagaaaatctagaagaaggggatgttgagcaagagttagttccttgtggttacaggactgaggctggaagtttcctagagacttcccacaattctttagagcacagggcgataatcaagtggataatcacggataagtctgttcagcgtggcatgatgtctactttctaa

SEQ ID NO: 131348 - DNA, 3099 bp, Homo sapiens; identical to SEQ ID NO: 128084

SEQ ID NO: 131349 - DNA, 3348 bp, Homo sapiens; identical to SEQ ID NO: 120176

SEQ ID NO: 131350 - DNA, 3192 bp, Homo sapiens; identical to SEQ ID NO: 129050

SEQ ID NO: 131351 - DNA, 2121 bp, Homo sapiens
atgggagactttaacaccacactgtcaacattagagagatcagcgagacagaaagttaacaaggatatccaggaattgaactcaggtctgcaccaagcagacttaatagacatctacaaaactgtcaaacccaaatcaacagaatatacattcttctcaggaccacaccgcacttattccaaaattgaccacatagttggaagtaaagcactcctcagcaaacgtaaaagaacagaaattataacaaactgtctctcagaccacagtgcaatcaaactagaactcaggattaagaaactcactcaaaaccgctcaactacatggaaactgaacaacctgttcctgaatgactactgggtacataacaaaatgaaggcagaaataaaaatgttctttgaaaccaacgagaacaaagacacaacataccagactctctgggacacatttaaagcagtgtgtagagggaaatttatagcgctaaatgcccacaagagaaagcaggaaagatccaaaattgacaccctaacatcacaattaaaagaactagagaagcaagagcaaacacattcaaaagttagcagaaggcaagaaataactaagatcagagcagaactgaaggagatagagacacaaaaaaacccttcaaaaaaatcaatgaatccaggggctgaaatacaagctaccatcagagaatactataaacacctctatgcaaataaactagaaaatctagaagaaatagataaattccttgacacatataccctcccaagactaaaccaggaagaagctgaatctctgaacagacaaataacaggctctgaaattgaggcaataattaacagcttaccaaccaaaaaaagtccaggacctgatggattcacagctgaattctaccagagggacaaggaggagctggtaccattccttctgaaactattccaatcaatagaaaaagagggaatcctccctaactcattttatgaggccagtatcatcctgataccaaagcctggcagagagacaacaaaaaaagagaattttagaccaatatccctgatgaacatcgatgcaaaaatcctcaataaaatactggcaaaccgaatccagcagcatatcaaaaagcttatccaccatgatcaagtggacttcatccctgggatgcaaggctggttcaacatatgcaaaacaataaacataatccagcatataaacagaaccaaagacaaaaaccatacgattatctcactagatgcagaaaaggcctttgacaaaattcaacaacccttcatgctaaaaactctcaataaattaggtattgatgggacgtatctcaaaataataagaactatctatgacaaacccacagccaatatcataccgaatgggcaaaaactggaagcattccctttgaaaacgggcacaagacagggatgccctctctcaacactcctattcaacatagtgttggaagttctggccagggcaatcaggcaggagaaggaaataaaggcccaaaatctccttaagctgataggcaacttcagcaaagtctcaggatacaaaatcaatgtgcaaaaatcacaagcattcttatacaccaataacagacaaacagagagccaaatcatgagtgaactcccattcacaattgcttcaaagagaataaaatacctaggaatccaacttacaagggatgtgaaggacctcttcaaggagaactacaaaccactgctcaaggaaataaaagaggatacaaataaatggaagaacattccatgctcatgggtaggaagaatcaatatcgtgaaaatggccacactgtccaaggtaatttatagattcaatgccatccccatcaagctaccaatgactttcttcgcagaattggaaaaaactactttaaagttcatatggaaccaaaaaagagcccgcatcgccaagtcaatcctaagccaaaagaacaaagctggaggcatcgagctacctgacttcaaactatactacaaggctatggccccggagtgtgatattacccttcctgtgtccatgtggaaatcatcattctcagcaaactatcgcaaggacaaaaaaccaaacactgcatgttcttactcatag

SEQ ID NO: 131352 - DNA, 4093 bp, Homo sapiens
atggggaaaaaacagaacagaaaaactggaaactctaaaacgcagagtgcctctcctcctccaaaggaacgcagttcctcaccagcaacggaaaaaagctggatggagaatgactttgacgagctgagagaagaaggtttcagacgatcaaattactctgagctacgggaggacattcaaaccaaaggcaaagaagttgaaaactttgaaaaaaatttagaagaatgtataactagaataaccaatacagagaagtgcttaaaggagctgatggagctgaaaaccaaggctcgagaactacgtgaagaatgcagaagcctcaggagccgatgtgatcaactggaagaaagggtatcagcaatggaagatgaaatgaatgaaatgaagcgagaagggaagtttagagaaaaaagaataaaaagaaatgagcaaagcctccaagaaatatgggactatgtgaaaagaccaaatctacgtctgactggtgtacctgaaagtgacggggagaatggaaccaagttggaaaacactctgcaggatattatccaggagaacttccccaatctagcaaggcaggtcaatgttcagattcaggaaatacagagaacgccacaaagatactcctcgagaagagcaactccaagacacataattgtcagattcaccaaagttgaagtgaaggaaaaaatgttaagggcagccagagagaaaggtcgggttaccctcaaagggaagcccatcagactaacagcggatctctcggcagaaaccctacaagccagaagagagtgggggccaatattcaacattcttaaagaaaagaattttcaacccagaatttcatatccagccaaactaagcttcataagtgaaggagaaataaaacactttacagacaagcaaatgctgagagattttgtcaccaccaggcctgccctaaaagagctcctgaaggaagtgctaaacatggaaaggaacaaccagtaccagccgctgcaaaatcatgccaaaatacagatcaacgagacagaaagtcaacaaggatacccaggaattgaactcagctctgcaccaagcggacctaatagacatctacagaactctccacaccaaatcaacagaatatacatttttttcagcaccacaccacacctattccaaaattgaccacatagttggaagtaaagctctcctcagcaaatgtaaaagaacagaaattataacaaactatctctcagaccacagtgcaatcaaactagaactcaggattaagaatctcactcaaagccgctcaactacatggaaactgaacaacctgctcctgaatgactactgggtacataacgaaatgaaggcagaaatacagatgttctttgaaaccaacgagaacaaagacacaacataccagaatctctgggatgcattcaaagcagtgtgtagagggaaatttatagcactaaatgcccacaagagaaagcaggaaagatccaaaattgacaccctaacatcacaattaaaagaactagaaaagcaagagcaaacacattcaaaagctagcagaaggcaagaaataactaaaatcagagcagaagtgaaggaaatagagacacaaaaaacccttcaaaaaattaatgaatccaggagctggttttttgaaaggatcaacaaaattgatagaccgctagcaagactaataaagaaaaaaagagagaagaatcaaatagacgcaataaaaaatgttaaaggggatatcaccaccgatcccacagaaatacaaactaccatcagagaatactacaaacacctctatgcaaataaactagaaaatctagaagaaatggataaattccttgacacatacactctcccaagactaaaccaggaagaagttgaatctctgaatagaccaataacaggagctgaaattgtggcaataatcaatggtttaccaaccaaaaagagtccaggaccagatggattcacagccggattctaccagaggtacaaggaggaactggtaccattccttctgaaagtattccaatcaatagaaaaagagggaatcctccctaactcattttatgaggccagcatcattctgataccaaagccgggcagagacacaaccaaaaaagagaattttagaccaatatccttgatgaacattgatgcaaaaatcctcaataaaatactggcaaaccaaacccagcagcacatcaaaaagcttatccaccatgatcaaatgggcttcatccctgggatgcaaggctggttcaatatacgcaaatcaataaatgtaatccagcatataaacagagccaaagacaaaaaccacatgattatctcaatagatgcagaaaaagcctttgacaaacttcaacaacccttcatgctaaaaactctcagtaaattaggtattgatgggacgtatttcaaaataataagaggtatctacgacaaacccacagccaatatcatactgaatgggcaaaaactggaagcattccctttgaaaactggcacaagacagggatgccctctctcaccactcctattcaacatagtgttggaagttctggccagggcaattaggcaggagaaggaaataaagggtattcaattaggaaaagaggaagtcaaattgtccctgtttgcagacgacatgattgtatatctagaaaaccccattgtctcagcccaaaatctccttaagctgataagtaacttcagcaaagtctcaggatacaaaatcaatgtacaaaaatcacaagcattcttatacaccaacaacagacaaacagagagccaaatcatgagtgaactcccattcacaattgcttcaaagagaataaaatacctaggaacccaacttacaagggatgtgaaggacctcttcaaggagaactacaaagcactgctcaaggaaataaaagaggatacaaaaaaatggaagaacattccatgctcatgggtaggaagaatcaatatcgtgaaaatggccatactgcccaaggtaatttacagattcaatgccatccccatcaagctaccaatgactttcttcacagaattggaaaaaactactttaaagttcatatggaaccaaaaaagagcccgcatcgccaagtcaatcctaagccaaaagaacaaagctggaggcatcacactacctgacttcaaactatactacaaggctacagtaaccaaaacagcatggtactggtaccaaaacagagatatagatcaatggaacagaatagagccctcagaaataacgccgcatacctacaactatctgatctttgacaaacctgagaaaaacaagcaatggggaaaggattccctatttaataaatggtgctgggaaaactggctagccatatgtagaaaactgaaactggatcccttccttacaccttatacaaaaatcaattcaagatggattaaagatttaaacgttagacctaaaaccataaaaaccctagaagaaaacctaggcattaccattcaggacataggcgtgggcaaggacttcatgtccaaaacaccaaaagcaatggcaacaaaagccaaaattggcaaatggtacctaattaaactaaagagcttctgcacagcaaaagaaactaccatcagagtgaacaggcaacctacaacatgggagaaaattttcgcaacgtactcatctgacaaagggctaatatccagaatctacaatgaactcaaacaaatttacaagaaaaaaacaaacaaccccatcaaaaagtgggcgaaggacatgaacagacacttctcaaaagaagacatttatgcagccaaaaaatacgtgaaaaaatgctcatcatcactggccatcagagaaatgcaaatcaaaaccactatgagataccatctcacaccagttagaatggcaatcattaaaaagtcaggaaacaacagtgatctctaccttatgtctgcaggaaccagttgtttaatgggcagacactgggacagtggacaagaaacgtgtgtccaaaatgtcgtgctggacacgtgcagcccctctgaacaactcttaagagctattgctgatcttgtcccgcaaccctga

SEQ ID NO: 131353 - DNA, 2762 bp, Homo sapiens
ccaacacaataataatgggagactttaacaccccactgtcaacattagacagatcaacgagacagaaagttaacaagaatatccaggacttgaactcagctctgcaccaagcggacctaatagacatctacagaactctccaccccaaatcaacagaatatacattctcctcagcaccacaccgcacctattccaaaattgaccacatagttggaagtacaacactcctcagcaaatgtaaaagaacagaaattacaacaaactatctctcagaccacagtgcaatcaaacaagaactcaggattaagaaactcactcaaaaccgctcaactacatggaaactgaacaacctgctcctgaatgactactgggtaaataacgaaatgaaggcagaaataaagatgttctttgaaaccaacgagaacaaagacacaacataccagaatctctgggacacatttaaagcagtgtgtggagggaaatttatagcactaaatgcccacaagacaaagcaggaaagatctaaaatggacaccctaacatcacaattaaaagaactagagaagcaagagcaaacacattcaaaagctcgcagaaggcaagaaataactaagatcagagcagaactgaaggagatagagacacaaaaaaaccttcaaaaaatcaatgaatctaggagctggttttctgaaaagatcaacaaaattgatagactgctagcaagactaataaagaagaaaagagagaagaatcaaatagacacaataaaaaatgataaaggggatatcaccaccgatcccacagaaatacaaactaccatgagagaatactacaaacacctctacacaaataaactagaaaatccagaagaaatggataaattcctcgatacatacaccctcccaagactaaaccaggaagaagctgaatctctgaatagaccaataacaggctctgaaattgaggcaataattaatagcttaccaaccaaaaaaggtccaggaccagatgaattcacagccaaattctaccagaggtacaaggaggagctggtaacattccttctgaaactattccaatcaatagaaaaagagggaatcctccctaactcattttatgaggccagcattatcctgacaccaaagcctggcagagacacaacaaaaaaagagaattttagaccaatatccttgatgaacattgatgcaaaaatcctcaataaaatactggcaaaacgaatccagcagcacatcaaaaagcttatccaccatgatcaagtgggcttcatccctgggatgcaaggctggttcaatatacgcaaatcaataaatgtaatccagcatataaacagagccaaagacaaaaaccacatgattatctcaatagatgcagaaaaagcctttgacaaaattcaacaacccttcatgctaaaaactctcaataaattagaattggaagaaactactgtaaagttcatatggaaccaaaaaagagcccacatcgccaagtcaatcctaagccaaaagaacaaagctggaggcatcacactacgtgacttcaaactatactacaaggctacagtaaccaaaacagcatggtactggtaccaaaacagagatatagatcaatggaacagaacagagccctcagaaataacgctgcatatctacaactatctgatctttgacaaacctgagaaaaacaagcaatggggaacggattccctatttaataaatggtgctgggaaaactggctagccatatgtagaaagctgaaactggatcccttccttacaccttatacaaaaatcaattcaagatggattaaagacttaaacgttagacctaaaaccataaaaaccctagaagaaaacctaggcattaccattcaggacataggcatgggcaaggacttcatgtctaaaacaccaaaagcaatggcaacaaaagccaaaattgacaaatgggatctaattaaactaaagagcttctgcacagcaaaagaaactaccatcagagtgaacaggcaacctacaaaatgggagaaaattttcacaacctactcatctgacaaagggctaatatccagaatctacaatgaactcaaacaaatttacaagaaaaaaacaaacaaccccatcaaaaagtgggcaaaggacatgaacagacacttctcagaagaagacatttatgcagccaaaaaacacatgaaaaaatgctcatcatcactggccatcagagaaatgcaaatcaaaaccacaatgagataccatctcacaccagttagaatggcaatcattaaaaagtcaggaaacaacaggtgctggagaggatgtggagaaatacgaacacttttacattgttggtgggactgtaaactagttcaaccattgtggaagtcagtgtggcgattcctcagggatctagaactagaaataccatttgacccagccatcccattactgggtatatacccaaatgactataaatcatgctgctataaagacacatgcacacgtatgtttattgcggcattattcacaatagcaaagacttggaaccaacccaaatgtccaacaatgatagactggattaagaaaatgtggcacatatacaccatggaatactatgcagccataaaaaatgatgagttcatgtcctttgtagggacatggatgaaattggaaatcatcattctcagtaaactatcacaagaacaaaaaaccaaacaccgcatattctcactcataggtgggaattga

SEQ ID NO: 131354 - DNA, 3049 bp, Homo sapiens
atgactgtaaaagttaggataacggttacctctgggaagaagcctccgtggctgatacccaggcaaacagggtatggagtggacctctggcaaactccaacagacctgcagctgagggtcctgactgttagaaggaaaactaacaaacagaaaggacatccacaccaaaaccccatctgtacatcaccatcatcaaagaccaaagacagatcaacgagacagaaagttaacaaggatatccaggaattgaactcagctctgcaccaagaagacctaatagacatctacagaactctccaccccaaatcaacagaatatacatttttttcagcaccacaccacacctattccaaaattgaccacatagttggaagtaaagcactcctcagcaaatggaaaagaacagaaattacagcaaactgtctctcagaccacagtgcaatcaaactagaactcagaattaagaaactcactcaaaactggtcagctacatggaaactgaacaacctgctcctgaatgactgctgggtacataaggaaatgaaagcagaaataaagatgttctttgaaaccaaaagagaacaaaggacacaacataccagaatctctgggacgcattcaaagccagtgtgtagagggaaatttatagcactaaatgcgcacaagagaaagcaggaaagatctaaaattgacaccctaacatcacaattaaaagaactagaaaagcaagagcaaacacattcaaaagctagcagaaggcaagaaataactaaaatcagagcagaactgaaggaaatagagacacaaaaaacccttcaaaaaatcaatgaatccaggagctggttttttgaaaggatcaacaaaattgatagaccgctagcaagactaataaagaaaaaaagagagaagaatcaaatagacacaataaaaaatgataaaggggatatcaccactgatcccacagaaatacaaactaccatcagagaatactacaaacacctctacgcaaataaactagaaaatctagaacaaatggatgcattcctcgacacatacactctcccaagactaaaccaggaagaagttgagtctctgaatagaccaataacaggagctgaaattgtggcaataatcaatagtttaccaaccaaaaagagtccaggaccagatggattcacagccgaattctcccagaggtacaaggaggaactggtaccattccttctgaaactattccaatcaatagaaaaagagggaatcctccctaactcattttatgaggccagcatcattctgataccaaagccaggcagagacacaaccaaaaaagagaattttagaccaatatccttgatgaacatcgatgcaaaaatcctcaataaaatactggcaaaccgaatccagcagcacatcaaaaagcttatccaccatgatcaagtgggcgtcatccctgggatgcaaggctggttcagtatacgcaaatcaataaatgtaatccagcatataaacagagccaaagacaaaaaccatatgattatctcaatagatgcagaaaaagcctttgacaaaattcaacaacccttcatgctaaaaactctcaataaattagcccaaaatctccttaagctgataagcaacttcagcaaagtctcaggatacaaaatcaatgtacaaaaatcacaagcattcctatacaccaacaacagacaaacagagagccaaatcatgagtgaactcccattcacaattgcttcaaagagaataaaatacctaggaatccaacttacaagggatgtgaaggacctcttcaaggagaactacaaaccactgctcaaggaaataaaagaggatacaaacaaatggaagaacattccatgctcatgggtaggaagaatcaatatcgtgaaaatggccatactgccccaggtaatttacagattcaatgccatccccatcaagctaccaatgactttcttcacagaattggaaaaaactactttcaagttcatatggaaccaaaaaagagcccgcatcgccaagtcaatcctaagccaaaagaacaaagctggaggcatcacactacctgacttcaaactatactacaaggctacagtaaccaaaacagcatggtactggtaccaaaacagagatatagatcaatggaacagaacagagccctcagaaataacgccgcttacctacaactatctgatctttgacaaacctgacaaaaacaagcaatggggaaaggattccctatttaataaatggtgctgggaaaactggctagccatatgtagaaagctgaaactggatcccttccttatgccttatacaaaaattaattcaagatggattaaagatttaaacattagacctaaaaccataaaaaccctagaagaaaacctaggcattaccattcaggacataggcatgggcaaggacttcatgtccaaaacaccaaaagcaatggcaacaaaagccaaaattgacaaatgggatctaattaaactaaagagcttctgcacagcaaaagaaactaccatcagagtgaacaggcaacctacaacatgggagaaaattttcgcaacctactcatctgacaaagggctaatagccagaatctacaatgaactcaaacaaatttacaagaaaaaaacaaacaaccccatcaaaaagtgggcgaaggacatgaacagacacttctcaaaagaagacatttatgcagccaaaaaacacatgaagaaatgctcatcatcactggccatcagagaaatgcaaatcaaaaccactatgagatatcatctcacaccagttagaatggcaatcatgaaaaagtcaggaaacaacaggtgctggagaggatgtggagaaataggaacacttttacactgttggtgggactgtaaactagttcaaccattgtggaagtcagtgtggcgattcctcagggatctagaactagaaataccatttgacccagccatcccattactgggtatatacccaaaggactataaatcatgctgctataaagatacatgcacac

SEQ ID NO: 131355 - DNA, 4101 bp, Homo sapiens
ccccactgtcaacattagacagatcaacgagacagaaagttaacaaggatatccaggaattgaactcagctctgcaccaagtggacctaatagatatctacagaactctccaccccaaatcaacagaatatacattcttttcagtaccacaccacaactattccaaaattgaccacatagttggaagtaaagcactcctcagcaaatgtaaaagaacagaaattataacaaactgtctctcagactacaatgcaatcaaactagaactcaggactgagaaactcactcaaaaccgctcaactacatggaaactgaacaacccgctcctgaatgactactgggtacataaggaaatgaaggcagaaataaagatgttctttgaaaccaacgagaacaaagacacaacataccagaatctctgggacgcattcaaagcagtgtgtagagggaaatttatagcactaaatgcccacaagagaaagcaggaaagatctaaaattgacaccctaacatcacaattaaaagaactagagaagcaagagcaaacacattcaaaagctactagaaggcaagaaataactaagaccagagcagaactgaagaagatagagacacaaaaaacccttcaaaaaatcaatgaatccaggagctggttttttgaaaagaccaacaaaattgatagactactggcaacactaataaagaagaaaagagagaagaatcaaataggtgcaagaaaaaatgatgaaggggctatcaccaccaatcccacagaaatacaaactactatcagagaatactataaacacctctacacaaataaactagaaaatctagaagaaatggataaattccttgacacatacaccctcccaagaccaaaccaggaagaagttgaattgctgactagtccaataagaggctctgaaattgaggcaataattaatagcttaccaaccaaaaaaaagtccaggaccagatggttacacagccgaattctaccagaggtacaaggaggaactggtaccattccttctgacagggcaatcaggcaggagaaggaaataaaaggcattcaattaggaaaagaggaagtcaaattgtccccgtttgcagatgacatgattgtatatctagaaaaccccatcgtctcagcccaaaatctccttaagctgataagcaacttcagcaaagtctcaggatacaaaatcaatgtgcaaaaatcacaagcattcttatacagcaataaaagacaaacagagaaccaaatcatgagtgaactcccattcacaattgcttcaaagagaataaaatacctaggaatccaacttacaagggatgtgaaggacctcttcaaggagaactacaaaccactgctcaatgaaataaaagaggataaaaacaaatggaagaacattccatgctcacgggtaggaagaatcaatatcgtgaaaatggccatactgcccaaggtaatttatagattcaagtttccattgacaacagatcaagaaaatgtggtcagattaacgagacagaaagttaacaagggtatccaggaattgaactcagctctgccccgagtggacctaatagacatctacagaactctccagcccaaatcaacagaatatacattcttttcagtaccacaccacaactattccaaaattgaccacatagttggaagtaaagcactcctcagcaaatgtaaaagaacagaaattataacaaactgtctctcagaccacagtgcaatcaaactagaactcaggattaagaagcacactcaaaaccgctcaactacatggaaactgaacaacctgctcctgaatgactactgggtacataacaaaatgaaggcagaaataaagatgttctttgaaaccaatgagaacaaagacacaacataccaaaatctctgggacacattcaaagcagtatgtagagggaaatttatagcactaaatgcccacaagagaaagcaggaaagatctaaaattgacaccctaacatcacaattaaaagaactagaaaagcaagagcaaacacattcaaaagctagcagaaggcaacaaataactaagatcagagcagaactgaaggaaatagagacacaaaaaaacccttcaaaaaaatcaatgaatccaggagctggttttttgaaaggatcaacaaaattgatagaccactagcaagactaataaagaaaaaaagagagaagaatcaaatagatgcaataaaaaatgataaaggggatatcaccactgatcccacagaaatacaaactaccatcagagaatactacaaacacctctacgcaaataaactagaaaatctagaagaaatggataaattcctgcacacatacactctcccaagactaaaccaggaagaagttgaatctctgaatagaccaataacaggatctgaaattgtggcaataatcaatagcttaccaaccaaaaagagtccaggaccagatggattcacagccgaattcgaccagaggtacaaggaggaactggtaccattccttctgaaactattccaatcaatagaaaaagagggaatcctccctaactcattttatgaggccagcatcatcctgatacgaaagcctggcagagacacaaccaaaaaagagaattttagaccaatatccttgatgaacactgatgcaaaaatcctcaataaaatactggcaaaacgaatccagcagcacatcaaaaagcttatccaccatgatcaagtgggcttcatccctgggatgcaaggctggttcaatatacacaaatcaataaatgtaatccagcatataaacagagccaaagacaaaaaccacatgattatctccatagatgcagaaaaggcctttgacaaaattcaacaacccttcatgctaaaaactctcagtaaattaggtattgacgggacatatttcaaaataataagagctatctatgacaaacccacagccaatatcatactgaatgggcaaaaactggaagcattccctttgaaaactggcacaagacagggatgccctctctcaccactcctattcaacatagtgttggaagttctggccagggcaattaggcaggagaaggaaataaagctgataagcaacttcagcaaagtctcaggatacaaaatcaatgtacaaaaatcacaagcattcttatacaccaacaacagacaaacagagagccaaatcatgagtcaactcccattcacaattgcttcaaagagaataaaatacctaggaatccaacttacaagggatgtgaaggacctcttcaaggagaactacaaaccactgctcaaggaaataaaagaggatacaaacaaatggaagaacattccatgctcatgggtaggaagaatcaatatcatgaaaatggccatactgcccaaggtaatttacagattcaatgccatccccatcaagctaccaatgactttcttcacagaattggaaaaaactactttcaagttcatatggaaccaaaaaagagcccgcatcaccaagtcaatcctaagccaaaagaacaaagctggaggcatcacgctacctgacttcaaactatactacaaggctacagtaaccaaaacagcatggtactggtaccaaaacagagatatagatcaatggaacagaacagagccctcagaaataatgctgcatatctacaactatctgatctttgacaaacctgagaaaaacaagcaatggggaaaggattccctatttaataaatgggtgctgggaaaactgggctagccatatgtagaaagctgaaactggatcccttccttacaccttatacaaaaatcaattcaagatggattaaagatttaaacgttagacctaaaaccataaaaaccctagaagaaaacctaggcattaccattcaggacataggcataggcaaggacttcatgtccaaaacaccaaaagcaatggcaacaaaagccaaaattgacaaatgggatctaattaaactaaagagcttctgcacagcaaaagaaactaccatcagagtgaacagaaaacctacagagaggggagaaaattttcgcaacctactcatctga

SEQ ID NO: 131356 - DNA, 3237 bp, Homo sapiens
atggctaacaagaataaccaatgcagggaagtccttaaaggacctgatgagctgaaaaccatggcacgagaaccacatgacaaatgcacaagcttcagtagccaatttgatcaactggaagaaagggtatcagcgatggaagatcaaatgaatgaaatgaagcgagaagagaagtttagagaaaaaagaataaaaagaaatgaacaaaggctccaagaaatatgggactatgtgaaaagaccaaatctatgtctgattggtgtacctgaaagtgatggggagaatggaaccaagttggaaaacactctgcaggatattatccaggagaacttccccaacctagcaaggcaggccaacattcaaattcaggaaatacagagaatgccacaaagatactccttgagaagaacaactccaagacacataattgtcagattcaccaaagttgaaatgaaggaaaaaatgttaagggcagccagagagaaaggtcgggttacccacaaagggaagcccatcagactaacagctgatctctcggcagaaactctacaagccagaagagaatcaacaagacagaaagttaacaaagatatccaggaattgaactcagctcagcatcaagcagacctaacagacaactacagaactctccaccccaaatcaacagaatatacactcttctcagcaccacatcacacttattccaaaattgaccacatagttggaagtaaagcactcctcagcaaatgtaaaagaacagaaattataacaaactgtctctcagaccacagtgcaatcaaactagaactgaggattaagaaactcactcaaaacctctcaactacatggaaactgaacaacctgctcctgaatgactactgggtacataacgaaatgaaggcagaaataaagatgctctttgaaaccaatgagaacaaagacacaacataccagaatctctgggacacatttaaagcagtgtgtagagggaaatatatagcactaaatgcacacaagagaaagcaggaaagatctaaaattgacaccctaacgtcacaattaaaagaactagaaaagcaagagcaatcgcattcaaaagctagcagaaggcaagaaataactaagatcagagcagaactgaaggagatagagacacaaaaaactcttcaaaaaaaatcaatgaatccaggagctggatttttgaaaagatcaacaaaattgatagaccactagcaaaactaataaagaagaaaagagagaagaatcaaatagatgcaataaaaaatgacaaaggagatatcatcactgatcccacagaaatccagactactatcagagaatactataaacatctctacacaaataaactagaaaatctagaagaaatggataaattcctcaacacatacaccctcccaagactaaaccaggaagaaattgaatctctgaatagaccaataacaggctctgaaattgaagcaataattaatagcttaccaaccaaaaaaagtccaggaccagatggattcacagccgaattctaccagaggtacaagaaggagctgcatataaacagaaccaaagacaaaaaccacattattatctcaatagatgcagaaaaggcctttgacaaaattcaacaacccttcatgctaaaaactctcaataatttaggtattgatgggacatatctcaaaataataagagctatctatgacaaacccacagccaatatcatactgaatggacaaaaactggaagcattccctttgaaaactggcacaagacagggatgccctctctcaccactcctattcaacatagtgttggaagttctggccagggcaatcaggcaggagaaggaaataaagggcattcaattaggaaaagaggaagtcaaattgtccttgtttgcagatgacatgattgtatatctagaaaaccccatcgtctcagcccaaaatctccttaagctgataagcaacttcagcaaagtctcaggatacaaaatcaatgtgcaaaaatcacaagcattcttatacatcaacaacagacaaacagagagccaaatcatgagtgaactcccattcacaattgcttcaaagagaataaaatacctaggaatccaacttacaagggatgtgaaggacctcttcaaggagaactacaaaccactgctcaaggaaataaaagaggatacaaacaaatggaagaacattccacgctcatgggtaggaagaatcaatatcgtgaaaatggccatactgcccaaggtaatttacagattcaatgccatccccatcaagctaccaatgcctttcttcacagaaatggaaaaaaactactttaaagttcatatggaaccaaaaaagagcccgcatcgccaagtcaatcctaagccaaaaggacaaagctggaagcatcacactacctgacttcaaactatactacaaggctacagtaacccaaacagcatggtactggtaccaaaacagagatatagatcaatggaacagaacagagccctcagaaataacgctgcatacctacaactatctgatctttgacaaacctgagaaaaacaagcaatggggaaaggattccctatttaataaatggtgctgggaaaactggctagccatatgtagaaagctgaaactggatcccttccttacaccttatacaaaaatcaattcaagatggattaaagatttaaacgttagacctaaaaccataaaaaccctagaagaaaacctaggcattaccattcaggacataggcgtgggcaaggacttcatgtccaaaacaccaaaagcaatggcaacagaagccaaaattgacaaatgggatctaattaaactaaagagcttctgcacagcaaaagaaactaccatcagagtgaacaggcaacctacaacatgggagaaaattttcgcaacctactcatctgacaaagggctaatatccagaatctacaatgaactcaaacaaatttacaagaaaaaaacaaacaaccccatcaaaaagtgggcgaaggacatgaacagacacttctcaaaagaagacatttatgcagccaaaaaatacatgaaaaaatgctcatcatcactggccatcagagaaatgcaaatcaaaaccactatgagataccatctcacaccagttagaatggcaatcattaaaaagtcaggaaacaacagggacatggatgaaattggaaaccttcattctcagtaa

SEQ ID NO: 131357 - DNA, 3393 bp, Homo sapiens
atgctaacccttaaccacaacagactcacagatgccattctgaacatctctacctgcctgtcaaggcatcttgaccttaatacagggggaaagaagagaatcagctacaaaagaaattacctcatggaggagcatcttgaaggactatgttctaatgaattcacctgggaaaattctactattatgactgatagtcaaatgttaatgcatagagaagaacctggaagcttaccaaatattcctattttaagtatcgtcttcaccaacaacagatcaaagagacagaaagttaacaaggatatccaggaactgaactcagctctgcaccaagcagacctaatagacatctacagaactctccaccccaaatcaacagaatatacgttcttttcagcaccacaccacacctattccaaaactgaccgcatagttggaagtaaagcactcctcagcaaatgtaaaagaacagaaattataacaaactgtctctcagaccacagtgcaatcaaactagaactcaggattaagaaactcactcaaaactgctcaactacatggaaactgaacaacctgctcctgaatgactactgggtacataacgaaatgaaggcagaaataaagatgttctttgaaaccaatgagaacaaggatacaacataccagaatctctgggacacattcaaagcagtgtgtagagggaaatttatagcactaaatgcccacaagagaaagcaggaaagatctaaaattgacaccctaacatcacaattaaaagaactagagaagcaagagcaaacacattcaaaagctagcagaaggcaagaaataactaagatcagagcagaactgaaggaaatagagacacaaaaaagcccttcaaaaaatcaatgaatccaggagctggttttttgaaacgatcaacaaaattgatagaccgctagcaagactaataaagaaaaaaagagagaagaatcaaatagacgcaataaaaaatgataaaggggatatcaccaccgatcccacagaaatacaaactaccatcagagaatactacaaacacctctacgcaaataaactagaaaatctagaagaaatggataaattcctcgacacatacactctcccaagactaaaccaggaagaagttgaatctctgaatagaccaataacaggagctgaaattgtggcaataatcaatagtttaccaaccaaaaagagtccaggaccagatggattcacagccgaattctaccagaggtacaaggaggaactgcatcattctgataccaaagccgggcagagacacaaccaaaaaaagagaattttagaccaatatccttcatgaacattgatgcaaaaatcctcaataaaatactggcaaaccaaatccagcagcacatcaaaaagcttatccaccatgatcaagtgggcttcatccctgggatgcaaggctggttcaacatacgcaaatcaataaatgtaatccagcatacaaacagaaccaaagacaaaaaccacatgattatctcaatagatgcagaaaaggcctttgacaaaattcgacaacccttcatgctaaaaactctcaagaaattaggtattgatgggacgtatctcaaaataataagagctatctatgacagacccacagccaatatcatactgaatgggcaaaaactggaagcattccctttgaaaatgggcacaagacagggatgccctctctcaccactcctattcaacatagtgttggaagttctggccagggcaatcaggcaggagaaggaaataaagtgtattcaattaggaaaagagaaagtcaaatcgtccctgtttgcagatgacatgactgtatatctagaaaaccccatcatctcagcccaaaatctccttaaggtgataagcaacttcagcaaggtctcaggatacaaaatcaatgtacaaaaatcacaaccattcttatacaccaataacagacaaacagagagccaaatcatgagtgaactcccattcacaattgcttcaaagagaataaaatacctaggaatccaacttacaagggatgtgaaggacctcttcagggagaactacaaaccactgctcaaggaaataaaagaggatacaaacaaatggaagaacattccacgctcatgggtaggaagaatcaatatggtgaaaatggccatactgcccaaggtaatttacagattcaatgccatccccatcaagctaccaatgactttcttcacagaattggaaaaaactactttaaagttcatatggaaccaaaaaagagcccgcatcaccaagtcaatcctaagccaaaagaacaaagctggaggcatcacactacctgacttcaaactatactacaagattacagtaaccaaaacagcatggtactggtaccaaaacagagatatagatcaatggaacagaacagagccctcagaaataatgccgcatacctacaactatctgatctttgacaaacctgagaaaaacaagcaatggggaaaggattccctatttaataaatggtgctgggaaaactggctagccatatgtaggaagctgaaactggatcccttccttacaccttatacaaaaatcaattcaagatggattaaagatttaaacgttagacctaaaaccataaaaaccctagaagaaaacctaggcatgacctttcaggacataggcatgggcaaggacttcatgtccaaaacaccaaaagcaatggcaacaaaagccaaaatagacaaatgggatctaattaaactaaagagcttctgcacagcaaaagaaactaccatcagagtgaacaggcagcctacaaaatgggagaaaattttcgcaacctactcatctgacaaagggctaatatccagaatctacaatgaactcaaacaaatttacaagaaaaaaacaaacaaccccatcaaaaagtgggcgaaggacatgaacagacacttctcaaaagaagacatttatgcagccaaaaaacacatgaaaaaatgctcatcatcactggccatcagagaaatgcaaatcaaaaccacaatgagataccatctcacactagttagaatggcaatcattaaaaagtcaggaaacaacagcaaagcccggatgatctcagcagagaactgctctcctaaactcactgagaaaatagaactctcagattggaattctccaaatattcaaacctgcacggatcctctctttttgtgtcctactgagagagctgtaacactcactgtgaaggtctgtggcttcactcctgaagtcattgagaccacgaacccaccaggaggaacaaacaactccggacgtgacacccttaagagctgtaacactcactgcgaaggtctgcggcttcactcctga

SEQ ID NO: 131358 - DNA, 2427 bp, Homo sapiens
atggagaatggctttgacgagttgagagaagaaggcttcagacgatcaaactactccgagctacaggaggaaattcaaaccaaaggcaaagaagttaaaaacattgaaaaaaatttagatgaatgtataactagaatacccaatacagagaagtgcttaaagaagctgatggagctgaaaaccaaggctcgagaactacgtgaagaatgcataagcctcaggagccgatgcgaccaactggaagaaagcgtatcagtgatggaagatgaaatgcatgaaatgaagcgagaagggaagtttagagaaaaaagaataaaaagaaatgaacaaagcctccaagaaatatgggactatgtgaaaagaccaaatctacgtctgattggtgtacctgaagacagatcaatgagacagaaagttaacaaggatacccaggaattgaactcagctctgcaccaagcggacctaatagacatctacagaactctccaccccaaatcaacagaatatacatttttttcagcacccacaccacacctattccaaaattgaccacatacttggaagtaaagcactcctcagcaaatgtaaaagaacagaaattataacaaactgtctctcagaccacagtgcaatcaaactagaactcaggattaggaaactcactcaaaactgctcaactacatggaaactgaacaacctgctactgaatgactactgggtacataatgaaatgaagacagaaataaagatattctttgaaaccaacaagaacaaagacacaacataccagaatctctgggacacattcaaagcagtgtgtagagggaaatttatagcactaaatgcccacaagagaaagcacgaaagatctaaaatcgataccctaacattacaattaaaagaactagagaagaaagagcaaacaaattcaaaagctagcagaagacaagaaataactaagatcagagcagaactgaaggagatagagacacgaaaaacccttcaaaaaaaatcaacgaatccaggagcttgctttttgagaagatcaacaaaatagacagactgctagccagactaataaagaagaaaggagagaagaatcaaatagaagcaataaaaaatgataaaggggatatcaccaccaatcccacagaaatacaaactaccatcagagaatactataaacacctctacgcaaataaactagaaaatctagaagaaatggataaattcctggacacatacaccctcccaagactaaaccaggaagaagttgaatctctgaatagaccaataacaggctctgaaatcgaggcaataattaatagcttaccaaccaaaaaaagtccaggaccagatggattcacagccgaattctaccagaggtacaaggaggagctgcttatccaccatgaacaagtgggcttcatccctgggatgcaaggctggttcaacgtacacaaatcagtaaacgtaatccagcatataaacagaaccaaagacaaaaaccacatgactatctcaatagatgcagaaaaggcctttgacaaaattcaacaatgcttcatgctaaaaactctcaataaattaggtattgatgggatgtatctcaaaataataagagctatctgtgacaaacccacagccaatatcatactgaatggacaaaaactggaagcattccctttgaaaactggcacaagacagggatgccctctctcaccactcctattcaacatagtgttggaagttctggccagggcaatccggcaggagaaggaaataaagggcattcaatcaggaaaagaggaactcaaattgtccctgtttgcagatgacatgattgtatatctagaaaaccccatcatctcagcccaaaatctccttaagctgataagcaacttcagcaaagtctcaggatacaaaatcaatgtgcaaaaatcacaagcattcctatacaccaagaacagacaaacagagagccaaatcatgagtgaactcccattcacaattgcttcaaagagaataaaagacctaggaatccaacttacaagggacttgaaggacctcctcaaggagaactacaaaccacttctcaatgaaatgaaagaggacacaaacaaatggaagaacattccatgctcatgggtaggaagaatcaatatcgtgaaaatagccatactgcccaaggtaatttatagattcaatgccatccccatcaagctaccaatgattttcttcacagaattggaaaaaactactttaaagttcatatggaaccaaaaaagagcccacattgccaagtcaatcctaagccaaaagaacaaagctggaggcatcacgctacctgacttcaaactatactacaaggctacagtaaccaagacagcatggtactggtaccaaaacagacatatagacaaatga

SEQ ID NO: 131359 - DNA, 4260 bp, Homo sapiens
atgataatgggagactttaacaccccactgtcaacattagacagatcaacgagacagaaagttaacaaggatatccaggaattgaactcagctctgcaccaagcggacctaatagacatctacagaactctccaccccaaatcaacagaatataccttcttctcagcatcacacctcacttattccaaaattgaccacatagttggaagtaaagcactcctcagcaattgtaaaagaacagaaattataacaaactatctctcagaccacagtgcaatcaaactagaactcaagattaagaaactgactccaaaccgctcaactacatggaaactgaacaacctgctcctgaatgactactgggtacataacgaaatgaaggcagaaataaagatgttctttgaaaccaacgagaacaaagacacaacataccagaatctctgggacacattcaaagcagagtgtagagggaaatttatagcactaaatgcccacaaaagaaagcaggaaagatctaaaattgacaccctaacatcacaattaaaagaactagagaagcaagagcaaacacattcaaaagctagcagaaggcaagaaataactaagatcagagcagaactgaaggaaatggagacacaaaaaaacccttcaaaaaaatcaatgaatccaggggctgaaatacaaactaccatcagagaatactataagcacctctacgcaaataaactagaaaatctagaagaaatggatacattcctcgacacatacaccctcccaagactaaaccaggaagaagttgaatctccgaatagaccaataacaggctctgaaattgaggcaataattaatagcttaccaaccaaaaaaagtccaggaccagatggattcacagccaaattctaccagaggtacaaggaggagctggtaccattccttctgaaactattccaatcaatagaaaaagagggaatcctccctaactcattttatgaggccagcatcatcctgataccaaagcctggcagagacacaacaaaaaaagagaatttcagaccaatatccctgatgaacatcgatgcaaaaatcctcaataaaatactggcaaaccgaatccagcagcacatcaaaaagcttatccaccatgatcaagtgggcttcatccctgggatgcaaggctggttcaacatacgcaaatcaataaacataatccagcatataaacagaaccaacaacaaaaaccatatgattatctcaatagatgcagaaaaggcctttgacaaaattcaacaacccttgatgctaaaaactctcaataaattaggtattgatgggacgtatttcaaaataataagagctatctatgacaaacccacagccaatatcatactgaatgggcaaaaactggaagcattccctctgaaaactggcacaagacagggatgccctctctcagcactcctattcaacatagtgttggaagttctggccagggcaattaggcaggagaaggaaataaaaggtattcaattaggaaaagaggaagtcaaattgtccctgtttgcagacgacatgattgtatatctagaaaaccccattgtctcagcccaaaatctccttaagctgataagcaatttcagcaaagtctcaggatacaaaatcaatgtgcaaaaatcacaagcattcttatacaccaacaacagacaaacagagagccaaatcatgagtgaactcccattcacaattgcttcaaagagaataaaatacctaggaatccaacttacaagggatgtgaaggacctcttcaaggagaactacaaaccactgctcaaggaaataaaagaggatacaaacaaatggaagaacattccatgctcatgggtaggaagaatcaataagcctccgctgctgatacccaggcaaacagggtctggagtggacctccagcaaactccaacagacctgcagctgagggtcctgactgctacaaggaaaactaaccaacagaaaggacatccacaccaaaaccccatctgtacatcaccatcatcaaagaccaaaggcagatcaacaagacagaaagttaacaaggatatccaggaattcaactcagctctgccccaagtggacctaatagatatctacagaactctccaccccaaatcaacagaaaatacattcttctcagcaccacaccacacttattccaaaattgatcacatagttggaagtaaagcactcctcagcagatgtaaaagaacagaaattataacaaactgtctctcagaccacagtgcaatcaaattagaactcaggattaagaaactcactcaaaactgctcaactacatggaaactgaacaacctgcttctgaatgacaactgggtacataacgaaatgaaggcagaaataaagatgttctttgaaaccaatgcgaacaaaaacacaacataccagaatctctgggacacatttaaagcattgtgtagagggaaatttatagcactaaatgcccacaagagacagcaggaaagatctaaaactgacaccctaacatcacaattaaaagaactagagaagcaagagcaatcacattcaaaagctagcagaaggcaagaaataactaagatcagagcagaactgaaggagatagggacacaaaaaatccttcaaaaaatcaatgaatccaggagctggttttttgaaaagatcaacaaaattgatagactgctagcaagactaataaagaagaaaagagagaagaatcaaacagatgcaataaaaaatgataaaggggatatcaccactgatcccacagaaatacaaactgccatcagcgaatactataaacacctctacgcaaataaactggaaaatctagaagaaatggataaattcctcgacacctacaccctcccaagactaaaccaggaagaagttgaatctctgaatagaccaataacaggctctgaaattgaggcaataattaatagcttaccaaccaaaaaaagtccaggaccagatggattcatggccgaattctaccagagggacaaggaggagctggtaccattccttctgaaactgttccaatcaatagaaaaagagggaatcctccctaactcattttatgaggccagcatcatgctgataccaaagcctggcagagacacaacaaaaaaagagaattttagaccaatatccctgatgaacatcgatgcaaaaatcctcaataaaatactggcaaaccgaatccagcagcacatcaaaaagcttatccaccatgatcaagtgggcttcatccctgggatgcaaggctggttcaacttacgcaaatcactaaacgtaatccagcatataaacagaaccaatgacaaaaaccacatgattatctcaatagatgcagaaaaggcctttgacaaaattcaacagcccttcatgctaaaaactctcaataaattaggtattgatgggatgtatctcaaaataataagagctatctatgacagacccacagccaatatcatactgaatgggcaaaaactggaagcattccctttgaaaactggcacaagacagggatgccctctctcaccactcctattcaatatagtgttggaagttctggccagggcaatcaggcaggagaaggaaataaagggtattcaattaggaaaagaggaagtcaaattgtccctgtttgcagatgacatgactgtatatttagaaaacgccatcgtctcagccccaaatctccttaagctgataggcaacttcagcaaagtctcaggatacaaaatcaatgtgcaaaaatcacaagcattcttatacactaataacagacaaacagagagccaaatcatgagtgaactcccattcagaattgcttcaaagagaataaaatacctaggaatccaacttacaagggatgtgaaggacctcttcaagcagaactacaaaccactgctcaatgaaataaaagaggatacaaacaaatggaagaacattccatgctcatgggtaggaagaatcaatatcgtgaaaatggccatactgcccaaggggacccagaggccctatgccaaggttagagttcaactgaacagtggagaggaattgcacttcttaggccttttagataccagtacacaggtgactgtgatccccacaaacccttgcatcaagatgaggagaaaacagatcgtgttctctgactttgggctcctactaacctccgttgtcatggcccccactactgaatga

SEQ ID NO: 131360 - DNA, 7313 bp, Homo sapiens
atggtggtgaaaaccaatgcacgagaactacgtgacgaatgcacaagcctcagtagcccattcaatcaactggaagaaagggtatcagtgatggaaaatcaaatgaataaaatgaagcaagaagagaagtttagagaaaaaagaataaaaagaaacgaacaaagcctccaagaaatatgggactatgtgaaaagaccaaatctatgtctgattggtgtaactgaaagtgatggagagaatggaaccaagttggaaaacactctgcaggatattacccaggagaacttccccaatctagcaaggaaggccaacattcaaattcaggaaacacagagaacgccacaaagatactcctcgagaagagcaactctaagacacataattgtcagattcaccaaagttgaaatgaaggaaaaaatgttaagggcagccagagagaaagactttacaccaacaaagatcaaaagagacaaagaaggccattacataatggtaaagggatcaattcaacaagaagagctaactatcctaaatatatatgcacccaatacaggagcacccagattcgtaaagcaagtcctgagtgacctacaaagagacttagactaccacacaataatactgggagactttaacaccccactgtcaacattagacagatcaacgagacagaaagttaacaaggatatccaggaattgaactcagctctgcaccaagtggacctaatagacaactacagaactctccaccccacatcaacagaatatacattcttctcagcaccacacctcacttattccaaaatggaccacatagttggaagtaaaatagcactcctgaacaaatgtaaaagaacagaaattataaccaaactatctctcagacccacagtgccaatcaaactgaaactcaggattaggaaactcacccaaaactgctcaactaccatggaaactgaacaacctgctcctgaatgactactgggtatataacgaaatgaaggcagaaataaagatgttctttgaaaccaatgagaaaaaaagacaccaacataaccagaatctctggggacacatttaaagcagtgcatagagggaaattcatagcaaaaaaatgcccacaagaggaaagcaggaaagtatctaaaattgacaccctaacatcacaattaaaaaaaactagagaagcaaagagcaaacacattcaaaagctagaagaaggcaagaaataactaagatcagagcagaactgaaggaaatagagacacaaaaatcccttcaacccttcaaaaaaaatcaatgaatccaggagctggttttttattttttatttttgaaaagatcaacaaaattgatagaccgctagcaagactaataaaggagaaaagagaggaagaatcaaatcgacgcaataaaaaaatgataacggggatatcaccaccaccgatcccacagaaatacaaactaccatcagagaatactacaaacacctctacgcaaataaactagaaaatctagaagaaatggataaattcctcaaacacatccatcctcccaagactaaaccaggaagaagttgaatctctgaatagaccaataacaggctctgaaattgaggcaataattaatagcttaccaaccaaaaaagagtccaggaaccaggtggattcacagccgaattctaccagaggtacaaagaggagctggtaccattccttctgaaactattccaatcaatagaaaaagagggaatcctccctaaactcattttatgaggccagcatcatcctgatcccaaagcctggcagagacacaacaaaaaaaagagaattttagaccaaggtgcgttgatgaacattgatgcaaaaatcctcaataaaatactggcaaaccgaatccagcagcacatcaaaaagcttatccaccatgatcaagtgggcttcatccctgggatgcaagggctggttcaatatacgcaaatcaataaacgtaatccagcatataaacaagagccaaagacaaaaaccacatgattatctcaatagatgcagaaaaagcctttgacaaaattcaacaacccttcatgctaaaaactctcaataaattaggtattgatgggacgtatttcaaaataataagagctatctatgacaaacccacagccaatatcatactgagtgggcaaaaactggaagcattccctttgaaaactggtacaagacagggatgccctctctcacctcaccactcctattcaacatagtattctgccccatagtgttctggccagggcaatcaggcaagagaaggaaataaagggtattcaattaggaaaagaggaagtcaaattgtccctgtttgcagatgacatgattgtatatctagaaaaccccattgtctcagcccaaaatctccttaagctgataggcaacttcagcaaagtctcaggatacaaaatcaatgtgcaaaaatcacaagcattcttatacaccaataacagacaaacagagagccaaatcatgagtgaactcccactcacaattgctacaaagagaataaaatacccaggaatccaacttacaagggatgtgaaggacctcttcaaggagaactacaaaccactaatcaacgaaataaaagaggacacaaacaaatgggagaacattccatgctcatggataggaagaatcaatattgtgaaaatggccatactgcccaagctaatttatggattcaatgccatccccatcaagctaccaatgactttcttcacagaattggaaaaaaactactttaaagttcatatggaaccaaaaaagagcccgcattgccaagtcaatcctaagccaaaagaacaaagctggaggcatcacactacctgacttcaaactatactacaagactacagtaaccaaaacagcatggcactggtaccaaaacagcatggtactggtaccaaaacagagatatagatcaatggaacagaacagagccctcagaaataatgccgcatatctacaactatctgatctttgacaaacctttgcttgagaaaaacaagcaatggggaaaggattccctatttaataaatggtgctgggaaaactggctagccatatgtagaaagctgaaactggatcccttccttacaccttatacaaaaatcaattcaagatggattaaaaaaaaagatttaaacgttagacctaaaaccataaaaaccctagaagaaaacctaggcattaccattcaggacataggcgtgggcaaggacttcatgtccaaaacaccaaaagcaatggcaacaaaagccaaaattgacaaatgggatctaattaaactaaagagcttctgcacagcaaaagaaactaccatcagagtgaacaggcaacctacaaaatgggagaaaattttcgcaacctactcatctgacaaagggctaatatccagaatctacaatgaactcaaacaaatttacaagaaaaaaaaaaaaacaaccccatcaaaaagtgggcaaaggacatgaacagacacttctcaaaagaagacatttatgcagccgaaaaaacacatgaaaaaatgctcaccatcactggccatcagagaaatgcaaatcaaaaccactatgagataccatctcacaccagttagaatggcaatcatgaaaaaagtcaggaaacaacagagacagagagtctctccaattggtgatggctattgcacctaatagacgcaggactggtgtctacattgacttcattgaagagacagaagaggcagacaggaaaaatcccaagagacaggctttctatgaaggcaggagtgccaagatccatcacagagcagcccgtaaatgtggaggagatacactttccaagatctgtgagcagtttatagaggggacagcattattcttcgaagtgtgttcagagaaccagcatcacttgggtcagattggggtagtggttaaaacgcagacccaacgagaacacatggacacaggaaggggaacatcacacaccggggctggtgtgagatggtatctcattgtggttttgatttgcatttctctgatggccagtgatgatgagcattttttcatgtattttttggctgcataaatgtcttcttttgagaagtgtctgttcatgtccttcgcccactttttgatggggttgtttgtttttttcttgtaaatttgtttgagttcattgtagattctggatattagccctttgtcagatgagtaggttgcgaaaattttctcccatgttgtaggttgcctgttcactctgatggtagtttcttttgctgtgcagaagctctttagtttaattagatcccatttgtcaattttggcttttgttgccattgcttttggtgttttggacatgaagtccttgcccacgcctatgtcctgaatggtaatgcctaggttttcttctaggatttttatggttttaggtctaacgtttaaatctttaatccatcttgaattgatttttgtataaggtgtaaggaagggatccagtttcagctttctacatatggctagccagttttcccagcaccatttattaaatagggaatcctttccccgttgcttgtttttctcaggtttgtcaaagatcagataattgtaggtatgcggcgttatttctgagggctctgttctgttccattgatctatatctctgttttggtaccagtaccatgctgttttagttactgtagccttgtagtatagtttgaagtcaggtagtgtgatgcctccagctttgttcttttggcttaggattgacttggcgatgcgggctcttttttggttccatatgaaatttaaagtagttttttccaattctgtgaagaaagtcattggtagcttgatggggatggcattgaatctgtaaattaccttgggcagtatggccattttcacgatattgattcttcctacccatgagcatggaatgttcttccatttgtttgtatcctcttttatttccttgagcagtggtttgtagttctccttgaagaggtccttcacatcccttgtaaattggattcctaggtattttattctctttgaagcaattgtgaatgggagttcactcatgatttggctctctgtttgtctgttgttggtgtataagaatgcttgtgatttttgtacattgattttgtatcctgagactttgctgaagttgcttatcagcttaaggagattttgggctgagacgatggggttttctagataaacaatcatgtcgtctgcaaaaagggacaatttgacttcctcttttcctaattgaataccctttatttccttctcctgcctgattgccctggccagaacttccaacactgtgttgaataggagtggtgagagagggcatccctgtcttgtgccagttttcaaaggaatgcttccagtttttgcccattcagtatgatattggcagccttgcatcccagggatgaagcccacttgatcatggtggataagctttttgatgtgctgctggattcggtttgccagtattttattgaggatttttgcatcaatgttcatcaaggatattggtctaaaattctcttttttggttgtgtctctgcccggctttggtatcagaatgatgctggcctcataaaatgagttagggaggattccctctttttctattgattggaatagtttcagaaggaatggtaccagttcctccttgtacctctggtagaattcggctgtgaatccatctggtcctggactctttttggttggtaaactattgattattgccacaatttcagctcctgttattggtctattcagagattcaacttcttcctgctttagtcttgggagagtgtatgtgtcgaggaatttatccatttcttctagattttctggtttatttgcgtagaggtgtttatagtattctctgatggtagtttgtatttctgtgggatcggtggtgatatcccctttatcattttttattgtgtctatttgattctcctctctttttttctttattagtcttgctagcggtctatcaattttgttgatcctttcaaaaaaccagctcctggattcactgatttttttgaagggttttttgtgtctctatttccttcagttctgctctgattttagttatttcttgccttctgctaacttttgaatgtgtttgctcttgcttttctacttcttttaattgtgatgttagggtgtcaattttggatctttcctgctttctcttgtgggcatttagtgctataaatttccctctacacactgctttgaatgcgtcccagagattctggtatgttgtgtctttgctctcgttggtttcaaagaacatctttatttctgccttcatttcgttatgtacccagtagtcattcaggagcaggttgttcagtttccacgtagttgagcggctttgagtgagattcttaatcctgagttctagtttgattgcactgtggtctgagagatagtttgttataatttctgttcttttacatttgctgaggagagctttacttccaactatgtggtcaattttggaataggtgtggtgtggtgctgaaaaaaatgtatattctattgatttggggtggagagttctgtagatgtctattaggtccgcttggtgcagagatgagttcaattcctgggtatccttgttgactttctgtctcattgatctgtctaatgttaacagtgaggtgttaaagtctcccattattaatgtgtgggagtctaagtctctttgtaggtcactcagaacttgctttatgaatctgggtgctcctgtattgggtgcatatatatttaggatagttagctcttcttgttgaattgatccctttaccattatgtaatggccttctttgtctcttttgatcttcccttcttgcttcatttcattcatttcatcttccattgctgataccctttcttccagttgatcgcatcggctcctgaggcttctgcattcttcacgtagttctcgagccttggttttcagctccatcagctcctttaagcacttctctgtattggttattctagttatacattcttctaaatttttttcaaagttttcaacttctttgcctttggtttgaatgtcctcccgtagctcagagtaatttgatcgtctgaaaccttcttctctcagctcgtcaaagtcattctccatccagctttgatccgttgctggtgaggaactgcgttcctttggaggaggagaggcgctctgcattttagagtttccagtttttctgttctgttttttccccat

SEQ ID NO: 131361 - DNA, 1062 bp, Homo sapiens
atgtttaacctaatgaagaaagacaaggacaaagatggcgggcggaaggagaagaaggagaaaaaggagaaaaaggagcggatgtcagcggcagagcttcggagcctggaggagatgagcctgcgacgtggcttcttcaacctgaaccgctcctccaagcgtgaatccaagacgcgcctggaaatctccaaccccatccccatcaaggtggccagcggctctgacctgcacctgactgacattgactccgatagtaaccggggcagcgtcatcctggactcgggccacctaagtacagccagctccagcgatgacctcaagggtgaggagggtagcttccgtggctcggtgctgcagcgggcagccaagttcggctcactggccaagcagaactcacagatgattgtcaagcgcttttccttctcccagcgtagccgggatgagagcgcctcagaaacctcgacgccctcagagcactctgccgccccctcgccacaggtggaggtgaggactctagagggacagctggtgcagcatcctggcccaggcatccctcgaccagggcaccgatcccgagcccctgagctagtgactaaaaagttcccagtcgacctgcgcctgccccccgtggtgcccctgcccccacctaccctccgggagctggagctgcaacgacggcccactggagactttggcttctccctgcggcgcacaaccatgctggatcggggccccgagggccaggcctgtcggcgtgtggtccactttgctgagcctggtgcaggcaccaaggacctggccctggggctggtgccaggagatcgactggtggagattaatgggcacaatgtggagagcaagtccagggatgagattgtggagatgatccggcagtcaggggacagcgtgcggctcaaggtgcagcccattccagagctcagcgagctcagcaggagctggctgcggagcggcgagggacctcgcagggagccatccgatgtgagtgcttccctgggcacctgggctaagcagggatggggaatgtgggcacctcctgcttga

SEQ ID NO: 131362 - DNA, 1095 bp, Homo sapiens
gacgatttcgtctccgccagacctgctgccagcttgcccggtccagccctgagagagcctcgaacgccagctgcgagggtcatgagccagagagccccggggcgccgcgcggagagcaagcggagatagcgactttgcgccccccagccctcgccttcttgcatcgcgttccccgcatcctcgggtccttctgtcctttccgctgtccccaccgccgccatggccaccttgctccgcagcaagctgtccaacgtggccacgtccgtgtccaacaagtcccaggccaagatgagcggcatgttcgccaggatgggttttcaggcggccacggatgaggaggcggtgggcttcgcgcattgcgacgacctcgactttgagcaccgccagggcctgcagatggacatcctgaaagccgaaggagagccctgcggggacgagggcgctgaagcgcacgtcgagggagacatccattatcagcgaggcagcggagctcctctgccgccctccggctccaaggaccaggtgggaggtggtggcgaattcgggggccacgacaagcccaaaatcacggcgtgggaggcaggctggaacgtgaccaacgccatccagtgtgaactgctgcaatcagtggccaaggctgcaagccaggcagggaaggggactgtgcaggagacagaagataaagaaatcgggaatccggcacagcagcgacaggagctcattgactcctccccaaggtgccccggagatgctgatgctgacctggaccagaggtgccagcctgggcactgccagtccccacagccattgactagagccccagggcacaggcagctagcaacttatctgggtgccccagggactgctattggcaaagtgatggccccacagggaccaaatgtgaagctaaagcaggatacgcaggtcggagataaggccaagaacagattccctttagcgctcaagtgctgtttgtcagaaattgacagccccacggccctggccggtgacaggcacaggggtctcactctgttgcccacactgaggtacactgccacaatcattgatcgtcacagccgcaaactcctgggctaa

SEQ ID NO: 131363 - DNA, 927 bp, Homo sapiens
atggagctgaaaaacatgacacaagaactacgtgatgaatgcataagcttcagtagccgattcgatcaactaggagaaagagtatcagtgattgaagatcaaatgaatgaaatgaaaccaaatctacatcggattggtgtatctgaaagtgacccggagagtggaaccaagttggaaaacactctgcaggatattatccaggagaaattccccaacctagcaaagcaggccaacattcaaattcaggaaatacagagaatgccacaaagatactccttgagaagagcaactccaagacacataattgtcagattcaccaaagctgaaatgaaagaaaaaatgttaagggcagccagagagaaagaaatacaaactaccatcagagaatactataaacacctctatgcaaataaactagaaaatctagaagaaatggataaattcctggacgcatacaccctcccaagactaaaccaggaagaagttgaatccctgaatagaccaataacgggctctgaaattgaggcaataattaatagcctaccaaccaaaaaaagtccaggaccagacggattcacagccaaattctaccagaggagagatgaggacaatgactgggctgttctgtacagttcctccttatcactcgatgttgcattcttggtacatcctacacaagacttgcaagcaagagggttttttattgctgattcaatttcagaacttgttattgttctgttcagggtttcaaaagtcttcctggttcagtctttggagtttcttgtgaagaagatgttggcttccccttctgccgtaattaaaatttctttacgggtggaagccaatttacatggattaaccctctatgacactgcaccttgccctattaacaatgaacgaacacggctactttccagagatatttga

SEQ ID NO: 131364 - DNA, 1209 bp, Homo sapiens; identical to SEQ ID NO: 130342

SEQ ID NO: 131365 - DNA, 1257 bp, Homo sapiens; identical to SEQ ID NO: 130345

SEQ ID NO: 131366 - DNA, 685 bp, Homo sapiens
atggaaataatccttcgcatttgcaaattaacaatttccaaagaacttttggacagtgggtcatccagactcacaatgacccactataagcacaggtatttttcccactctgcagaggagcagattatttcagaagaattaaatgaaagtgaaatgatttgccagcatcatcacacagctgagaatgacttcgacgagctgagagaagaaggcttcagacgatcagtaataacaaacttctccaagctaaaggaggatgttcaaacccatttcaaagaagctaaaaaccttgaaaaaagattagacgaatggctaactagaataaacagcgtagagaagaccttaaatgacctgatgtagctgaaaaccgtggcatgagaactacgtgacacatacacaagcttcaatagccgattcgatcaagtggaagaaagggtatcagtgattgaagatcaaatgaatgaaatggagcgagaagagaagtttagagaaaaaagagtataaagaaatgaacaaagcctcaagaaatatggaactatgtgaaaagaccaaatcttcatctgattggtgtatctgaaattgacagggagaatggaaccaagttggaaaacactcttcaggatattttccaggagaacttcacctacctagcaaggcaggccaacattcaaattcaggaaataca

SEQ ID NO: 131367 - DNA, 1227 bp, Homo sapiens
ataatccttcgcatttgcaaattaacaatttccaaagaacttttggacagtgggtcatccagactcacaatgacccactataagcacaggtatttttcccactctgcagaggagcagattatttcagaagaattaaatgaaagtgaaatgatttgccagcatcatcacacagctgccaggtgcccctctgagacgaagcttccagaggaaggatcaggaaacaacatttgccgttctgcaatatttgctgttctgcaacctccactggtgatactcaggcaaacagggactggagtggacctccagcaaactccaacagacctgcagctgaaggtcctaactgtaacaaggaaaactaacaaacacaaaggacatccacaccaaaaccccatctgtacatcaccatcaacaaagaccaaagagaatgacttcgacgagctgagagaagaaggcttcagacgatcagtaataacaaacttctccaagctaaaggaggatgttcgaacccatcgcaaagaagctaaaaaccttgaaaaaagattagacgaatggctaactagaataaacagtgtagagaagaccttaaatgacctgatggagctgaaaaccatggcacaagaactacgtgacacatacacaagcttcagtagccgatttgatcaagtggaagaaagggtatcagtgattgaagatcaaatgaatgacatgaagcgagaagagaagtttagagaaaaaagagtaaaaagaaacgaacaaagcctccaagaaatatgggactatgtgaaaagaccaaatctacgtctgattggtgtacctgaaaagatacaaacgaccatcagagaatactataaacacctctatgcaaataaactagaaaatctagaagaaatggataaattcctggacacatacacctgcccaagactaaaccaggaagaagttgaatccctgaatagaccagtaacaggctctgaaattgaggcaataattaatagcctaccaacaaaaaaagtccaggaccaggcagattcacagccaaattctaccagagtttttaaaacagtctgcatatcttctcttgggcatacaacagccagtgcagatacccaggatgtctgccagctgccagtcacttctcttctggagcaagggctttcttccaagtcagcaggcttcttagactatgccgtccagcgactttggttgctaggcacagaacccctgtag

SEQ ID NO: 131368 - DNA, 1280 bp, Homo sapiens
ttatcctgagactttactgaagttgcttatcagcttaaggagattttgggctgagacgatggggtttgctagatatacagtcatgtcatctgcaaacagggacaatttgacttcctctttttctaattgaataccctttatttccttctcctgcctgattttcctggccagaacttccaacattatgttgaataggagtggtgagagagcgcatccctgtcttgtgccagttttcaaagggaatgcttccagtttgtgcccattcagtatgatattggctgctggtttgtcatagatagctcttattattttgagatacgtcccatcaatacctaatttattgagagtttttagcatgaagtgttgttgaattttgtcaaaggccttttctgcatctattgagataatcatgtggtttttgtcgttggttctgtttatatgctggattatgtttattgatttgcatatgttgaaccagccttgcatcccagggatgaagcccacttgatcatggtggataagctttttgatgtgctgctggattcgttttgccagtattttattgaggattttttcatcgatgctcatcggggatattggtctaaaattctttttttgttgttgttgtgtctctgccaggctttggtatcaggatgatgctggcctcataaaatgagttagggaggattccctctttttctattaattggaatagtttcagaaggaatgggtacaagctcctccttgtacctctggtagaatttggctgtgaatccatctggtcctggactttttttggttggtaagctattaattattgcctcaatttcagagcctgttattggtctattcagagattcagcttcttcctggtttagtcttgggagggtgtaagagttgaggaatttatccatttcttgtggattttctagtttatttgcatagaggtgtttatagtattttctgatggtagtttgtatttttttccatgcttcttgtgtccctgtgttgatgtctgtgcctctgatgaaatagtcatctccaattttagagtagcttttttcaaggttcctagcttccctgcattgggttagagcatgctcctttagctcggaggagtttgttattacccaccttctgaagcctacttctgtcaattcgtcaaactcattctctgtccagttttgttcccttgctggtgaggagttgtgaacctttggagtagaagaggcattctggtttttggaattttcaggctttttgagctggtttctccccat

SEQ ID NO: 131369 - DNA, 2331 bp, Homo sapiens
atgggggtatccggagcgcagccggggcgcagctgctggcacaggagctccacaggcagccaaggactcggtcctgtcccagagcctgcggactgtggaggggaggccgcaggaagagcccgggaggaggggactgtgtccctgacaatgggaacagccgacagtgatgagatggccccggaggccccacagcacacccacatcgatgtgcacatccaccaggagtctgccctggccaagctcctgctcacctgctgctctgcgctgcggccccgggccacccaggccaggggcagcagccggctgctggtggcctcgtgggtgatgcagatcgtgctggggatcttgagtgcagtcctaggaggatttttctacatccgcgactacaccctcctcgtcacctcgggagctgccatctggacaggggctgtggctgtgctggctggagctgctgccttcatttacgagaaacggggtggtacatactgggccctgctgaggactctgctaacgctggcagctttctccacagccatcgctgccctcaaactttggaatgaagatttccgatatggctactcttattacaacagtgcctgccgcatctccagctcgagtgactggaacactccagcccccactcagagtccagaagaagtcagaaggctacacctatgtacctccttcatggacatgctgaaggtaggtggccaaggggaaggggcagcagcaggccttgttcagaacccttcaggccatgctcttgggtgtctggattctgctgcttctggcatctctgacccctctgtggctgtactgctggagaatgttcccaaccaaaggggtgagtccctaaggtgtgtgcctgtgtatttggggcagtggaactgctcaaaggagacaggaatggacagtggacagtttggggaggagaaaggggcccatgacccaagtcccacctattatcatgcctgtctttctacccagtggtggcccagcccagaaagcccctatccccaaccaagtggcccccaagtcaaagagcccaggaatccagggaagtccatatccatgctatgcctttggatcaggtaccatgctgctgattctggtagctccagagctaagctgcccctggaggagagactccgccctttctctcccactcacgattgtcttgcctttcctcttccattagaaaagagaccagaaggaaatgttggaagcaggtgcccctctgggacaaagctaccggaggaaggatcaggcagcaatatttgctgttctgcaatatttcctgttctgcagcctccgctggtgatacctaggcaaacaaggtctggagtggacctccagcaaactccaacagacctgcagctgagggacctgactgttagaaggaaaactaacaaacagaaaggacacccacaccaaaaccccatgtgtacgtcaccatcatcaaagaccaaagagctaaaggaggatgttcgaacccatcacaaagaagctaaaaaccttgaaaaaagattagacaaaatggctaaatagaataaacagtgtagagaagaccttaaatgacccgatggagctgaaaacccatggcacgagaactacacgacaaatgcacaagcttcagtagccgattcgatcaactggaagaaagggtatcagtgactgaagatcaaatgaatgaaatgaagcgagaggagaagtttagagaaaaaagagtaaaaaagaaatgaacaaagcctccaagaaatacgggactatgtgaaaagaccaaatctatgtctgactggtgtacctgaaagtgatggggagaatgaaaccaagttggaaaacactctgcaggataatatccaggagaacttccccaacctagcaaggcaggccaacattcaaattcaggaaatacagagaacgccacaaagatactcctcgagaagagcaactccaagacacataattgtcagattcaccaaagttgaaatgaaggaaaaaatgttaagggcagctggagagaaaggtcaggttacccacaaagggaagcccatcacactaacagcagatctcttggcagaaactctacaagccagaagagagtggggaccaatatttaacattcttaaagaaaagaattttcaacccagaatttcatatccagccaaactaagcttcataagtgaaggagaaataaaatcctttacagacaagcaaatgctgagagattttgtcaccaccaggcctgccttacaagagctcctgaaggaagcactaaacatggaaaggagcaaccggtaccagccactgcagaaacatgccaaattgtaa

SEQ ID NO: 131370 - DNA, 666 bp, Homo sapiens
ttatagcttggagtctagtaggttttctttcatgtgcatgcatataaacttctgccagatccttcttaatacagtggactgagagctagacacacagtctagcctgagaatgtactggcataaagtatttttattaaaattcagtttttcaactttcaaagatgtcaaagggtgttcagaagtaccttgagaacctcctgtcctgcctgaaggattttcaagtgcaaagcagacttgctgctgtacgacatgcttgtgtatgtcacactctggatacacagagctgtcacctacacacatcgggtaccgaaccactcgtatcgccggtctaatattaagtctgaaaccacggtcccactcgtatcgtcggtcctgtagaacggagtaacctcggtgtgcggttgtatgcctgctgtggattgctgctgtgtcctgcttatccacaacattttgcgcacggttatgtggacaaaatacctggttacccaggccgtgccggcacgttaaccgggctgcatccgatgcaagtgtgtcgctgtcgacggtgacccgtgtatgaaatctaacaatgcgctcatcgtcatcctcggcaccgtcaccctggatgctgtaggcataggcttggttatgccggtactgccgggcctcttgcgggatatcgtccat

SEQ ID NO: 131371 - DNA, 780 bp, Homo sapiens
ttagttgactgtcagctgtccttgctccaggatgctgtttttgacaacggatgttttattgcctttgatgttcattaagaagcttggcgcaaatgttgcctttttatcctcgaagaagcctctgtttgtcatgtagcttgtgataaccacattgttgcctttggcttgcggcactgcgaagtgagagtaagtgaatgtcacatcgtttggatcaagacccatttgcagcacaagccctgttttgttcagcggcttgtaagggccggttaaagagtttgatacataaccaagcatgtaaatatcgtttgagttaataccatcgatcgtcatttttgaaccgcgtgaatcagtgaacaagtaccatttgccgttcattttgaaaacattcgcgcgctcgatttcatcagttaccgtgtttgaagtgatcagcggcttcattacttttttcaatgtgtaatcattatttaactctatgataccgagggcgccgttcgctaactcagcatcgcgttttttagcgctctgctgaagcttctggctttctttacggaagaaattcgtgccgccgccgtagtacagcggggagttctcctggttacccagcccgtgccggcacgttaaccgggctgcatcgaatgcaagtgtgtcgctgtcgacggtgacccgtgtatgaaatctaacaatgcgctcatcgtcatcctcggcaccgtcaccctggatgctgtaggcataggcttggttatgccggtactgccgggcctcttgcgggatatcgtccat

SEQ ID NO: 131372 - DNA, 777 bp, Homo sapiens
atgaaatctaacaatgcgctcatcgtcatcctcggcaccgtcaccctggatgctgtaggcataggcttggttatgccggtactgccgggcctcttgcgggatatcgtccattccgacagcatcgccagtcactatggcgtgctcgtagcgctatatgcgttgatgcaatttctatgcgcacccgttctcggagcactgtccgacacctttgccgccgcccaggattttgccgatttcggaaccaccatcaaacaggattttcgcctgctggggcaaaccagcgtggaccgcttgctgcaactctctcagggccaggcggtgaagggcaatcagctgttgcccgtctcactggtgaaaagaaaaaccaccctggcgcccaatacgcaaaccgcctctccccgcgcgttggccgattcattaatgcagctggcacgacaggtttcccgactggaaagcgggcaatattcagttgcagtggatgtgctactgaattcagccttcaagattagggtgctcatcctccagatgttggaagtcctggctgcggacaacttgcaccaaacctcagtccctctccagaaccggattcagtcaatgggtgtggcctcatatggtgactggatgtttggatgggcacgggagttagttgtgtcagggatgttctcattacccgattatttagagggccagctaaacaagggttggctccctatcccggtcccggtatccagtaatatccagaatagaaaaggctcctccggcaactggacactttga

SEQ ID NO: 131373 - DNA, 933 bp, Homo sapiens
atgagtggatttgagaaacagtacaagaaaatccgacttgataagacattggattcagagaatgaagggctggaactgccagtgcctgccaaacggagtaacctcggtgtgcggttgtatgcctgctgtggattgctgctgtgtcctgcttatccacaacattttgcgcacggttatgtggacaaaatacctggttacccaggccgtgccggcacgttaaccgggctgcatccgatgcaagtgtgtcgctgtcgacgtcaggcaccgtgtttgaaatctaacaatgcgctcatcgtcatcctcggcaccgtcaccctggatgctgtaggcataggcttggttatgccggtactgccgggcctcttgcgggatatcgtccattccgacagcatcgccagtcactatggcgtgctgctagcgctatatgcgttgatgcaattttctatgcgcacccaaatacaaactaccatcagagaatactacaaacacctctatgcaaataaactagaaaatctagaaggaatggataaattcctcaacacatacaccctcccaagactaaaccaggaagaagttgaatctctgaatagaccaataacaggctctgaaattgtggcaataatcaatagcttaccaaccaaaaagagtccaggaccagatggattcacagccgaattctaccagaagtacaaggaaggagctggagtccgctgtggaaggcacatcacatcccacggcctggctctcaactgctctaccgacctcacgtggtttgagcacatcgtgccctgtggactggttgggacaggcgtcacttccttgagtaaggagctccagaggcacgtcaccgtggaagaagtaatgccacctttccttgtggcctttaaggagatctacaagtgcacactgatctcagaggacagccccaactga

SEQ ID NO: 131374 - DNA, 1047 bp, Homo sapiens
aggtttgagcagcagagcacggaagaagcgagccacacccccatcacatgccctgtgagggggacaagggaacatttcctgtttcatcattattcttattttacagaagaagcagtaaatgtcattcccacgtcatcctcctctctttcacctctgaagcaagtcatagaaactagaatttctccttctccagttttaaatgccgcaactcagcaagaaaaaaaaagtgtctggtatcttcctgaacaactacctggtattatacagtgtgacaatctaaaaacttgtcacacttcacatggatctgtcatggcggaaacagcggttatcaatcacaagaaacgtaaaaatagcccgcgaatcgtccagtcaaacgacctcactgaggcggcatatagtctctcccgggatcaaaaacgtatgctgtatctgttcgttgaccagatcagaaaatctgatggcaccctacaggaacatgacggtatctgcgagatccatgttgctaaatatgctggaatattcggattgacctctgcggaagccaaacggagtaacctcggtgtgcggttgtatgcctgctgtggattgctgctgtgtcctgcttatccacaacattttgcgcacggttatgtggacaaaatacctggttacccaggccgtgccggcacgttaaccgggctgcatccgatgcaagtgtgtcgctgtcgacgtcaggcaccgtgtatgaaatctaacaatgcgctcatcgtcatcctcggcaccgtcaccctggatgctgtaggcataggcttggttatgccggtactgccgggcctcttgcgggatatcgtccattccgacagcatcgccagtcactatggcgtgctgctagcgctatatgcgttgatgcaatttctatgcgcacccgttctcggagcactgtccgaccgctttggccgccgcccagtcctgctcgcttcgctacttggagccactatcgactacgcgatcatggcgaccacacccgtcctgtggatctacccactagtcaattcaccatcttgttga

SEQ ID NO: 131375 - DNA, 1104 bp, Homo sapiens
atggtgcttgtgtggaaagagagtaaggaggaattacatggggtgtgggtgtatcaagtaccgtatcgtccggaaaagggagattatcgcggtgcgatgtggtgcccagactccagtggcagccccactactgttcaggggcacgaggttctcaaggtggaggcagggccacaagaggggcagcagaaaggctctgccagtggctggcacaccattacttctgctcatgtttctgtgttcagtgacagtcccatggcaaaccctacagtcagcatagctgggagggtcaccgtcgacagcgacacacttgcatcggatgcagcccggttaacgtgccggcacggcctgggtaaccaggtattttgtccacatacccgtgcgcaaaatgttgtggataagcaggacacagcagcaatccacagcaggcatacaaccgcacaccgaggttactccgttctacagtcatatataaaatttgagaacgctgaaattgcccaaggaacaaacaaacctattggaggactaaacaaactgccacatggtttctgtgcttggaagcagcaggcagcagatccgcttctgtttgaagcagctttctgttacacaggacaaggatcctataggacaaggcgattaagtcccaccagagggctttcaacccgagtgtgggaccacgatcccactcgtgttgtcggtctgattatcggtctgggaccacggtcccacttgtattgtcgatcagactatcagcgtgagactacgattccatcaatgcctgtcaagggcaatcaggcaccgtgtatgaaatctaacaatgcgctcatcgtcatcctcggcaccgtcaccctggatgctgtaggcataggcttggttatgccggtactgccgggcctcttgcgggatatcgtccattccgacagcatcgccagtcactatggcgtgctgctagcgctatatgcgttgatgcaatttctatgcgcacccgttctcggagcactgtccgaccgctttggccgccgcccagtcctgctcgcttcgctacttggagccactatcgactacgcgatcatggcgaccacacccgtcctgggatctacccactag

SEQ ID NO: 131376 - DNA, 735 bp, Homo sapiens
ttatctaatctcccagcgtggtttaatcagacgatcgaaaatttcattgcagacaggttcccaaatagaaagagcatttctccaggcaccagttgaagagcgttgatcaatggcctgttcaaaaacagttctcatccggatctgacctttaccaacttcatccgtttcacgtacaacattttttagaaccatgcttccccaggcatcccgaatttgctcctccatccacggggactgagagccattactattgctgtatttggtaagcaaaatacgtacatcaggctcgaaccctttaagatcaacgttcttgagcagatcacgaagcatatcgaaaaactgcagtgcggaggtgtagtcaaacaactcagcaggcgtgggaacaatcagcacatcagcagcacatacgacattaatcgtgccgatacccaggttaggcgcgctgtcaataactatgacatcatagtcatgagcaactgtttcaatggccagtcggagcatcaggtgtggatcggtgggcagtttaccttcatcaaattgggggttctggttacccaggccgtgccggcacgttaaccgggctgcatccgatgcaagtgtgtcgctgtcgacggtgacccgtgtatgaaatctaacaatgcgctcatcgtcatcctcggcaccgtcaccctggatgctgtaggcataggcttggttatgccggtactgccgggcctcttgcgggatatcgtccat

SEQ ID NO: 131377 - DNA, 849 bp, Homo sapiens
  misc_feature (1)...(849): n = a,t,c or g
ttagttgactgtcagctgtccttgctccaggatgctgtttttgacaacggatgttttattgcctttgatgttcattaagaagcttggcgcaaatgttgcctttttatcctcgaagaagcctctgtttgtcatgtagcttgtgataaccacattgttgcctttggcttgcggcactgcgaagtgagagtaagtgaatgtcacatcgtttggatcaagacccatttgcagcacaagccctgttttgttcagcggcttgtaagggccggttaaagagtttgatacataaccaagcatgtaaatatcgtaattggttgccaggccgtgccggcacgttaaccgggctgcatccgatgcaagtgtgtcgctgtcgacggtgacccgtgtatgaaatctaacaatgcgctcatcgtcatcctcggcaccgtcaccctggatgctgtaggcataggcttggttatgccggtactgccgggcctcttgcgggatatcgtccattccgacagcatcgccagtcactatggcgtgcanaacacgataatcactttcggtaagtgcagcagctttacgacggcgactcccatcggcaatttctatgacaccagatactcttcgaccgaacgccggtgtctgttgaccagtcagtagaaaagaagggatgagatcatccagtgcgtcctcagtaagcagctcctggtcacgttcattacctgaccatacccgagaggtcttctcaacactatcaccccggagcacttcaagagtaaacttcacatcccgaccacatacaggcaaagtaatggcattaccgcgagccattactcctacgcgcgcaattaacgaatccaccat

SEQ ID NO: 131378 - DNA, 655 bp, Homo sapiens
tcaggcaccgtgtatgaaatctaacaatgcgctcatcgtcatcctcggcaccgtcaccctggatgctgtaggcataggcttggttatgccggtactggcgggcctcttgcgggatatcgtccattccgacagcatcgccagtcactatggcgtgctgctagcgctatatgcgttgatgcaatttctatgcgcacccgttctcggagcactgtccgaccgctttggccgccgcccagtcctgctcgcttcgctacttggagccactatcgactacgcgatcatggcgaccacacccgtcctgtggatctacccactaaacggggaggaggttatcgataaaagcaattatacatccggcgacaaccatacgctgagagaccctcactacgttgaagacaaaggccataaataccttgtattcgaagccaacacgggaacagaaaacggataccaaggcgaagaatctttatttaacaaagcgtactacggcggcggcacgaacttcttccgtaaagaaagccagaagcttcagcagagcgctaaaaaacgcgatgctgagttagcgaacggcgccctcggtatcatagagttaaataatgattacacatgtgaaaaaagtaatgaagccgctgatcacttcaaacacggtaactga

SEQ ID NO: 131379 - DNA, 937 bp, Homo sapiens
tcaggccccgtgtatgaaatctaacaatgcgctcatcgtcatcctcggcaccgtcaccctggatgctgtaggcataggcttggttatgccggtactgccgggcctcttgcgggatatcgtccattccgacagcatcgccagtcactatggcgtgctgctagcgctatatgcgttgatgcaatttctatgcgcacccgttctcggagcactgtccgaccgctttggccgccgcccagtcctgctcgcttcgctacttggagccactatcgactacgcgatcatggcgaccacacccgtcctgtggatctacccactaatcagaaaatctgagggcacctcacaggaacatgacggtatctgcgagatccatgttgctaaatatgctgaaatattcggattgacctctgcggaagccagtaaggatatacggcaggcattgaagagtttcgcggggaaggaagtggttttttatcgccctgaagaggatgccggcgatgaaaaaggctatgaatcttttccttggtttatcaaacgtgcgcacagtccatccagagggctttacagtgtacatatcaacccatatctcattcccttctttatcgggttacagaaccggtttacgcagtttcggcttagtgaaacaaaagaaatcaccaatccgtatgccatgcgtttatacgaatccctgtgtcagtatcgtaagccggatggctcaggcatcgtctctctgaaaatcgactggatcatagagcgttaccagctgcctcaaagttaccagcgtatgcctgacttccgccgccgcttcctgcaggtctgtgttaatgagatcaacagcagaactccaatgcgcctctcatacattgagaaaaagaaaggccgccagacgactcatatcgtattttccttccgcgatatcacttccatgacgacaggatag

SEQ ID NO: 131380 - DNA, 729 bp, Homo sapiens
tcagggtgctggcttttcaagttccttaagaatggcctcaattttctctatacactcagttggaacacgagacctgtccaggttaagcaccattttatcgcccttatacaatactgtcgctccaggagcaaactgatgtcgtgagcttaaactagttcttgatgcagatgacgttttaagcacagaagttaaaagagtgataacttcttcagcttcaaatatcaccccagcttttttctgctcatgaaggttagatgcctgctgcttaagtaattcctctttatctgtaaaggctttttgaagtgcatcacctgaccgggcagatagttcaccggggtgagaaaaaagagcaacaactgatttaggcaatttggcggtgttgatacagcgggtaataatcttacgtgaaatattttccgcatcagccagcgcagaaatatttccagcaaattcattctgcaatcggcttgcataacgctgaccacgttcataagcacttgttgggcgataatcgttacccaatctggataatgcagccatctgctcatcatccagctcgccaaccagaacacgataatcactgggggttcttcgtgtatgaaatctaacaatgcgctcatcgtcatcctcggcaccgtcaccctggatgctgtaggcataggcttggttatgccggtactgccgggcctcttgcgggatatcgtccattccgacagcatcgccagtcat

SEQ ID NO: 131381 - DNA, 678 bp, Homo sapiens
atggcggaaacagcggttatcaatcacaagaaacgtaaaaatagcccgcgaatcgtccagtcaaacgacctcactgaggcggcatatagtctctcccgggatcaaaaacgtatgctgtatctgttcgttgaccagatcagaaaatctgatggcaccctacaggaacatgacggtatctgcgagatccatgttgctaaatatgctgaaatattcggattgacctctgcggaagccagtaaagatatacggcaggcattgaagagtttcgcggggaaggaagtggttttttatcgccctgaagaggatgccggcgatgaaaaaggctatgaatcttttccttgtcaggcaccgtgtatgaaatctaacaatgcgctcatcgtcatcctcggcaccgtcaccctggatgctgtaggcataggcttggttatgccggtactgccgggcctcttgcgggatatcgtccattccgacagcatcgccagtcactatggcgtgctgctagcgctatatgcgttgatgcaatttctatgcgcacccgttctcggagcactgtccgaccgctttggccgccgcccagtcctgctcgcttcgctacttggagccactatcgactacgcgatcatggcgaccacacccgtcctgtggatctacccactagtcaattcaccatcttgttga

SEQ ID NO: 131382 - DNA, 687 bp, Homo sapiens
atgaaactcatggaaacacttaaccagtgcataaacgctggtcatgaaatgacgaatgctatcgccattgcacagtttaatgatgacagcccggaagcgaggaaaataacccggcgctggagaataggtgaagcagcggatttagttggggtttcttctcaggctatcagagatgccgagaaagcagggcgactaccgcacccggatatggaaattcgaggacgggttgagcaacgtgttggttatacaattgaacaaattaatcatatgcgtgatgtgtttggtacgcgattgcgacgtgctgaagacgtatttccaaccgggatcggggttgctgccataaaagtgggtcaggcaccgtgtatgaaatctaacaatgcgctcatcgtcatcctcggcaccgtcaccctggatgctgtaggcataggcttggttatgccggtactgccgggcctcttgcgggatatcgtccattccgacagcatcgccagtcactatggcgtgctgctagcgctatatgcgttgatgcaatttctatgcgcacccgttctcggagcactgtccgaccgctttggccgccgcccagtcctgctcgcttcgctacttggagccactatcgactacgcgatcatggcgaccacacccgtcctgtggatctacccactagtcaattcaccatcttgttga

SEQ ID NO: 131383 - DNA, 643 bp, Homo sapiens
tcaggcaccgtgtatgaaatctaacaatgcgctcatcgtcatcctcggcaccgtcaccctggatgctgtaggcataggcttggttatgccggtactgccgggcctcttgcgggatatcgtccattccgacagcatcgccagtcactatggcgtgctgctagcgctatatgcgttgatgcaatttctatgcgcacccgttctcggagcactgtccgaccgctttggccgccgcccagtcctgctcgcttcgctacttggagccactatcgactacgcgatcatggcgaccacacccgtcctgtggatctacccactaaaccggtttacgcagtttcggcttagtgaaacaaaagaaatcaccaatccgtatgccatgcgtttatacgaatccctgtgtcagtatcgtaagccggatggctcaggcatcgtctctctgaaaatcgactggatcatagagcgttaccagctgcctcaaagttaccagcgtatgcctgacttccgccgccgcttcctgcaggtctgtgttaatgagatcaacagcagaactccaatgcgcctctcatacattgagaaaaagaaaggccgccagacgactcatatcgtattttccttccgcgatatcacttccatgacgacaggatag

SEQ ID NO: 131384 - DNA, 808 bp, Homo sapiens
atgaaatctaacaatgcgctcatcgtcatcctcggcaccgtcaccctggatgctgtaggcataggcttggttatgccggtactgccgggcctcttgcgggatatcgtccattccgacagcatcgccagtcactatggcgtgctgctagcgctatatgcgttgatgcaatttctatgcgcacccgttctcggagcactgtccgaccgctttggccgccgcccagtcctgctcgcttcgctacttggagccactatcgactacgcgatcatggcgaccacacccgtcctgtggatctacccactagatctggctctgaaggggctacgtgttttgctcgtggaaggtaacgacccccagggaacagcctcaatgtatcacggatgggtaccagatcttcatattcatgcagaagacactctcctgcctttctatcttggggaaaaggacgatgtcacttatgcaataaagcccacttgctggccggggcttgacattattccttcctgtctggctctgcaccgtattgaaactgagttaatgggcaaatttgatgaaggtaaactgcccaccgatccacacctgatgctccgactggccattgaaactgttgctcatgactatgatgtcatagttattgacagcgcgcctaacctgggtatcggcacgattaatgtcgtatgtgctgctgatgtgctgattgttcccacgcctgctgagttgtttgactacacctccgcactgcagtttttcgatatgcttcgtgatctgctcaagaacgttgatcttaaagggttcgagcctgatgtac

SEQ ID NO: 131385 - DNA, 675 bp, Homo sapiens
  misc_feature (1)...(675): n = a,t,c or g
tcagcgtatggttgtcgccggatgtataattgccttcatcgataaactgctgaacgttctgatatgttttccgtctccgtcaaaaatcgttttgtgatcttccactccgttgattttgagtgtgtcatcagattttgacacatttacctgcgctgttgtcaggctttgtttgccgtaatgtttaccggaatagtcagtgtagaataaacggatttttccgtcagatgtaaaggttgcagaaccggaccattcttgcgtctgatctttcaggatcggatcgttggcgtcgaacttatcgctgtctttaaagacacggcccgcgtttttccagctgtcgattgagttgtcgccgaccttttgataaaacatgtagattgatgtgtcatcagcgtctttcgggcttcccgcaagagcaaacacaacgtgatagccgttgtattcagctactgttccgtcagcgttttgcagcggccagctgtcccacacatcaagtccttttgcagactcaatatttttaatcgttgattgatcgaattggggcacttggttttttcgttttgngtgtatgaatctaacaatgcgctcatcgtcatcctcggcaccgtcaccctggatgctgtaggcataggcttggttatgccggtactgccgggcctcttgcgggatatcgtccat

SEQ ID NO: 131386 - DNA, 1688 bp, Homo sapiens
agatactggaaacaatgagtggaagcagcaggagggactcagtcacaacaattggcttggtcttggatgcctctttggtcctgagacacccattttctacccagcaacactgggtcatacaagcagtatttattatgaaagaaaaaaggaagataagaatggcatgaaggaagagcatgatacaagtgtcgcaatgttctttaccttattcaatttccaaatttctgttgagaacattagaaaaggccccatggtggtaggagagtcaattgctcagagttacctaaatgttgtacaagaaatattcaggtccagaaaccaccagcttctccaggacttaacaagggacttgtgtgacaatctaaaaacttgtcacacttcacatggatctgtcatggcggaaacagcggttatcaatcacaagaaacgtaaaaatagcccgcgaatcgtccagtcaaacgacctcactgaggcggcatatagtctctcccgggatcaaaaacgtatgctgtatctgttcgttgaccagatcagaaaatctgatggcaccctacaggaacatgacggtatctgcgagatccatgttgctaaatatgctgaaatattcggattgacctctgcggaagccagtaaggatatacggcaggcattgaagagtttcgcggggaaggaagtggttttttatcgccctgaagaggatgccggcgatgaaaaaggctatgaatcttttccttggtttatcaaacaacggagtaacctcggtgtgcggttgtatgcctgctgtggattgctgctgtgtcctgcttatccacaacattttgcgcacggttatgtggacaaaatacctggttacccaggccgtgccggcacgttaaccgggctgcatccgatgcaagtgtgtcgctgtcgacgtcaggcaccgtgtatgaaatctaacaatgcgctcatcgtcatcctcggcaccgtcaccctggatgctgtaggcataggcttggttatgccggtactgccgggcctcttgcgggatatcgtccatttccgacagcatcgccagtcactatggcgtgctgctagcgctatatgcgttgatgcaatttctatgcgcacccgttctcggagcactgtccgaccgctttggccgccgcccagtcctgctcgcttcgctacttggagccactatcgactacgcgatcatggcgaccacacccgtccgggggcattcagttttaaaagggaaacagcataaaagtgtggaaaatttgcagcctgataatgtgatagaaaagaaaatcccattttctggggagaaattcaagccagctgcagaaatttgcaaaagtaacagggagctgaatgttaatcaccaagacaatggagaaaatgtctccagggcttgtcagagacctttgctgcagcccctcccatcacaggcctggagatttaggaggaaaaactggttttgtgggccaggcccttggtcccccttcagtgtgcagtcaagggacttggtgccctgtgtcccagctgctccagccttgactaaaaggggccaaggtacggctcaggctgttgcttcagagggtggaagccccaagccttggcagcttccacatggtgttgagcctgcgggtgcacagaaatcaagagctgaggtttgggaacctccacctagatttcagaagatgtag

SEQ ID NO: 131387 - DNA, 640 bp, Homo sapiens
ccgcccttttttttttttttttctgttgcacactgcaaatggaaagttctggattccacctagggcaccatcgggaggccaatggggtcatatggagacacacgcagatcctgcagcaaagcttctaggttgttcctcagcatggcgtagggcggcttctcctcatacgtgagggccatcaccaccttcaggtacttctgcagggtctctgagggcctgatccagtgaccgcagggtcccacgaagggccccggcttatcaacaaacttctgtttttgcttcatgatgtcctcagtgttgggaaggcaatttgtccatggcagaaacccgtagagccacttcagcatgcagtagcccaggctctggaggtcgctgcggcgggagggcccgcatcccttgtgcaggtccatgctaatgaactcaaggtccccctcgtgagggctcctgctgccttccacgtaggccacgtgtttgccacttgggcaatagcggaaggcgaagccatagcctgccaaagtcacctgactctggtcctctggatccacaaagatattttcagctgtcacatttccatgaacatactcattctcatggaggaactccaggcatccagcagcccgcaggccacctgcagcacaga

SEQ ID NO: 131388 - DNA, 2103 bp, Homo sapiens
tcagaaaaccagggtggtatttgaaaacatagcagctgtgattccacaggggaaagagccaatgacagagctctctttggaacagggctttaaaagtgaaacaggataaacaggtttgatggcagcgtgaaatattttccgcatcagccagcgcagaaatatttccagcaaattcattctgcaatcggcttgcataacgctgaccacgttcataagcacttgttgggcgataatcgttacccaatctggataatgcagccatctgctcatcatccagctcgccaaccagaacacgatatcactttcggtaagtgcagcagctttacgacggcgactcccatcggcaatttctatgacaccagatactcttcgaccgaacgccggtgtgccatagtgactggcgatgctgtcggaatggacgatatcccgcaagaggcccggcagtaccggcataaccaagcctatgcctacagcatccagggtgacggtgccgaggatgacgatgagcgcattgttagatttcatacacggctttgcagaaactttcagcggtataccggcatacagcatgtgcatcgcataggaatggcggaacgtatgtggtgtgaccggaacagagaacgtcacaccgtcagcagcagcggcggcaaccgcctccccaatccagaacattttgaggcatttcagtcagttgctcaatgtacctataaccagaccgttcagctggatattacggcctttttaaagaccgtaaagaaaaataagcacaagttttatccggcctttattcacattcttgcccgcctgatgaatgctcatccggagttccgtatggcaatgaaagacggtgagctggtgatatgggatagtgttcacccttgttacaccgttttccatgagcaaactgaaacgttttcatcgctctggagtgaataccacgacgatttccggcagtttctacacatatattcgcaagatgtggcgtgttacggtgaaaacctggcctatttccctaaagggtttattgagaatatgtttttcgtctcagccaatccctgggtgagtttcaccagttttgatttaaacgtggccaatatggacaacttcttcgcccccgttttcaccatgggcaaatattatacgcaaggcgacaaggtgctgatgccgctggcgattcagaggatccccctccgagaacgggtgcgcatagaaattgcatcaacgcatatagcgctacagcacgccatagtgactggcgatgctgtcggaatggacgatatcccgcaagaggcccggcagtaccggcataaccaagcctatgcctacagcatccagggtgacggtgccgaggatgacgatgagcgcattgttagatttcatacacgccacacgggaacagaaaacggataccaaggcgaagaatctttatttaacaaagcgtactacggcggcggcacgaacttcttccgtaaagaaagccagaagcttcagcagagcgctaaaaaacgcgatgctgagttagcgaacggcgccctcggtatcatagagttaaataatgattacacattgaaaaaatgccttgctaatgagtgtactcagcagagcagcagattcagcatctcccaggagattgttagatatgcagaattgaagacagtgcttcagacctacagaatcagaatctgtattttaacaaggttccaagtacttcatgtgcatgttaattttggagaagcattcctgtttggttatctagacgtaaatgctcaaatggtgtattgttggcccagggcttcccggtatcaacagggacaccaggatttatttattctgcgaagtgatcttccgtcacaggtatttattcgcgataagctcatggagcggcgtaaccgtcgcacaggaaggacagagaaagcgcggatctgggaagtgacggacagaacggtcaggacctggattggggaggcggttgccgccgctgctgctgacgggtgtgacgttctctgttccggtcacaccacatacgttccgccattcctatgcgatgcacatgctgtatgccggtataccgctgaaagttctgcaaagcctgatgggacataa

SEQ ID NO: 131389 - DNA, 2513 bp, Homo sapiens
  misc_feature (1)...(2513): n = a,t,c or g
atgaagcgtgcgcctgttattccaaaacatacgctcaatactcaaccggttgaagatacttcgttatcgacaccagctgccccgatggtggattcgttaattgcgcgcgtaggagtaatggctcgcggtaatgccattactttgcctgtatgtggtcgggatgtgaagtttactcttgaagtgctccggggtgatagtgttgagaagacctctcgggtatggtcaggtaatgaacgtgaccaggagctgcttactgaggacgcactggatgatctcatcccttcttttctactgactggtcaacagacaccggcgttcggtcgaagagtatctggtgtcatagaaattgccgatgggagtcgccgtcgtaaagctgctgcacttaccgaaagtgattatcgtgttctggttggcgagctggatgatgagcagatggctgcattatccagattgggtaacgattatcgnccaacaagtgcttatgaacgtggtcagcgttttgcaagccgattgcaaatgaatttgctggaatatttcttgcgctggctgatggcgaaaatatttcctcaggcaccgtgtatgaaatctaacaatgcgctcatcgtcatcctcggcaccgtcaccctggatgctgtaggcataggcttggttatgccggtactgccgggcctcttgcgggatatcgtccattccgacagcatcgccagtcactatggcgtgctgctagcgctatatgcgttgatgcaatttctatgcgcacncgtcggcgacaactcaatcgacagctggaaaaacgcgggccgtgtctttaaagacagcgataagtttggacgccaacgatccgatcctgaaaagacaaacgccaagaatggtccggttttgcaaccttttacttcgacgggaaaaatccgtttattctacactgactattcgggtaaccattacggcaaacaaagcttgacaacagcgcaggtaaatgtgtcaaaatctgatgacacactcaaaatcaacggagtggaagatcacaaaacgatttttgacggagacggaaaaacatatcagaacgttcagcagtttatcgatgaaggcaattatacatccggcgacaaccatacgctgagagaccctcactacgttgaagacaaaggccataaataccttgtattcgaagccaacacgggaacagaaaacggataccaaggcgaagaatctttatttaacaaaagcgtactacggcggcggcacgaacttcttccgtaaagaaagccagaagcttcagcagagcgctaaaaaacgcgatgctgagttagcgaacggcgccctcggtatcatagagttaaataatgattacacattgaaaaaagtaatgaaagccgctgatcactttcaaacaccggtaactgatgaaatcgagcgcgcgaatgttttcaaaatgaacggcaaatgtcaggcaccgtgtatgaaatctaacaatgcgctcatcgtcatcctcggcaccgtcaccctggatgtctgtaggcataggcttggttatgccggtactgccgggccttctgcgggatatcgtccattccgacagcatcgccagtcactatggcgtgctgctagcgctatatgcgttgatgcaatttctatgcgcacccgttctcggagcactgtccgaccgctttggccgccgcccagtcctgctcgcttcgctacttggagccactatcgactacgcgatcatggcgaccacacccgtcctgtggatctacccactagtaaatgtgtcaaaatctgatgacacactcaaaatcaacggagtggaagatcacaaaacgatttttgacggagacggaaaaacatatcagaacgttcagcagtttatcgatgaaggcaattatacatccggcgacaaccatacgctgagagaccctcactacgttgaagacaaaggccataaataccttgtattcgaagccaacacgggaacagaaaacggataccaaggcgaagaatctttatttaacaaagcgtactacggcggcggcacgaacttcttccgtaaagaaagccagaagcttcagcagagcgctaaaaaacgcgatgctgagttagcgaacggcgccctcggtatcatagagttaaataatgattacacattgaaaaaagtaatgaagccgctgatcacttcaaacacggtaactgatgaaatcgagcgcgcgaatgttttcaaaatgaacggcaaatggtacttgttcactgattcacgcggttcaaaaatgacgatcgatggtattaaactcaacgatatttacatgcttggttttgtatcaaactctttaaccggcccttacaagccgctgaacaaaacagggcttgtgctgcaaatggttcttgatccaaacgatgtgacattcactaacttttaccttccagggccgcaagccaaagcaaacatgtggttattacaagctcatgacaaaaaaagcttttcaaggataaaaggcacctttggcccagctctttag

SEQ ID NO: 131390 - DNA, 6642 bp, Homo sapiens
  misc_feature (1)...(6642): n = a,t,c or g
ccccttatcgctgtctttaaagaccggcccgcgtttttccagctgtcgattgagttgtcgccgaccttttgataaaacatgtagattgatgtgtcatcagcgtctttcgggcttcccgcaagagcaaacacaacgtgatagccgttgtattcagctactgttccgtcagcgttttgcagcggccagctgtcccacacatcaagtccttttgcagactcaatatttttaatcgttgattgatcgaattgaggcacttggtatttttcgttttgctgctgtttagggatctgcagcatatcatggcgtgtaatatgagagacgccgtacgtttctttgtatgctttttggttattttctttcgcgaaggcttgagtcgctcctcctgccagaagtgcagtcgtaaaagtcagaactgtggcttgttttacaatttttttgatgttcatgttcatgtctccttctgtatgtactgttttttgcgatctgccgtttcgatcctcccgaattgagggtgtggtcgccatgatcgcgtagtcgatagtggctccaagtagcgaagcgagcaggactgggcggcggccaaagcggtcggacagtgctccgagaacgggtgcgcatagaaattgcatcaacgcatatagcgctagcagcacgccatagtgactggcgatgctgtcggaatggacgatatcccgcaagaggcccggcagtaccggcataaccaagcctatgcctacagcatccagggtgacggtgccgaggatgacgatgagcgcattgttagatttcatacacggtgcctttgtcaatgtgtaatcattatttaactctatgataccgagggcgccgttcgctaactcagcatcgcgttttttagcgctctgctgaagcttctggctttctttacggaagaagttcgtgccgccgccgtagtacgctttgttaaataaagattcttcgccttggtatccgttttctgttcccgtgttggcttcgaatacaaggtatttatggcctttgtcttcaacgtagtgagggtctctcagcgtatggttgtcgccggatgtataattgccttcatcgataaactgctgaacgttctgatatgtttttccgtctccgtcaaaaatcgttttgtgatcttccactccgttgattttgagtgtgtcatcagattttgacacatttacctgcgctgttgtcaggctttgtttgccgtaatgtttaccggaatagtcagtgtagaataaacggatttttccgtcagatgtaaaggttgcagaaccggaccattcttgcgtctgatctttcaggatcggatcgttggcgtcgaacttatcgctgtctttaaagacacggcccgcgtttttccagctgtcgattgagttgtcgccgaccttttgataaaacatgtagattgatgtgtcatcagcgtctttcgggcttcccgcaagagcaaacacaacgtgatagccgttgtattcagctactgttccgtcagcgttttgcagcggccagctgtcccacacatcaagtccttttgcagactcaatatttttaatcgttgattgatcgaattgaggcacttggtatttttcgttttgctgctgtttagggataagaggtgaattgactagtgggtagatccacaggacgggtgtggtcgccatgatcgcgtagtcgatagtggctccaagtagcgaagcgagcaggactgggcggcggccaaagcggtcggacagtgctccgagaacgggtgcgcatagaaattgcatcaacgcatatagcgctagcagcacgccatagtgactggcgatgctgtcggaatggacgatatcccgcaagaggcccggcagtaccggcataaccaagcctatgcctacagcatccagggtgacggtgccgaggatgacgatgagcgcattgttagatttcatacacggtgcctgattgaagccttgatttgaagcccttgatactatgccagggtggagcttgatcctccaacctctgctgaaatccctagagcaattcagagcatcaggctcgaaccctttaagatcaacgttcttgagcagatcacgaagcatatcgaaaaactgcagtgcggaggtgtagtcaaacaactcagcaggcgtgggaacaatcagcacatcagcagcacatacgacattaatcgtgccgatacccaggttaggcgcgctgtcaataactatgacatcatagtcatgagcaacagtttcaatggccagtcggagcatcaggtgtggatcggtgggcagtttaccttcatcaaatttgcccattaactcagtttcaatacggtgcagagccagacaggaaggaataatgtcaagccccggccagcaagtgggctttattgcataagtgacatcgtccttttccccaagatagaaaggcaggagagtgtcttctgcatgaatatgaagatctggtacccatccgtgatacattgaggctgttccctgggggtcgttaccttccacgagcaaaacacgtagccccttcagagccagatcctggttacccaggccgtgccggcacgttaaccgggctgcatccgatgcaagtgtgtcgctgtcgacggcaggcaccgtgtatgaaatctaacaatgcgctcatcgtcatcctcggcaccgtcaccctggatgctgtaggcataggcttggttatgccggtactgccgggcctcttgcgggaatatcgtccattccgacagcatcgccagtcactatggcgtgctgctagcgctatatgcgttgatgcaatttctatgcgcacccgttctcggagcactgtccgaccgctttggccgccgcccagtcctgctcgcttcgctacttggagccactatcgactacgcgatcatggcgaccacacccgtcctgtggatctacccactagtcaattcaccatcttgttgagaaataaaagaagggatcctctagatcctcgggatgctaagctttctgtttggggcctagttccttcagtcttcctttgtcgtcatacactttctctccagtttaatgatgacagcccggaagcgaggaaaataacccggcgctggagaataggtgaagcagcggatttagttggggtttcttctcaggctatcagagatgccgagaaagcagggcgactaccgcacccggatatggaaattcgaggacgggttgagcaacgtgttggttatacaattgaacaaattaatcatatgcgtgatgtgtttggtacgcgattgcgacgtgctgaagacgtatttccaccggtgatcggggttgctgcccataaaggtggcgtttacaaaacctcagtttctgttcatcttgctcaggatctggctctgaaggggctacgtgttttgctcgtggaagtgactggcgatgctgtcggaatggacgatatcccgcaagaggcccggcagtaccggcataaccaagcctatgcctacagcatccagggtgacggtgccgaggatgacgatgagcgcattgttagatttcatacacgggtcaccgtcgacagcgacacacttgcatcggatgcagcccggttaacgtgccggcacggcctgggtaaccaggtattttgtccacataaccgtgcgcaaaatgttgtggataagcaggacacagcagcaatccacagcatgctatacaaccgcacaccgagaaaacggataccaaggcgaagaatctttatttaacaaagcgtactacggcggcggcacgaacttcttccgtaaagaaagccagaagcttcagcagagcgctaaaaaacgcgatgctgagttagcgaacggcgccctcggtatcatagagttaaataatgattacacattgaaaaaagtaatgaagccgctgatcacttcaaacacggtaactgatgaaatcgagcgcgcgaatgttttcaaaatgaacggcaaatggtacttgttcactgattcacgcggttcaaaaatgacgatcgatggtattaactcaaacgatatttacatgcttggttatgtatcaaactctttaaccggcccttacaagccgctgaacaaaacagggcttgtgctgcaaatgggtcttgatccaaacgatgtgacattcacttactctcacttcgcagtgccgcaagccaaaggcaacaatgtggttatcacaagctacatgacaaacagaggcttcttcgaggataaaaaggcaacatttgcgccaagcttcttaatgaacatcaaaggcaataaaacatccgttgtcaaaaacagcatcctggagcaaggacagctgacatggctccaagtagcgaagcgagcaggactgggcggcggccaaagcggtcggacagtgctccgagaacgggtgcgcatagaaattgcatcaacgcatatagcgctacagcacgccatagtgactggcgatgctgtcggaatggacgatatcccgcaagaggcccggcagtaccggcataaccaagcctatgcctacagcatccagggtgacggtgccgaggatgacgatgagcgcattttccgcaccctgaaggaatacctgtctcatgaacaggatatgctgcgtcttcgcatcatgatctggcgcactcttgcgaccgacacctttgacatcgctctgccggttaaccagtcctttgatgtatgggcaaccatcattcgtggcaaattccagactgtatatcgcgacattattgagcgcgttaaatcttctgacagctgtgacgtctctggatctgaagtgttaaagtttcacgtaatacgaacgccgagcacttctcaggcaccgtgtatgaaatctaacaatgcgctcatcgtcatcctcggcaccgtcaccctggatgctgtaggcataggcttggttatgccggtactgccgggcctcttgcgggatatcgtccattccgacagcatcgccagtcactatggcgtgctgctagcgctatatgcgttgatgcaatttctatgcgcacccgttctcggagcactgtccgaccgctttggccgccgcccagtcctgctcgcttcgctacttggagccactatcgactacgcgatcatggcgaccacacccgtcctgtggatctacccactatgtgacaatctaaaaacttgtcacacttcacatggatctgtcatggcggaaacagcggttatcaatcacaagaaacgtaaaaatagcccgcgaatcgtccagtcaaacgacctcactgaggcggcatatagtctctcccgggatcaaaaacgtatgctgtatctgttcgttgaccagatcagaaaatctgatggcaccctacagggaacatgacggtatctgcgagatccatgttgctaaatatgctgaaatattcggattgacctctgcggaagccagtaaggatatacggcaggcattgaagagtttcgcggggaaggaagtggttttttatcgccctgaagaggatgccggcgatgaaaaaggctatgaatcttttccttggtttatcaaacgtgcgcacagtccatccagagggctttacagtgtacatatcaacccatatctcattcccttctttatcgggttacagaaccggtttacgcagtttcggcttagtgaaacaaaagaaatcaccaatccgtatgccatgcgtttatacgaatccctgtgtcagtatcgtaagccggatgcgtcaggcatcgtctctctagagatcgactggatcatagagcgttacaagctgcctcaaagttaccagcgtatgcctgacttccgccgccgcttcctgcaagtgctccgagaacgggtgcgcatagaaattgcatcaacgcatatagcgctagagcacgccatagtgactggcgatgctgtcggaatggacgatatcccgcaagaggcccggcagtaccggcataaccaagcctatgcctacagcatccagggtgacggtgccgaggatgacgatgagcgcattgttagatttcatacacgggtcaccgtcgacagcgacacacttgcatcggatgcagcccggttaacgtgccggcacggcctgtgtaaccagtcaattcgggaggatcgaaacggcagatcgcaaaaaacagtacatacagaaggagacatgaacatgaacatcaaaaaaattgtaaaacaagccacagttctgacttttacgactgcacttctggcaggaggagcgactcaagccttcgcgaaagaaaataaccaaaaagcatacaaagaaacgtacggcgtctctcatattacacgccatgatatgctgcagatccctaaacagcagcaaaacgaaaaataccaagtgcctcaattcgatcaatcaacgattaaaaatattgagtctgcaaaaggacttgatgtgtgggacagctggccgctgcaaaacgctgacggaacagtagctgaatacaacggctatcacgttgtgtttgctcttgcgggaagcccgaaagacgctgatgacacatcaatctacatgttttatcaaaaggtcggcgacnactcaatcgacagctggaaaaacgcgggccgtgtctttaaagacagcgataagttcgacgccaacgatccgatcctgaaagatcagacgcaagaatggtccgggttctgcaacctttacatctga

SEQ ID NO: 131391 - DNA, 1732 bp, Homo sapiens
atgtcaaccaagaattctacagatctagttgaatatgttgacaagttaattacttttaaaaaggctgtgctcctcaaaagtcctgttaatctggcctttgaactcatttcccctgggcatttcagccagatcctggtctccaatggagccttgtcagctccagtcctaggcccccaccccaccagacagttgaagtatgtgggatggggtaggagccaaggcggatatgaggaccgggaagctggaggcagaagtatccatggaatcaggcaaatgttcacgagcggccgttcggacctcatggccctgaatgcaagtaacggcacactcagacaccaggatacaaatgtaaacaaaagtgcctctccaactgcgactgcagaggaacagccagttgaacctgatggcccccttcctggctcagacaataaccaagaaaagaaagcaacttcagaagtttggaaattagcctgtgaagaagttaagcactatgaagaagttaagtggtatggaataaaagacaactacaggtttggtcttcgcagaaaccctgtggagttggatttgggcctggtgcttagcgaccttgcaggaagtggtgctctcttggatgccatattactgaccaacacagtcaacagtcataattttgagagacattggcaaaatggaatcaagcagcattacttagaggctcgggtgggtcatcggagaaagacaacatgtccccttagagattcaggtcagcaacaccaaacagccgggagagactatcggataacaaaggggtacctaatcgagggtatcatgtctacttgtgtggcgctgatcatggaagcgaaaaagctattgatgtcacttgaagtgtccggtcatccttcatcagtgaatacctgtctggaggtcactcgtgcacgcggcgtaatggtgcaggtaggtatgggaggcgcgatggcagaattcccaatgatgacgttgattggtaaggagatttcactcagaggctctttccgttttaccagcgaatttaataccgcagtgtcatggctggcgaatggcgttatcaatcctactgcctttactgagtgctgaatatcccttcactgacctggaagaggcggtacgtttcgccgaacttgctgtagaaaaactccaccaggagggtattcaggccgttgccgcaccttttaatgttactcataaacatgaaattgatgccgccgttgaacatatcgaaaaggacatcggccccattgatgtgctggtgaataacgccggtatccagcgccgtcatccttttactgagtttcctgaacaagagtggaatgatgtgatcgcagtaaaccagaccgccgtgttcctggtatcgcaagcggtaactcgtcacatggttgaacgcaaggcaggtaaagttattaatatttgctcgatgcaaagcgaactgggacgtgacaccatcaccccttatgccgcatcgaaaggggcggtaaaaatgctcacccgcggcatgtgcgtcgagctggcgcgccacaatattcaggtcaacggtattgcgccgggctatttcaaaacagaaatgactaaagcactggttgaggacgaagccttcaccgcctgcatgaggacgcagcaagaaggtagctatctgcaagccaggaccaaggccctcatcgggaacagaatctgctggcaccttgctcctggacttcccagcctgcagaacaaatcccat

SEQ ID NO: 131392 - DNA, 6979 bp, Homo sapiens
gggcggccgttcccgcggccccctcggctttgccagcgccgcctgcgaggcggaggcaggatgaagatgactggggatttcgaggagtgtctgaaggactcgccccgcttcagggcagctttggaagaagtagaaggtgatgtggcagaattggaactaaaacttgataagcttgtgaaacttgggattgcaatgattgatactggaaaagccttttgtgttgcaaataaacagttcatgaatgggattcgagacctggcccagtattctagtaatgatgctgtcgttgagacaagtttgaccaagttttctgacagtcttcaagaaatgataaattttcacacaatcctgtttgaccaaactcagagatcaatttaaggcacagcttcagtaactttgttaaagaagatcttagaaaattcaaagatgccaagaagcaatttgaaaaagtcagtgaagaaaaagaaaatgcgttagtaaaaaatgcccaagtacaaagaaacaaacaacatgaagttgaagaagccaccaacattctgacagcaacaagaaaatgtttccgacacatagccctcgattatgtgcttcagattaatgttcttcaatcaaaaaggagatcagaaatcctaaaatcaatgttgtcatttatgtatgcccatttggccttctttcatcaaggatatgatctgtttagtgaacttggaccctacatgaaggatcttggtgcacagttggatcgactggttggggatgcagcaaaggagaaaagagaaatggagcaaaaacattccaccattcaacaaaaggatttctccagggatgattctaaattaaaatataacgtagatgctgcaaatggcatagttatggaaggatatctgttcaaacgagccagcaatgccttcaaaacttggaacaggcgctggttttcaatacaaaataatcaggtggtttaccagaaaaaatttaaggataatccgactgtggtagttgaagacctcaggctttgcacagtgaaacattgtgaagacatagagcgacgattctgctttgaggtggtctcgccaacaaaaagttgtatgctccaggcagattccgaaaagctgcgccaggcatggattaaggctgttcagaccagtattgctactgcttatagagagaagggtgatgaatcagagaagctggataagaaatcatctccatccacaggaagcctagattctggaaatgagtccaaagagaaattattgaaaggagaaagtgcgcttcagcgggtccagtgtatccctggcaatgccagctgttgtgactgtggcctggcagatccacggtgggccagcatcaacctgggcatcaccttgtgtatcgagtgctccggaattcaccggagccttggggttcatttttcaaaagtacgatctttaactttagacacctgggagccagaacttttaaagcttatgtgtgagttggggaatgatgttataaatcgagtttatgaagctaatgtggaaaaaatgggaataaagaaaccccaaccaggacaaagacaggagaaggaggcatatatcagagcaaaatatgtggagaggaaatttgtggataaatattctatatcattatcacctcctgagcagcaaaaaaagtttgtctctaaaagttctgaagaaaagaggctgagcatttctaaatttgggccaggggaccaagtcagagcatctgcccaaagttcagtcagaagtaatgacagtggaattcagcagagctctgatgatggaagagaatctttaccctccacggtgtcagccaatagtttatatgagcctgaaggagaaaggcaagattcttctatgtttcttgactcgaaacatcttaatccaggacttcagctttatagggcgtcatatgaaaaaaaccttcctaaaatggctgaggctttggctcatggtgcagacgtgaactgggccaattcagaggaaaacaaagcgacaccacttattcaggctgtattagggggctctttggtgacgtgtgagttcctcctacagaatggtgctaatgtcaaccaaagagatgtccaagggcggggaccattgcaccatgccaccgtcttagggcacacagggcaggtatgtttattcctaaaacgaggtgccaatcaacatgccactgatgaagaagggaaagaccctttgagcatagctgtggaagcagccaatgctgatatagtcaccttgttacgtttagcaagaatgaatgaagagatgcgggaatcagaaggactttatggacagccaggtgatgaaacttatcaggacatatttcgtgatttttcccaaatggcatccaataatccagagaaactaaatcgtttccagcaagattcacagaaattctgaatttttttaaaaatgggaaaatatgaaatctggtgaccccctaatgtatacagctaaaaattcacaatttttttactgctttaattctacttaattttggtagatattgaatggcttggaaaagaggtacccattcatatatttataaattaaaacatagttatctagtagtaggagaggaacctagtttaggacctcttttattaaaaaagcctatttaaagggctatttctgtagacagaagttcagtctagatttaggccatctctaggttacaagatgataggaggttagacaaaagtgattcttttgccaatgggtggtggcattgatttttttcctccatgcatcttgcccaggatcactcagtcaagcatgtcttcatcaagtggaagccaactgtcctgcctgcctcaagaatatgtgttttctttagcttccctgaggatttttggtggttcagaaataggtgtgtgtgttgatgtgtttttggtaacctagctttcatacacataatatatgatttattagaactagagaatgtgttttccccgtttgttcataaatgcggtcggttatacttcttaggtgacaggttattgtccagtactttaatgtatgtatgtataatggctgtacaggtagaccataattcagtcctttagatttattttatgcagcaaaaagaagctctttttttttttaatcacaaaaaaaaaccccagttcaaaatgtgtagttcttcattgttgggttgattccccaaaaccttgacagatgtatcgatggaataaaagtatgttttaaaggttacttgaatgtcacaaaattatgccttcatcaaaactttaaaggaaaaatcaatttataaaatcatgtaggccatttttatatttgaaatttgtccttttaaagatagttttgctgttgctcctagtgaaagaaaaatctctgtacaaaggagaaaaagaaccccacttattcttagttaatactaaaatatatagcaataaattgctgtttattttttctacatctattttgtgtacttgtacacagtgtacattcttttaaattatatcgtgtatatagctttagtattcggttacatgattcacagacccctgaattccaaaatattatggataaacattaccatttatatgctacaaattagtctgattccatctttgaaaatgtcttaaagtataaaataattaatttgctttttttttttttttcccgagatggcgtcttgctgtgtcacccaggctggagtgcagtggcacgatctcagctcactgcagcctcctcctcttgggttcaagcaattctcctgcctcagcctcccgagtagctgggactacaggcacccgccaccattccgagctaatttctatatttttagtaaagacgggtttcaccattttggccaggttggtctcgaactcctgacctcaggtgatcagcctgctttagcctcccagagtgctgggattacaggcgtgagccaccgcacccagcctaatttgccttttgattccttcccattgttgtcaaaaattaagtctattcttcttttagaaattatatgtaaatgatattattgatactctttctaaataagaggttttaaaatatataaaaactttatgatccaattatagataaattttctaacatttcccagtcactagggttttataagttgattaaacatcaaatcagaatctagccaagcaggaattatattgaaataagttcacattacagaaaaggttccataatttggccaaactgcatgcatgtaatgcttatttagtaatggtcactgtatgttagataaggataaaaatatatttgtgaattacttctgaggaaatgctaacttccacagcattgtatttaattataacaataacaggaacattaaatctttatctttgctgtttcacctcaaagtcatagatcatctggctttttaggcaccttcactaaaggcaaaaatctgatttgtagtttttattagcatgtaccttgaaattatttgaccaagaagctcaaagaaaagaagtacgttaaagaaaaagaaaaaacctcacttttcctttatagtgtcccttcctgttttaattcctaaagatcctgacttttatctgaggaagtctaggtagttttccttttggatctggccattggtgcgtgtttcattcagatcacctctggaatctctgtggttgtgaaggcaattccttatgagactcttgcctcctgtggcttacgtgatgaattgttaatatggcagtaattaattagtatctacttaaatttagtggtcagaaatgtatttgaagtgccttaaagatgatcatggttcagaatatcttcagagaaagcaaaatctttaatattgcagggagcctagcaatacaaatacacatttctgtggcttgatttcttgaatatgctgagacccaatttggactacatttggcagaaatcatggagtaaacagcaaggctttaaattaaattaatagttacaaggtaggttggctcttaggtgaatttagccatgtcaactaatagcttttatatggtatgtaacaaatctgaattatgttatgctgtgaattattcagtgcattataagaaatcttagttaatcatgcttttgggcttcattagtcaatgtgattggccttttattttctttccataacttatctgctattattagtttcttattccttattattaatctgttagctcattatcattagcttactaacttgaaagttagattaatatcaaaataagaatagcagcactatgaagagttaataaaatgcaatttcatgttagagctagaataaaagtaattgagcagtcatttgcaaatgcttcattataacatttatgtgcttaagatttctaaggttttaaaaagttacctttaatacaatccttagaaactcagaaatttcctgatattcattagattatggtgtttgcctaatttataccggttttcactgtatattttaatgaactttgattggttacttttccagacatacagatttaatttggaatatgaactttggttcttcatgagtgcattttgaaaaagaaaaaaagtacacattcagaatctggccaatttaagtttgtattttaaaaatattttatgcatgttaagtatggtcgcagtaaatgaaattgtgtttaagactaaatttactaccgttttgaacagacattcccagatcattcttatattgtcagataacacttgtgtataatatcactttggaccatggacatgagctggaaaaatgatgtatttttgtagattgtatgtccagaatgactttagaaccgcatgatacggtggaaggagcactggactagtcgtcactaccctttttggattcagggctcctcacaattaaaatgagtgtaatgaaacaaggtgaaaatatagaagcatccctttgtatactgttttgctacttacagtgtacttggcattgctttatctcactggattctcatggtaggatttctgagatcttaatctaagctccaaagttgtctacttttttgatcctagggtgctccttttgttttacagagcagggtcacttgatttgctagctggtggcagaattggcaccattacccaggtctgactgaccaccagtcagaggcactttatttgtatcatgaaatgatttgaaatcattgtaaagcagcgaagtctgataatgaatgccagctttccttgtgctttgataacaaagactccaaatattctggagaacctggataaaagtttgaagggctagattgggatttgaagacaaaattgtaggaaatcttacatttttgcaataacaaacattaatgaaagcaaaacattataaaagtaattttaattcaccacatacttatcaatttcttgatgcttccaaatgacatctacagatatggttttgtggacatctttttctgtttacataaatttatccacttaaaatgtgataatgtggagacaaagcaagatttgattacataaacttttctctgcattggtcttttcactatcttatttgctaacttttcttatttttcttcaacctccccaccctccattttttggatattaaacagggaaagcttgctacattataaagattgttggcaccatttattttacacaaaggctaaaggttaacttttggaaatgatgagctacttttatatatgtgtttactcatgctttgtgatatttctgggatcattccagtcataaagacttattacatgtactatttcttgctacctgtgaaaaggtatattttaaagaatgtataaccaacagtccatttactttttattagtatgtagaggatttgtatctaattcatgaatgtagttttacagtagtttgtcattgtaaatggagcaaagtacattatcttctaaaatgtacattatgtaagaattgtaaatatacttaagtaatttgtatgccaaaaaattacaataagtcaataaagatctcacctctggctt

SEQ ID NO: 131393 - DNA, 1265 bp, Homo sapiens
atggtggaaaggaggaaagctaagacgcacttcaaagatctagtccagaaaggaacaccaaatctgacaaccacctacacaaaaagcaccttcataagaaccaaaaatcatttggatcgactggttgtggatgcagcaaaggagaaaagagaaatggagcaaaaacattccaccattcaacaaaagagagccaggaaggaggtggggggccattcggaactggggctcaatgccagtttcaagagaggccggcccctagaggaagctgtgcacgagggtgagggacatggctccatcctgctggtttgccatagttcctcatggtcatcctggaaattcatctggaaggcccgtgtgtttgaaggtccacaaggcaagaaaaaacctggtgtaaacaccagtgtgctagatggagaaggaggcgaagagaataaatcagcagatcttagaaaattcaaagatgccaagaagcaattcgaaaaagtcagtgaagaaaaagaaaatgcgttagtaaaaaatgcccaagtacaaagaaacaaacaacatgaagttgaagaagccaccaacattctgacagcaacaagaaaatgtttccgacacatagccctcgattatgtgcttcagcatattcccattctcaaggaatgccctctccagaagggtggtgagacagagatcctgcagatcattcagctggacctagacctgaagtttaagaccaacatccgggagttgtttgaggaatttgacagcttcctgcgcacgctgccatcatcggaatagcccgggagatgcagtcagtttacaggcatgccccgctctttgttctcagtgcacaccgtgatgctggctccctgccgaccttcctggagggaggcccagtcgttggagagctgcagagtacaggcaactacacagcacagcatccagtctcggtgtcagctctatatctgagagtggcagtcagcccacctgcccactgcccacacgcctgccgaagaggcccagctggctgcgtgtggcaccacatggtcccacctgctctggtcctggctgactggaccaaccacaacaaaaaaaatgaacaacgtatgacctgcaggctggcctatgggaaaataccaagagacaacgctcgtgacgggaaagtcacaacaaaggccatgcaagcttcagttctgcaggaacagaaaagcacatttttagaaggcagctgtagagaggagaaaataaagaagtgtagacagaaacaattattccattag

SEQ ID NO: 131394 - DNA, 475 bp, Homo sapiens
ggaattcctcacctctcgtccagggacatgacgggcacgccaggcgccgttgccacccgggatggcgaggcccccgagcgctccccgccctgcagtccgagctacgacctcacgggcaaggtgatgcttctgggagacacaggcgtcggcaaaacatgtttcctgatccaattcaaagacggggccttcctgtccggaaccttcatagccaccgtcggcatagacttcaggaacaaggtggtgactgtggatggcgtgagagtgaagctgcagatctgggacaccgctgggcaggaacggttccgaagcgtcacccatgcttattacagagatgctcaggccttgcttctgctgtatgacatcaccaacaaatcttctttcgacaacatcagggcctggctcactgagattcatgagtatgcccagaaggacgtggtgatcatgctgctaggcaacaaggcggatatgagcagcg

SEQ ID NO: 131395 - DNA, 855 bp, Homo sapiens
atggtcagggcctatgctatgctggttctcatgtgcctgctgtctggaggagacctggtttcagggaaaggagaatccgtcaatcagccaggagccagaagttggcagcctcgagagctgcaagcttttgacctggtccccaagggctcagcttcccactatatgggactagaggtctttgaccttcatgggcaccaaggtcaagtccagggaattctcaagctcaaaggcaaggagttcttaaaggattgcaggaaatacagacctggagagaatagaatgactgtccggcccaaggcagttaaatatatacagctgagggaggcagaggagctgccgggtgcctgggatatcctggcagctctgctcaaaatgatctacgacttcatgaatttatttggctcctcctcggggccaggggacatgacgggcacgccaggcgccgttgccacccgggatggcgaggcccccgagcgctccccgccctgcagtccgagctacgacctcacgggcaagttgcctggggcagaagtgttgatggagaagtgggttaacatagtgagcgggcctgggtctgtcttcttggggaagcttagcaagcaggaggaggtggctgagagagggaagaagggacccggccagaagaccatcctggtgggtgacagtggtgtgggaaagacgtctctgctggttcagttcgatcagggcaagttcatccccggctccttctcggccactgtgggcatcggattcacgccctgtacccataaaaagctcttggcagacgagcagagtggtgtagctgagaaggagagaagagacaagcagctgaacgtcaagagtggaagcaactga

SEQ ID NO: 131396 - DNA, 696 bp, Homo sapiens
atggccaccagggacatcattgggaactatgaaaccactttaatttgtatgagctatggagattcttatgagaactatcaagttggtagcaagccctctctcttcatctgtgccttaggaggcccatcaatgggaggaaggggatctggaagttcctcccatacagcagggtttggtccctgtgggtcaggcagggaggtcatcaaacaacagaaggacaattataactgctggtatggcaaagccaggactctgaattcaaactctgctccattctcaggaatcccgtctgttaagcaggttctggggaagcgatgtgagtcatgaaatcacaggtcggaggaggcatcgagaatatggtcagttctcaactttcagggaaatccatagctgaggaatgaaggacaacgggcttctcgtgctctcactaggaagactggttcaccggaggctggaacacttgtctaggtggcacgttccttaaaagcgaaaggaccaggagtttcttcctgcctcgtctcttccggatccctcctgcaccgcccacagcttcttccggcaggccgctgcctatttttagaaacttatttctgccttcggggagtcccgggagcccgagtaactctaggccccctccgccgctcctttctcccactcgacccgccgccccggtccccgccccagcctccgcgccgg

SEQ ID NO: 131397 - DNA, 336 bp, Homo sapiens
tggagacagagatcgaggctctcaaggaggagctgctcttcctgaagaagaaccaagaagaggaagtaaaaggcctacaagcccagattgccatctctgggttgaccgtggaggtagatgtccccaaatctcaggacctcgccaagatcatggcagacatctgggcccaataagacgagctggaagatggcgaggacttcagccttcgtgatgccctggacagcagcaactccatgcaaaccatccgaaagaccaccacccgcccgatagtgagtggatggcaaagtggtgtctgagaccaaggacaccaaagttctgagacatcaagttggcaaa

SEQ ID NO: 131398 - DNA, 359 bp, Homo sapiens
atcacagaagaaaggccttgttggagctctgaccctgaaccctcctcacttttgcccctgtcacctttaggaagtaaaaggcctacaagcccagattgccagctcctgggttgaccgtggaggtagatgcccccaaatctcaggacctcgccaagatcatggcagacatccgggcccaatatgacgagctggctcggaagaaccgagaggagctagacaagtactggtctcagcaggtgcgtgaggggaaggggatgggctgccaaggtgtgggagggaggcagacggaatgaggggcctgatggactgtccccatcctgcagattgaggagagcaccacagtggttcaccacacagtt

SEQ ID NO: 131399 - DNA, 1289 bp, Homo sapiens
atgggccaccatcgtcggcaaagcctgagtcctgtcctatctctctcctccccggacagcatgagcttcaccactcggtccaccttctccaccaactaccagtcactgggctctgtccaggcgcccagctacggcgcccggccggtcagcagcgcggccagcgtctatgcaggcgccgggggctctggttcccggatctccgtgtcccgctccaccagcttccggggtggcatggggcctgggggcctggccgcggggatggctgggggtctggcaggaatgggaggcatccagaacaagaagaccatgcaaagcctgaacgaccgcctggcctcttacctggacagagtgaggagcctggagactgagaaccgtaggctggagagcaaaatccgggagcacttggagaataagggaccccaggtcaaagactggagccattactgcaagaccatcgaggacctgagggctcagatcttcgcaaatactgtggacaatgcctgcatcgttctgcatattgacaatgcccgtcttgctgctgatgactttagagtcaagtatgagacacagctggcgatgcgccagtctgtggagaacgacatccatgggctccgcaagctggagacagagattgaggctctcagggaggagctgctcttcatgaagaaccacgaagaggaagtaaaaggcctacaagcccagattgccagctttaggttgaccgtggaggtagatgcccccaaatctcaggacctcgccaagatcatggcagacatccgggccaaatatgacgagctggctgggaagaaccgagaggagctagacaaatactggcctcagcagtttgaggagaacaccacagtggtcaccacacagtccgccgagctaggacttccagtactatgttgaatgacactggtgacagtggtcctccttatcatgttccagatcttagagaaaacacttttcgttttttccccattcagtatgatactagctgtaggtctgttgtatacgccctttattatattgaggtccaaagtctcttcagtcagcttgtgatgattgatacctggcctgggactcacccttcagaacaatgggctcctctctcacccagggcaggtccagaaatgctgtccaacatccatgtcctagatgttggacatctaggtccacttcgtgctctactccactgtgggacatggatgaagctggaaaccatcatcctcagcaaacaggaacggaaaaccaaatactgcatgttctcactcataagtgggagttga

SEQ ID NO: 131400 - DNA, 1519 bp, Homo sapiens
  misc_feature (1)...(1519): n = a,t,c or g
accggcccggaattccatgatcgactccgcgtccgccgccgaccgcaaagcctgagtcctgtcctcttgctctcctccccggacagcatgagcttcaccactcgctccaccttctccaccaactaccggtccctgggctctgtccaggcgcccagctacggcgccgggccgcgtcgagcagcgcgaccagcgtcgtatgcaggcgctgggggctctggttcccggatctccgtgtcccgctccaccagcttcaggggcggcatggggtccgggggncttggccaccggcantagccgggggtcatggcaggaatgggatggcatccagaacgagaaggagaccatgcaaagcctgaacgaccgcctggcctcttacctggacagagtgaggagcctggagaccngagaaccggaggcttggagagcaaaatccgggaagcacttggagaagaagggaccccaaggtcagagactggagccattacttcaagattcatcgaggacctgagggcgtcagatcttcagcaaatactgtgggacaatgcccgcatcgttcttgcagatttgacaatgccccgtcttgcgtgcgtgatgactttaggagtcaagtattgagacagagctggccaatgcgccagtcttgttggagaaccgacatccatggggctccgcaaggtccatttgatgacaccaattatcacaccgacttgcagctaggaagacagagatccgaggctcctcaaggagggagctgctctttcaatgaagaaggaaccacgaagaaggaagttaaaaggcctacaagcccagattgcccagttcttggggttgacccgtgggaggttagattgcccccaaattttcagggaccttcgccaagattcatgggcagacatccggggcccaattattgacgagctggcttcggaagaaccgagagggagcctagacaagtacttggtctcagcagatttgaggagagcaccacagtggtcaccacacagttttgctgaggttgaagctgctgagacgacggctcacagagctgagacgtacagtccagtccttggagattcgacttggactccatgagaaatctgaaggccagctttggagaacagcctgagggaaggttgaaggcccgcttacgccctacagattggagcagctcaacgggattcctgctgcaccttgagtcagagctggcacagacccgggcagagggacagcgccaggcccaggagtatgaggccctgctgaacatcaaggtcaagctggaggctgagatcgccacctaccgccgcctgctggaagatggcgaggactttaatcttggtgatgccttggacagcagcaactccatgcaaaccatccaaaagaccaccacccgccggatagtggatggcaaagtggtgtctgagaccaatgacaccaaagttctgaggcattaagccagcagaagcagggtaccctttggggagcaggaggccaataaaaagttcagagttcattggatgtc

SEQ ID NO: 131401 - DNA, 1028 bp, Homo sapiens
atgcacgcccaggccggcttggcggggacccggggatgccccccaccccaccgtttcctgtaccaggaagctgaggcccagcaggaggggtgggcggtgcagacagtgctcatgagggcagcgagccgtcgggagcccggacctcgaggcggcccctcccaacaaccccgcgagaagggggccaccaatgagcaagctatcctgacggggaaactgaggcctggagaggagcagtgctttgtgcaaggtcacgcaaaggggctgaaagccaggtcccccgcgctccgagccccgcatccctccctctccgggagctgcagccgcagcgcgcacgtcccgcccgacgcccccatcgcgcagaccgggaaggcacggccggcggcgcagggccgccctaccttgatgactgccgcgcagaacagagtagaggcggaggaggcggcggccggacccaaactggtagtgaggctttggaccccgaggcgctgctatgccggtggagctggagctgtgtcccgggcgctgggtgggcgggcaacacccgtgcttcatcattgccgagatcggccagaaccaccagggcgacctgaccgtagccaagcgcatgatccgcatggccaaggagtgtggggctgattgtgccaagttccagaagagtgagctagaattcaagtttaatcggaaagccttggacaggccatacacctcgaagcattccctgggggaagacgtacggggagcacaaaccgacatctggaagttcaaccatgaccaagtacagggagctgccagaggtacgccgaaggaggttgcgaatgctcatcactgcctctggcatggatgagatcaacacaaccaatattgatggtgtaattgatgatgtaattgatagtgtaagccacagaaaggcagattttgactctatctatggaaggacttccactcaattggcattactcaaagatcagaattccttgttgatagcaagctccttgccaccagaaatcctcaagaatgggcctgggtga

SEQ ID NO: 131402 - DNA, 1364 bp, Homo sapiens
ctgggccgagtggagttgggtggtgtcgggagcctctccctgaggggcaccgcgttcttcaggagctgggcctccagtgcggcgcgatgtcaggcgcggtgacagctctgtgagtccgaggccgcggctttggtgctgggcggctgcggggcctgaccgggcggcgcatggtgccgccacgacgccatcgcggggcaggaaggccaggggtgctgagttcttcacctccttttagactgagatctgccaagttttccggcattgctcttgaggatctcagaagggctcttaagacaagactgccaatggtgtgtgtatttgtcatgaaccgaatgaattcccagaacagtggtttcactcagcgcaggcgaatggctcttgggattgctattcttctgcttgttgaagtgatatgggttgcttcctctgaacttacttcgtatgtttttacccagtacaacaaaccattcttcagcacctttgcaaaaacatctatgtttgctttgtaccttttgggctttattatttggaagccatggagacaacagtgtacaagaggacttcgcggaaagcatgctgctttttttgcagatgctgaaggttactttgctgcttgcacaacagatacaactatgaatagttctttgggttacctggggcctagagagactgcaatgcactggctgtgcaccaagtgtggtgtgaagagggcagcttccccccatgagtcttgccaggtctggaagatcatgcataagattttggactggaagctgactcctcaccttccactcgaggcaagattactttgctacctcttgactttggatttggccatacgacttgcttcggcccacaagatgagtgcaaattacgagaaagagccaatgttgtactgggcctggaggcctaggagcgaaaaatggttttacagtctaggtccagggccccactgccctgagcaacctcaggacactgctccctgcatcccagccactccggtctcagccatggctaaaagggcccgagatacatctcaggccactgcttcagaaggtgcaagtcacaagccttggtggcttccatatagtgttaagcctgcaggtgcacagagggcaagagttgaggcttgggagcctctgcctagatttcggaggatgcatggaaatgcctgggtgttcaggcagaagtctgctgtgggggcagagccctcatggagaacctctactatggcagtgcagaggggaaacgtgggcttggagtcctcacacagagtccaagtggagccatcctccagaacccagaatggatccatcgacagcttgcatcatgcagctggaaaagttgcaggcactcaatgctag

SEQ ID NO: 131403 - DNA, 281 bp, Homo sapiens
catctttcttcagttcccatatggccacgaggggagatgccagaaaaaccagggaaaaccaagagatgaccaactgctggtgacacatctgcacgtataccaggtacacgcagacagatgcgggccatccccagagccgccgacagaggtcgctgcgagacggtacccgcgccccacagtccacccgctcctcggagtccccccgcgccccggagtccacccgcgccccggagtccacccgcgcaggtccacttctccatccctgctctcgacctccgccc

SEQ ID NO: 131404 - DNA, 588 bp, Homo sapiens
tttttttttaatttttttcaagggggaggagattttccacaagaaaaggttgttttcatgtttgggattcaggaaagcatccaacggagtgtaagcagcatgaaggaagagccgctgggcagccgatgtaacgcggtgcgatcgtggatgcagggcgccggggtgctggacgccaacacggcggcgcagagcggggtgggtctggcccgggctcactttgagaagcagccgccttccaatctgcggaaatccaacttcttccacttcgtcctggccctctacgacagacagggccagcccgtggagatcgagaggacagcgtttgtggggttcgtggagaaggaaaaagaagccaacagcgaaaagaccaataacggaattcactaccggcttcagcttctctacagcaatgggataaggacggagcaggatttctacgtgcgcctcattgactccatgacaaaacaagccatagtgtatgaaggccaagacaagaacccagaaatgtgccgagtcttgctcacacatgagatcatgtgcagccgctgttgtgacaagaaaagctgtggcaaccgaaatgagacatct

SEQ ID NO: 131405 - DNA, 894 bp, Homo sapiens
ttaatgtagtagttcccaaagcatgatcgatgaaacaccatcagcagcatcaccttggaatagatcagaaatgcaaattctcagctgctgaatcagaaaccttgggatggatttagttatatggttcttaagctctccagatggtgctgatgcctgctcaagtttatgagtcacagtggttgagagccagtggctgcccaagagtcctggcttagaagtggggcctccacagagaataatgagaggctggttaccatctttcttcagttcccatatggccacgaggggagatgccagaaaaaccagggaaaaccaagagatgaccaactgctggtgacacatccccagagtgtctgattcagcaggcatgagggcctgagaatatgcatttctagaaagtttccaggggaagcagatgctgctggcgctaagaccacaccttgagaaccactggtttaacccatgttcagggtccagaaccccagggatgcttccaggaatccaccaactccctcctgccagctgctggggtagcacactaacggtttctacacctggacagcttgctctgggcaggacggagagtccaatggccctgaaacagatgttgtttcttctgctgctgttgctggtactggaacttatatactctactcctttctgatggaaacttaaactagaaactgacttgttgcaacattgaaaacaactctcaaaaccttctgcacgtataccaggtacacgcagacagatgcgggccatccccagagccgccgacagaggtcgctgcgagacggtacccgcgccccacagtccacccgctcctcggagtccccccgcgccccggagtccacccgcgccccggagtccacccgcgcaggtccacttctccat

SEQ ID NO: 131406 - DNA, 740 bp, Homo sapiens
cttaggaaaacctgaatataaaggccccccatgctgtggtaactttaatgactaccacaggacctgattggatatcgaatgctatattaaccaaggacttttgtttgttatgtgaaaatacccacatatccaggtggggttgtaacaccctaaacgccaccaccttgctcctggtatcagagagcccagttaaacataactgtttagaggtgctggactcagtttattctagtaggcctaacctccgagaccacccttaaacatcagtagactgggagctgtacgtggatgggagcggctttgccaacccctgcaaagtgactctgaagaaggagacaagccctgctccagtcacacccagaagctgactggtccacgcacaggcgaagcatgaggaaactcattgcgggactcattttccttaaaatttggacttgtacagtaaggacttcaactgaccttcctcagattgagaactgtttccagtatatacatcaagtcactgaggtaggacaaaaggttgctacagtcctattattttatggttattataagtgtactggaactctaaaaataacttgtttgtataatgttattctgtacaaggtatgtagcccaggaagtgaccaacctgatgtgtgttatgacccattttaagcctcccgtgatcacagtttttaaaataaaattaaggactggtccttttctaggtgacacaagtaaggtaatagctagaacgg

SEQ ID NO: 131407 - DNA, 2013 bp, Homo sapiens
atgaggcaaacaaaaggaaacttatcatcattagttgaagaagaggaagaggaaaaagaaaaaagaaaagaagaaagaaagaaagaaggaaagaaagaaagaagaaaagaaaagaaaaaggaagaaaggaaagggaaggaaaagaaattaagaaaaagagaggaagtagactgtgagcagtacgtggatgggagcagcttcaccaatccctgcaaagtgactctgaagaagatgactagccctgctccagaagctgactggtccacacatggcagaagcatgagaaaactcatcatgggactcattttccttaaaatttggacttgtacaatgtgtcaccagcagttggtcatctcttggttttccctggtttttctggcatctcccctcgtggccatatgggaactgaagaaagatggtaaccagcctctcattattctctgtggaggccccacttctaagccaggactcttgggcagccactgtgtccagagaggtgctgctggccttgccttagcgctcctggaagccagacgccaagttctgcagctgggactgggatgggggtaccccgacttgtctgttctcacggcaagagtccctctgctctcgcacacagccttcaaggccatgacccttcagcccctaagcccaaggggccatgggcctgcagcctgggccaagccaaaggaacaggcctcaggaaggggaggaagaatgaaagtggctcagggagggatgaggcactacacctggccccaggaaagcatccaacggagtggaagcagcatgaaggaagagccgctgggcagcggcatgaacgcggtgcggacgtggatgcagggcgccggggtgctggacgccaacacggcggcgcagagcggggtgggtctggcccgggctcactttgagaagcagccgccttccaatctgcggaaatccaacttcttccacttcgtcctggccctctacgacagacagggccagcccgtggagatcgagaggacagcgtttgtggggttcgtggagaaggaaaaagaatatgcagcgattggaaataatcatcgccagagcctagtgcaacgccaagagcccaagcgccggagattctccatccataggacacatgttcagcatcttacagagctgcccaacccagaactgtctgcatttcagacagaagaaaaacctccaatcatgtctcattcatctttgcatcacctggacctttcaggagataggcactatattttccacatgctccatgtggaaataccttattctccagagcaaaatcataacacctggtccaacagcatgaacactcttagggaagaagacagaatggtctccagacatacaatgagcactcaacaaacatttgtggtatatgaatttgtgcacttcttgatggactcaatgaagaatcaccagatgcctcctacacccaagtacgcagtaggaactttacactcagcttctataacagatgcatctggtgcctacctcacatccctgtgtcccacctctgacttcagccacatgtctgaccctgaccacaacctgctatgtcgtggcttccttccacggcatgccaactctgaagcagatgcccagcctgcacaccagcaccctgggacagccctcaaccaagaggggacaggtctaatttctggggaactgcaaactaagaaagcctctgatctaagccagccatttcaggatccacaagagactctttcactctggctgatgaattccacaccaaaaacagggaacagaaagcaggccttggaagaaggcaaggagtatgtcaagaaagtggatacaggagaaccaggggacagcggggagagaagtaaacaagaggaccatcagtcctcccacaagggactgtctcccctcctgcccaggtggcttctcctacaagaggagacaacaataaatttccaggacaatgtacgtggtgtgggtgtgataaacatgtcaccagagacagcagatgtcccttga

SEQ ID NO: 131408 - DNA, 449 bp, Homo sapiens
cgtgcccgacctgcccccttctcaccgtggtttccgtgccgcccagggaggtttgccgcccaagaacaaagtggctgccctgccctcatggggctctgccaaccaaaacagctccgccaggtgggagctggtctcacctccaattcacagaggaggaagctgaggaccaggggagacaggtgacctggacgggtcttccatccagcgagcagtggagctgcggttggtccaggccttcgtggtgccaaagtcctccctcagagacccctcgagggaagggagaggcgggtgggcagggtgagtgcagacaaaaggcgcttgagcaagacccacgcttctctgggctcccaaacgcatcggggcgggaaagcagctccaacttcaacgtggaattctcccaaagccggctgtccatcagccagaagctccccagcaccaccatgaccaaa

SEQ ID NO: 131409 - DNA, 1362 bp, Homo sapiens
atgggggacagcaggcgaaggtcactcgggaaccagcccagctctgaggctgcgggcaggtcggaaagggagcaggacggcgacccccgtggcctccagagctctgtgtacgagagccggcgggtcacagaccccgaacgccaggacctggacaatgcagagctgggaccagaagacccagaagaggagcttccccccgaggaggtggccggggaggagttcccggagaccctggatcccaaagaggcactttctgagttggagagagtcctggacaaggacttggaagaggacattcctgaaatcaggtgggcaccggggaacgggcctgcctgggtgcggtgggcgtggtccctgcacgtgcccgacctgcccccttctcaccgtggtttccgtgccacccagggaggtttgccgcccaagaacaaagtggctgccctgccctcatggggctctgccaacctgcagagaaaacagcagcagcttcatcctgcagtggccacaggccctccagcggcaacaatgcctaactcatctctttgtgaaaggcacccgcagatcttgatccagtttaacttaagagagaaaagtaaatcattgagtgcaagccggctgtccatcagccagaagctccccagcaccaccatgaccaaagcaaggaagaggaggaggcggaggaggctcatggagctggcagagcccaagataaactggcaagtcctgaaagacaggccctctgtgtactggaccgagcggttccttgaggacaccaccctcaccatcacagtgcccgcggtgtcccgccgcgtggaggaactgtctcgggccaagagattctacctggaatattacaacaacaacaggtgggggaaggagggctgggtggctactcacaccgcagagtttggcagaaatgccttattctcgcctcgacaggatgctgcgtgggacacgctgggtccccagggcctctgccgggacgggcgtggcacacagtcggtgcccaatgtatgcttgacgtactcgcgggtgaatgaacagctgtgcaggaccctgcccgctcttccggaagcttttggacgtggccagtgctgcccctcctcgcggactgagcagctgccacctggggctgccgtagcaaaggcacatggcctgggtgttcccacagcagagatgtgtcctcccggttctggaggccagagctttgccatccaggtgtcggcagggctggcttcttccagaggctcagagggagactgcgtctgtgtccttctccagctggtggtggtggccggtggccctcggcctgtagatgcctcagtccagtctctgcctctgtccttgcacggccgttgcccctga

SEQ ID NO: 131410 - DNA, 380 bp, Homo sapiens
  misc_feature (1)...(380): n = a,t,c or g
gggttgtgtgtgtatcttagatagctggaaccaattttaatagccttctgaactttacacatttaaaacttccattaaatgaaactaaattgacgagaaaagtttgttgtcaggattgataaggcctctcctgaagcttcatccttaggaaatctgggcttcagagattacttctcattgggctctttctccaggggtagatgtnnnnnnnnnnnnnnnnnnnnnnnnnnnnnnnnnnnnnnnnnnnnnnnnnnnnnnnagaaaggccctcggagctcactgggtccccaagcagcccattcctgcctggcaacacaaagatccatccggagggcggccagaggagcagggggtaaaactctacagggagaaggaattct

SEQ ID NO: 131411 - DNA, 273 bp, Homo sapiens
  misc_feature (1)...(273): n = a,t,c or g
tgtcaggattgataaggcctctcctgaagcttcatccttaggaaatctgggcttcagagattacttctcattgggctctttctccaggggtagatgtnnnnnnnnnnnnnnnnnnnnnnnnnnnnnnnnnnnnnnnnnnnnnnnnnnnnnnnagaaaggccctcggagctcactgggtccccaagcagcccattcctgcctggcaacacaaagatccatccggagggcggccagaggagcagggggtaaaactctacagggagaaggaattct

SEQ ID NO: 131412 - DNA, 484 bp, Homo sapiens
ttcgaacatatttatctctaccgtgtgtgcgcgtgtgtggttgtgtgtgtatcttagatagctggaaccaatgttaatagccttgtgaactttacacatgtaaaacttccattaaatgaaactaaattgacgagaaaagtttgttgtcaggattgataaggcctctcctgaagcttcatccttaggaaatctgggcttcagagattacttctcattgggctctttctccaggggtagatgtctggatctgagtcaagtcagagagctgagcgaaatacaggggtacaggaagcagcagaaaggccctcggagctcactgggtccccaagcagcccattcctgcctggcaacacaaagatccatccggagggcggccagaggagcagggggtaaaactctacagggagaaggaattctctagctgaactttgtaaccatttgaacagggccggacgcgtgggcgtacgcgtgggcggacgcgtgg

SEQ ID NO: 131413 - DNA, 943 bp, Homo sapiens
taactgggttgtacctctccccagtggagcttatgtgcacagctcagacttccatctccctcttccatggtattcaggcagtctcaccatccctgcagagatatggggcgacccgggagacaccccaaatactatgagtgtcccaactgtgcaagtgggaaagggagtgtcccgaacacacacccccactggagaagctgaaggtgtttgtgggagaagtttccgactttacctggagctgagtcaagtcagagagctgagcgaaatacaggggtacaggaagcagcagaaaggccctcggagctcactgggtccccaagcagcccattcctgcctggcaacacaaagatccatccggagggcggccagaggagcaggggagcctacccaaatgagaagaaaccagaaaaccaaccctggtaatatgacaaaacaaggatcttcaacacccccccaaaatcatactagttcaccagcaatggatccaaaccaagaagaaacccttgatttacctgaaaaagaattcaggacattagttattaagctaatcagggagggaccagagaaagatgaagcccaatgcaaggaaatccaaaaaatgatacaagaactgcaaaaaagagcagagctttcaatggaaattttaaacaggtgggatcaagattatgaagaatttcttcaaaggattgtaacaggagatgaaacatggctttaccagtatgatcctgaagacagaacacaattgaagcaactaccaccaagagaaaatgatgtggagctcttccagtggattcagaaagagtcacaagtggatattaaatttaagtggattttagctgtcaccgaaaaggaagaagaggctcaacgccacatggaagctgccaagggtttgggcttggaccctctgaagccatggccgaagctgtaccttggcccctcttag

SEQ ID NO: 131414 - DNA, 618 bp, Homo sapiens
atgaggaaaaaccagtgcaaaaaggctgaaaattcaaaaaaccataatgcctcttctcttccaaaggatcacaactcttcaccaggaagggaacaaaactggacagaaattgagtttgacgaactgacagaagtaggcttcagaaggagaaagcgggaaagatctaaaattgacaccctcacatcacatttaaaagaactagagaagcatgagcaaacaaattcaaaagctagcagaagacaagaaataattaagataagagaagaattgaaggagatagagacacaaaaaacccttcaaagaatcaatgaatccaggagctggttttttgaaaagattaacaaaatagatagaccactagccagactaatgaagaaaagagagaagaatcaaatagaaacaatagaaaatgataaaggggatatcaccactgatcccacagaaatacaaactaccatcagagaatactataaacacttgtacgcaaataaaccagaaaatgtagaagaaatggataaattcctggacacatacactctcccaagactaaaccaggaagaagttgaatccctgaatagcccaataacaagttctgaaaagcccaataacaagttctga

SEQ ID NO: 131415 - DNA, 1474 bp, Homo sapiens
atgcaaactcacaggcccaccctagacctgctgcacgagaatcggcatcattttctcaagaccccagttgagctacgagcttctcaagctggagaatcctggtttagagccttcctgttgacctgtaccaaggcagatgccattgcacgcaccgtctttattattcctggcacagcccacaggagatggttgatcattaattttatgttatgtgaattatacatcaataattttaaaagtgacttgagtgatgggctagatgttgagggtaacacagaggaaccacaccttcgttcaacaaacactgaggattttgcaggaaaggatgctgctctaggctaccgctgtcgtggagctctcgcaagtgccggacaagaatgtgtgggtcaagagaaacaaaacaatcgatacatagcaatttattctcccactaagagatttaggcaggtggatggagggaaggaagacagaacttacctgctagagctgcccccagggaatggcagtctcccaacagataaacacctgaagctggtgatcagcagcttccccataagatctcaggagttgggtgagtgggctcaagcatgtgtacttagaggcacaatggcagagtttaactggtatatgaccttcctccaggaacactcgactggtacaggcgaaatgcctcaagcaaacggggtccggagtggacctcccgcaaactccagcagacctgtagcagaggggcctgacattacaagcaaaacgaacaaacagaaaggaatagcatcaacatcaacaaaaaagatgtccacacgaaaaccccatctgaaggatcacaactcttcaccaggaagggaacaaaactggacagaaattgagtttgacgaactgacagaagtaggcttcagaaggtgggtaataacaaactcctccgagctttataaaggagcatgttctaacccaatgcaaggaagctaagaaccttgaaaaaaggagaaagcgggaaagatctaaaattgacaccctcacatcacatttaaaagaactagagaagcatgagcaaacaaattcaaaagctagcagaagacaagaaataattaagataagagaagaattgaaggagatagagacacaaaaaacccttcaaagaatcaatgaatccaggagctggttttttgaaaagattaacaaaatagatagaccactagccagactaatgaagaaaagagagaagaatcaaatagaaacaatagaaaatgataaaggggatatcaccactgatcccacagaaatacaaactaccatcagagaatactataaacacttgtacgcaaataaaccagaaaatgtagaagaaatggataaattcctggacacatacactctcccaagactaaaccaggaagaagttgaatccctgaatagcccaataacaagttctgaaattgaggcagtaataaagagccacacatctacaaccatttga

SEQ ID NO: 131416 - DNA, 442 bp, Homo sapiens
cgtggtggaattcctgctggcactggcatgggtgttcgtgcccatctacatctcctcagagatcgtcaccttacctgagtacattcagaagcgctacgggggccagcggatccgcatgtacctgtctgtcctgtccctgctactgtctgtcttcaccaagatatcgctggacctgtacgcgggggctctgtttgtgcacatctgcctgggctggaacttctacctctccaccatcctcacgctcggcatcacagccctgtacaccatcgcagggggcctggctgctgtaatctacacggacgccctgcagacgctcatcatggtggtgggggctgtcatcctgacaatcaaagcttttgaccagatcggtggttacgggcagctggaggcagcctacgcccaggccattccctccaggaccattgccaacaccacctgccct

SEQ ID NO: 131417 - DNA, 458 bp, Homo sapiens
cgtggtggccgattggagcctccctcttcgccagcagcgagggctctggcctcttcattggactggcgggctcaggcgcggcaggaggtctggccgtggcaggcttcgagtggaatgccacgtacgtgctgctggcactggcatgggtgttcgtgcccatctacatctcctcagagatcgtcaccttacctgagtaccgcagtcttcgccagatgcccttggcgtactgtaggaggtttgctttctctgggagccctttagagtccggagggacttggccttggcctgcccttaaggctgagtttagagctttccactcatactcttccttcctctcccacatttcttgatctccaccccacccccatgccagccacccccatgccagccacctccctggaaaccagggatacagaaatcaccaagacctggccctggtctgccaggggctcgcaaaa

SEQ ID NO: 131418 - DNA, 498 bp, Homo sapiens
atgcgtctcttagaatggcaaaaatccagaacattgacaacaccaaatgctggcaaggatgtggagcaacaggaactctcattcattgctgccacagctggagcagctgggatgcaggatgccaagtccagaggctgcacagagcagaagagtcctaggtctggcccaggaaactactttttcctcctaggccttcagacctgtgatgaggaaattcaaaccaaaggcaaaaaagttgaaaactttgaaaaaaatttagaagaatgtataactagaataaccaatacagagaagtgcttaaaggagctgatggagctgaaagccaaggctcgagaactacgtgaagaatgcagaagcctcaggagccaatgcgatcaactggaagaaagggtatcagtgatggaagatgaaatgaatgaaatgaagcgagaagggaagtttagagaaaaaagaataaaaagaaacgaacaagcctccaagaaatatgggactatgtga

SEQ ID NO: 131419 - DNA, 523 bp, Homo sapiens
ttttttttttttttttattgggaaaggcattggccactttggactttattagcaacagtaatgtcccctgacatccgcacaagcttgtagctccacggccaggtcttcccccaacctcacaatggccccgtgatgcaggcaggcaggcgagtgggggtctcccctccttatccacagggccaccgaaaggcccacgagacggccttgcccgaggtcacccagcggagtggcttgctggagccctgggaataacagtcccacacaaggctctctccctccgcagctggacctgtacgcgggggctctgtttgtgcacatctgcctgggctggaacttctacctctccaccatcctcacgctcggcatcacagccctgtacaccatcgcaggtatggtgcctgcagcagggaggtccacccaggggacgtgtaaaggggtcagaaggccacctccccctacaggcccgagggagcagcccaggaagtggccccagcaggagccccagaagttccctccgccgatg

SEQ ID NO: 131420 - DNA, 1776 bp, Homo sapiens
atggaattgcaaattcaaacaacagagagacaccaccgcaagcccattagagtggccaaaatccagaacactgacaacgccaaatgctggggaggatgtggagcaacaggaactctcattcattgctggtgggaatgcaaaatgttgctgtgtgactttgagcaagttcctctgtttctctgtgcctcggattttccatccctcaaggagttgggagagttgagggtggacgatgcgtgggcacatggtgactgctcgtccctcgggctcatacctagtgcctgcggcaggacagccatggccgccaactccaccagcgacctccacactcccgggacgcagctgagcgtggctgacatcatcgtcatcactgtgtattttgctctgaacgtggccgtgggcatatggtcctcttgtcgggccagtaggaacacggtgaatggctacttcctggcaggccgggacatgacgtggtggccgattggagcctccctcttcgccagcagcgagggctctggcctcttcattggactggcgggctcaggcgcggcaggaggtctggccgtggcaggcttcgagtggaatgtgagtcctggaggactggcggcctgtgggagggccagggcacaggatgtggtcgcagcactggagggggacagctcccagtggctggtgtcagccgatgtccaggccacgtacgtgctgctggcactggcatgggtgttcgtgcccatctacatctcctcagagatcgtcaccttacctgagtacattcagaagcgctacgggggccagcggatccgcatgtacctgtctgtcctgtccctgctactgtctgtcttcaccaagatatcgctggacctgtacgcgggggctctgtttgtgcacatctgcctgggctggaacttctacctctccaccatcctcacgctcggcatcacagccctgtacaccatcgcagggggcctggctgctgtaatctacacggacgccctgcagacgctcatcatggtggtgggggctgtcatcctgacaatcaaagggactgccctggctggtagaggctacccaccctgctgccccgctgttaccagctctggccctggcaaggagctgactcaggaactcagggccagccacacccgcattggctcagcgcttgatgcttttgaccagatcggtggttacgggcagctggaggcagcctacgcccaggccattccctccaggaccattgccaacaccacctgccacctgccacgtacagacgccatgcacatgtttcgagacccccacacaggggacctgccgtggaccgggatgacctttggcctgaccatcatggccacctggtactggtgcaccgaccaggtgcttcgactgagacagtttggagtatgggattccgaagggactcggatgctcctcggtggccctgccatcggtcatggggcgggcattttgggccagtcttgggctgccgggatccggaagcaggcggggtacctgacctcccttggcctgccagtggtgggggccagccatggctgggccagcgtttctggtagagctctggacgctgtcagcagcagagcgtcagtagcagccacctcagtcataacagcaaccacagctttcgtgggcagcgtgctgactccaatggccacaccccaaaactcactcatcatcttccctgagaaagagaactcacattcaccggaggcccttgaggagccagggacaggcttggccggctacactagcagcctcacttaa

SEQ ID NO: 131421 - DNA, 554 bp, Homo sapiens
atgctgggagcatcccaggatgccaaaagcgcacacggatggaacacctgccttagaacaggggaggttcagacaaggagaggtatcaggaaaaacaaggaaagtttaaaatgcaggaatagaaacacacttgagaaatccatgaggaatgaaaagagaatggcggagcagcagcagattgtcaaaaaggaaatcaagaaggagcagccaaagaggttgatggagaatcaggagaaagaaggtgacactgaagccaagggaaggaaagtgttacaacatttctgggaaaaaaatgacatgctctgtcttaaccttgctgttttatgagccatagagccacattccaggttctgagaagtccagcgctaaagatgtttcttttagtttgcttagcccagcatttgccagaattattctgggctcagtgtgaggatgtacaaagaagaacaagtaccagtcctactgaaactatttcaagaaatagaggaggagagactcttccccaacttgttctacgagaccagaatcatcctgataccaaagcctggcagtga

SEQ ID NO: 131422 - DNA, 834 bp, Homo sapiens
aaacagacttgcctgcaatagccagcagtagcctctttccacctcaccatcccagaggcagcaatcattgtgtccggtaagatgggggacacagcgcccccgcaggcccccgcaggagggctagggggggcctctggggcggggctccttggagggggctcagtcaccccgagagtgcacagtgctatcgtggagcgcctccgggctcggatcgctgtctgccgccaacaccacctgagctgtgaaggacgatatgaacgaggtagggccgagagctcagaccgggaaagagaaagcaccttgcagctcctgagccttgtacagcatggccagggggcaaggaaagctggcaaacacaccaaggccaccgccactgctgccaccactacagcccctccaccggcccctgctgcccctcctgcggcctcccaagcagcagcaacagcagccccaccgcccccaccagactatcaccatcaccaccagcagcacctgctgaacagtagcaataatggtggcagtggtgggataaacggagagcagcagccgcccgcttcaaccccaggggaccagaggaactcagccctgattgcggcttccccccaaagctgctggaccagtggcctctggtggaaggtagaaccctgccctgtggccctgcaggcttcctcccttttggagctccatgggacttctggattctatgtctgctccagtttacccaggtcagccctagcaaaagcgacaggaaatggccatgcaagccccaaagtactcaaaaagcccaaaggagatggtgctattgtgtctaactgctcctccaaaggagcttga

SEQ ID NO: 131423 - DNA, 1191 bp, Homo sapiens
atgcttggtaagagcttggatctgttggatgacagtttggctgaaacaggaagcaaggagagcatccctcaaactgagaaattggccctcctggtattaaagcttgaaacttacatttgtcttatccgacaaactttcctttctcaggaaatcgaccctcaggcttcccagatagtatcaaggaaactgaaactcaccagatcggaggcaattgagcaagctctggggcatccccagaatgggcagctcatccacctggttatggagagcctcatccactctgggtgctctctatggacattaacacagtacacaaatatccgtgctcaatcaaagaaatccattcatatacttttctcccagaattctgatgtcctgcaggtgcccagccctactcaagagagtggggagttttgggtccaaactcaacctgaaaccaattgtcaagagagccctttggtgtcattcataggtcatccccccagagcacagaacaagagggtgcgatgcgggtgtggctcgcccaaacccgtcggaggaacatgcatcatactggcaggtcgtgaggagcgtttttgggctctgaccccaaggcagcatctacggttgattgtctacagctcccgaagccccagtggaccaaatctacgtctgattggtgtacctgaaaatgatgggaagaatggaaccaagttggaaaacactctgcaggttattatccaggagaacttccccaatctagcaaggcagaccaacattcaaattcaggaaatacagagaacgccacaaagatactcctcgagaagagcaactccaagacacataattgtcagattcaccaaagttgaaatgaaggaaaaaatgttcagggcagccagagagaaaggtcgggttacccacaaagggaagcccatcagacttacagcggatctctctgcagaaactctacaagccagaagagagtgggggccaatattcaacattcttaaagaaaagaattttcaacacagaatttcatatccagccaaactaagcttcataagtgaaggagaaataaaatcctttacagacaagcaaatgctgagagattttgtcaccaccaggcctgccctaaaagagctcctgaaggaagcactaaacatgaaaaggaacaactggtatcggccactgcaaaaacatgccaaattgtaa

SEQ ID NO: 131424 - DNA, 649 bp, Homo sapiens
ttgtgtaggaagaactgtattggatactgttttatacattgaagatatagtggggaacaaaccagaaaacccctgctctcatagagccttcattctagcaaatatagataacgttagattaggagggaaagactggcggaaagagaaatacacaaacctcagaagggagcagacaattcacacatttctacagtttaaccttcagtgccaactgagggcagcaggaatagaaccactgctgtggcagtggaagagaggcagtcagatggctctgggagtctctccccagggaaactccagaccactaccactggaatcattcactgcccttctccacatcacaggagctcctgtctcctctgacttcaggttggactggctaatagaaagaccaaaaggtggcaggagagcagagttgagcattcgttccctggctctccccctgcctcagcactgtggctctgacaatgactggatccctctacaacttcgactcttatctagagcctccttccacagtgatgatgacttgggattcggtgcttacaggagactggctcttcacattctttgcatccacagttccaaggaggctttagagctcaatactttccagccagtgacatttctaaatgcattttccaaatga

SEQ ID NO: 131425 - DNA, 2700 bp, Homo sapiens; identical to SEQ ID NO: 122648

SEQ ID NO: 131426 - DNA, 2126 bp, Homo sapiens
  misc_feature (1)...(2126): n = a,t,c or g
ccgggtcgacccacgcgtccggtcatggcggcctgcaggtactgctgctcgtgcctccggctccggcccctgagcgatggtcctttccttctgccacggcgggatcgggcactcacccagttgcaagtgcgagcactatggagtagcgcagggtctcgagctgtggccgtggacttaggcaacaggaaattagaaatatcttctggaaagctggccagatttgcagatggctctgctgtagtacagtcaggtgacactacagtaatggtcacagcggtcagtaaaacaaaaccttccccttcccagattatgcctttggtggttgactacagacaaaaagctgctgcagcaggttaggaattcccacaaactatctgaagaagagaggttggtaacttctgaataaaggaaattctaaccaagtcggaataatagatcgttcaattagaccgctctttccagctggctacttctatgatacacaggttctgtgtaatctgttagcagtagatggtgtaaattgagcctgatgtcctagcaattaatggcggggcagtacgaataggaataattgatggagaatatgttgttaacccaacaagaaaagaaatgtcttctagtactttaaatttagtggttgctggagcacctaaaagtcagattgtcatgttggaagcctctgcagagaacattttacagcaggacttttgccatgctatcaaagtgggagtgaaatatacccaacaaataattcagggcattcagcagttggtaaaagaaactggtgttaccaagaggacacctcagaagttatttaccccttcgccagagattgtgaaatatactcataaacttgctatggagagactctatgcagtttttacagattacgagcatgacaaagtttccagagatgaagctgttaacaaaataagattagatacggaggaacaactaaaagaaaaatttccagaagccgatccatatgaaataatagaatccttcaatgttgttgcaaaggaagtttttagaagtattgttttgaatgaatacaaaaggtgcgatggtcgggatttgacttcacttaggaatgtaagttgtgaggtagatatgtttaaaacccttcatggatcagcattatttcaaagaggacaaacacaggtgctttgtaccgctacatttgattcattagaatctggtattaagtcagatcaagttataacagctataaatgggataaaagataaaaatttcatgctgcactacgagtttcctccttatgcaactaatgaaattggcaaagtcactggtttaaatagaagagaacttgggcatggtgctcttgctgagaaagctttgtatcctgttattcccagagattttcctttcaccataagagttacatctgaagtcctagagtcaaatgggtcatcttctatggcatctgcatgttggcggaagtttagcattaatggattcaggggttccaatttcatctgctgttgcaggccgtacaaattaggattggtcaccaaaacccgatcctgagaagggtgaaattagaaagattatcgtttgctgacagatatttttgggaattgaagattacaatggtgacatggacttcaaaatagctggcactaataaaggaataactgcattacaggctgatattaaattacctggaataccaataaaaattgtgatggaggctattcaacaagcttcagtggcaaaaaaggagatattacagatcatgaacaaaactatttcaaaacctcgagcatctagaaaagaaaatggacctgttgtagaaactgttcaggttccattatcaaaacgagcaaaatttgttggacctggtggctataacttaaaaaaacttcaggctgaaacaggtgtaactattagtcaggtggatgaagaaaccgttttctgtaatttgcaccaacacccagtgctaatgcttgagggcaagagactttcatttactgaaatctgcaaggatgatcaggagcagcaattaggaatttgggagcagtatataccgccacaataactgaaatcagagatactgggtgtaatgggtaaaattatatccaaatatgactggnggtactgcttca

SEQ ID NO: 131427 - DNA, 264 bp, Homo sapiens
  misc_feature (1)...(264): n = a,t,c or g
cgcgagtctgcgaagcagccctttcagtaggagccttcgctgccaaggaaaaaacaccccagagcgctcggggttaccgaaggctntcttctgtacaaaaccctccaggtgcagatnttggacctgctggacatcgaaggcctctaccctctgtacaaccgggttgagcgatacctggaagagtttcccgaggagagaaaaaccttacaaatagatnggccttatgatgaagnattttaccagnagctgcttgacctttccact

SEQ ID NO: 131428 - DNA, 2545 bp, Homo sapiens
ggagtacgcgcggctggtgatggaggcgcagccggagtggctgcgcgccgaggtgaagcggctgtcccacgagctggccgagaccacgcgtgagaagatccaggcggccgagtacgggctggcggtgctcgaggagaagcaccagctcaagctgcagttcgaggagctcgaggtggactatgaggctatccgcagcgagatggagcagctcaaggaggcctttggacaagcacacacaaaccacaagaaggtggctgctgacggagagagccgggaggagagcctgatccaggagtcggcctccaaggagcagtactacgtgcggaaggtgctagagctgcagacggagctgaagcagttgcgcaatgtcctcaccaacacgcagtcggagaatgagcgcctggcctctgtggcccaggagctgaaggagatcaaccagaatgtggagatccagcgtggccgcctgcgggatgacatcaaggagtacaaattccgggaagctcgtctgctgcaggactactcggaactggaggaggagaacatcagcctgcagaagcaagtgtctgtgctcagacagaaccaggtggagtttgagggcctcaagcatgagatcaagcgtctggaggaggagaccgagtacctcaacagccagctggaggatgccatccgcctcaaggagatctcagagcggcagctggaggaggcgctggagaccctgaagacggagcgcgaacagaagaacagcctgcgcaaggagctgtcacactacatgagcatcaatgactccttctacaccagccacctgcatgtctcgctggatggcctcaagttcagtgacgatgctgccgagcccaacaacgatgccgaggccctggtcaatggctttgagcacggcggcctggccaagctgccactggacaacaagacctccacgcccaagaaggagggcctcgcaccgccctcccccagcctcgtctccgacctactcagtgagctcaacatctctgagatccagaagctgaagcagcagctgatgcagatggagcgggaaaaggcgggcctgctggcaacgctgcaggacacacagaagcagctggagcacacgcggggctccctgtcagaacagcaggagaaggtgacccgcctcacagagaatctgagtgccctgcggcgcctgcaggccagcaaggagcggcagacagccctggacaacgagaaggaccgtgacagccatgaggatggggactactacgaggtggacatcaacgggcctgagatcttggcctgcaagtaccatgtggctgtggctgaggctggcgagctccgcgagcagctcaaggcactgcgcagcacgcacgaggctcgtgaggcccagcacgccgaggagaagggccgctatgaggctgagggccaggcactcacggagaaggtctccctgctagagaaggccagccgccaggaccgcgagctgctggcccggctggagaaggagctaaagaaggtgagcgacgtcgccggcgagacacagggcagcctgagtgtggcccaggatgagctggtgaccttcagtgaggagctggccaatctctaccaccacgtgtgcatgtgcaacaatgagacacccaaccgtgtcatgctggactactaccgcgagggccagggcggggccggccgcaccagtcccgggggccgcaccagccccgaggcgcgtggccggcgctcacccatcctcctacccaaggggctgctggctcctgaggcgggccgagcagatggtgggacgggggacagcagcccctcgcctggctcctcactgccatcacccctgagtgacccacgccgggagcccatgaacatctacaacctgatcgctatcatccgtgaccagatcaagcacctgcaggcagccgtggaccgcaccacggagctgtcacgccagcgcattgcctctcaggagctgggccccgccgtggacaaggacaaggaagcgcttatggaggagatcctcaagctgaagtcgctgctcagcaccaagcgggagcagatcaccacgctgcgcactgtgctcaaggccaacaagcagacggccgaggtggcccttgccaacctgaagagcaagtatgagaatgagaaggccatggttaccgagaccatgatgaagctgcgcaatgagctcaaggccctcaaggaggacgcagccaccttctcctcgctgcgtgctatgtttgccaccaggtgtgacgagtacattacacagctggatgagatgcagcggcagctggcggctgctgaggacgagaagaagacgctgaactcgctgctgcgcatggccatccagcagaagctggcgctgacccagcggctggagctgctcgagctggaccatgagcagacccggcgtggccgtgccaaagccgccccgaagaccaagccagccacaccgagcgtaagtcacacctgtgcctgtgccagcgacagggccgagggcaccgggctggccaaccaggtgttctgcagcgagaagcacagcatttactgtgattag

SEQ ID NO: 131429 - DNA, 403 bp, Homo sapiens
ctttccactgaggatgacgggacagtggccttctcgctaacgaatgtgcagcagtaccgcgtcgccatgactgccaaggactgctccatcatgattgcactgtctccctgtctgcaggatgccagctctgatcaaaggcctgtcgtcccttcatcgaggtccaggtttgacttttccgtgtctgtgctggaccttgacctcaagccctacgagagcattccccatcagtataaactggacggcaagatcgtcaactattattcaaagactgtacgtgccaaagacaacgccgtgatgtcgactcggttcaaggaaagcgaagattgcacattagttctccacaaggtctaaactctttccctgcagtgtctttgaaacttgaacataatgtgaaggctgaatg

SEQ ID NO: 131430 - DNA, 543 bp, Homo sapiens
gtggggcgcagaggaatgaggtcctttatgaaagaaaggcccccctgcatagcataagtgctatatcgatcgtcccggatgtgccgtaagatccgtgtcctcatcagtcgcccatttagcattgttaagatctgtgaacgcgtgttgtctcaaaccagtcagggccgtcatgactacgcagcagcagcagtttccaagacgggccagaaacgcatccacagcagtggcacccgcggctcaggggctcctcacagcccgggctggtgggagccaagtccagacagagtgggggtctccatctgttttctcttctccctcaaatacaggctgttttcatcgtgtctagtccagccctgtctgggccctgtgctaggcaataactcttgcagccctgaagggcctagggagcccagcccaccttcccacggactggggttccctaaaatgtgcacttgaacccaggtcccagcatcaaccacacaaagtgacaatgggcaaaatcatcccaacccaggctgccccatgcccatttcaccggattcc

SEQ ID NO: 131431 - DNA, 1117 bp, Homo sapiens
gtcgaattcgtgacagctgcgctgccggcccggctgcggtcagcaacgcgccatggacgcagagctggcagaggtgcgcgccttgcaagctgagatcgcggccctgcggcgagcgtgtgaggacccaccggcgccctgggaagagaagtcccgagtccaaaaatcttttcaagccatacaccaattcaatttggaaggatggaagtcttcaaaagatctgaaaaatcagcttggacatttagaatcagaactttcatttctaagtacgcttactggcatcaatataagaaatcactccaagcagacagaagacctaacaagcactgagatgacagaaaagagtattagaaaagttctacagagacacagattatcaggaaattgccacatggttacatttcaacttgaatttcagattctggaaattcagaataaggagagattatcttctgctgttactgacctcaacataataatggagcccacagaatgctcagaattaagtgaatttgtgtctagagcagaagagagaaaagatctgttcatgtttttccgaagcctgcatttttttgtggagtggtttgaatatcgtaagcgcacgtttaaaccatctcaaggaaaagtacccagatgccgtgtacctctcggaggggccctcctcctgctccatggggatccgcagcgccagccggccagggtttgaattagtcattgtttggaggatccaaatagatgaagatgggaaggtttttccaaagctggatcttctcaccaaagtcccacagcgagccctggagctggacaagaacagagccatagaaactgctcctctcagcttccgaaccctggtaggactgcttggaatcgaagctgctctggaaagcctgataaaatcgctttgtgcagaggagaacaactagttccaaatcagtgaacgtggagaatgaagatgatgcgtggaggaacatgcaattttattcaatataaacatttgctattttccgcttagaaaccacaccctgaagacgtgctgtctatgcagttatggcccattatatggaaactctcatgacatgaaaaatgaatacaactagttaagtataaaatgccaaataaa

SEQ ID NO: 131432 - DNA, 432 bp, Homo sapiens
tgagggctggcccaggtgctctcacagggcgacctcttgacgcccgtgctcaccgtggccctcgctcctaatcccaccctcaggttctgaggcaggaagcagttcccacacttggctactgggaaggaaggttgtgtgggggggcagaggcttccttgtgtgaccgtggagctgatctttcccgcccctgcaggtgcagcagtaccgcgtcggccatgactgccaaggactgctccatcatgattgcactgtctccctgtctgcaggatgccaggtgaggcccccactgcaaggcatgcagcctgggtctaacggggttttatggacagttggtgaattgttaataggatagttggtttccccatatttagagactccatggcggagtgacaccacttccttggcctatgtgacatcatggggcttactaac

SEQ ID NO: 131433 - DNA, 3458 bp, Homo sapiens
cacatatggctgggagacacagcagctacgcaggtctcaggtccacatacagggcaacgaccctccacaccgctgtctgcccatgcatggcctgaactcacagtcacccagcctgaaaactgggccacggcacagaactgtcagcatgcgaggttccaacggagctgaggctggcgccagagagcgtccaacctcaccaggatttggcccacagcagcgaggtggaactcctgagccttcaggttcctccagtatgacccacgcatcagatggggagcagagaagggccctgaatgcaggaagcctccgcgactcgatagctgtcccctccttaagccccaagctgagacctggggaagccaagatcaatggcatgcatgctaccgctgtcccctcccaagctgaaggcaggcatcaacaatcaatcatgggaaatcgactggtttcctcgctgcagcctgaaggtgcagtacttgggccagtggccacatctcagatcaaccagaatgtggagatccagcgtggccgcctgcgggatgacatcaaggagtacaaattccgggaagctcgtctgctgcaggactactcggaactggaggaggagaacatcagcctgcagaagcaagtgtctgtgctcagacagaaccagctcctgccgaggagaggaaatactgatcagcacgtccctgctctgacgctgctcaccatggccttggcgctcactgctgccctgccccagaatcctgtttgtagaaaaaacaaatccctgactaagctgctgggtgtcgtttctgctgagcagctggtcgtaaggaaccgggccttcagctttccccgcatgctggctttccaatttgacatcactgaccaggcactaagagattcccaggtgctagacgaggaaaagtacccagatgccgtgtacctctcggaggggccctcctcctgctccatggggatccgcagcgccagccggccaggatttcaaaaagcacataacgacatgttttactgctttttcaggtttgaattagtcattgtttggaggatacaaatagatgaagatgggaaggtttttccaaagctggatcttctcaccaaagtcccacagcgagctagtcgggaggagtgcggggtcttggtgaggtccatgccagcagaaaacaaaagaccaaaagctgccaccttgaagtttcttacccggtttaatgttttctttatagccctggagctggacaagaacagagccatagaaactgctcctctcagcttccgaaccctgaaccgtgacctcatcagtcgcccatttagcattgttaagatctgtgaacgcgtgttgtctcaaaccagtcagggccgtcatgactacgcagcagcagcagtttccaagacgggccagaaacgcatccacagcagtggcacccgcggctcaggggctcctcacagcccgggctgccattggcaagatgggcatcggcaccagcaggcctgcctcacaggagaactgacccagggagtgcatgcccaggagggagtctgggtgctgtgtagcacagcaggtcttgagctcaggtctcggcctaaagtgtccctgtccacaaccatatccactcaaacaaataatgagaaaggaaaacagaaagacatgccctatcagttcctgatgtatctgttgaacactcctgttcagtttgctgagtttgtaatgtcctctctaagggagaagaaaagacattacaaactcaacgggaatgttcagcaggtgcagcagtaccgcgtcgccatgactgccaaggactgctccatcatgattgcactgtctccctgtctgcaggatgccagaacatttagtgttgctataaaggaatacctgaagctagaagaaagcctgccctatgtcaccctagccagtccatccaacagacacaggcaacagccaccccatgagcgttctaacagctccaagctgaaaacaaccccagggtcggtctacctgacagtggctcccagccactaccgccttcctgaccacaaaggctctggccaggaccggactctgggctgccccaggagagtaatgtgcaggatgcacagcaaagctctgaaggccggggagcgtggaggcaggccaagatacaattttcatgtagacaagactttgatgttgcttttcccacctaccttcgagctcttccaggtggagtttgagggcctcaagcatgagatcaagcgtctggaggaggagaccgagtacctcaacagccagctggaggatgccatccgcctcaaggagatctcagagcggcagctggaggaggcgctggagaccctgaagacggagcgcgaacagaagaacagccggaatggtgagctgatttacggctgcaaagatgcccggagccccgtggctgactggagcgagcttgcacaccacctgaagccgttcttcttcccttccaacggcctggccagtgggccccactgcacaagggctgtgatcagggagcttggtgcacgtgatcacacgggtgctgctgagtggctcggacaagggccgggcaggcaccctgagtccggggctcgggcctcagggcccgcgagtctgcgaagccagccctttcagtaggagccttcgctgccaagtgccagtccagggtgcagtccttgcctgtggtgatgcccgtatggcggagcccaggatgagccctgcggtctgcgccggcctgtgtctccctccacgttctttgataatcaacatgctctcgttttcccctgatgttctcggaaaaaacaccccagagcgctcggggttaccgaagggctgtcttctgtacaaaaccctccaggtgcagatgttggacctgctggacatcgaaggcctctaccctctgtacaaccgggttgagcgatacctggaagagtttcccgaggagagaaaaaccttacaaatagatgggccttatgatgaagcattttaccagaagctgcttgacctttccactgaggatgacgggacagtggccttcgcgctaacgaaggactcagaagatggcacagaatgggtgacagtgggttgcatctcgagagagcaggtttttgccagtcgcttgatatatgctccagagagaaagccccaaagacacaaagatgtgggaatcatggatgagtgtggcctcggggttactaatgggtgcacctgggtttggggatcagggaagacagtggacatggactcgtaccaatacctggactcttcacacaccaaatcctgggggccaggcactgttgtaggtgccagatatttaattcacatcacagatgtgccatgcctcatttcctacaagtcctgcgctgcacagaaggctctctctcatcccatgtttgcatactgcaggaagaacatcactgtgctccttctagtgctgacagccaatgaccatgcagatctccttacctag

SEQ ID NO: 131434 - DNA, 1755 bp, Homo sapiens; identical to SEQ ID NO: 128995

SEQ ID NO: 131435 - DNA, 3462 bp, Homo sapiens
tcatttcttatcgctggaatttcctagttcttgtttgatgactaaacggggtgatggtagaggtagcagccgcatttgcccagcctggagcgaggaattctcagctggtggatcagctgcttctgtgtctttgccatcttgtggtttagggttttctgtgcgaccgcgtcggtaatcgaagttgcggcggccccggtgctgaggtggctggtgaccttgggtctcatctcccggattgtctttatcctcttcctcgctgtcctctacaggccgtcttgggtgaggtgggtcctgcggaatcgtggtctgcgtccccggtacactcgctgccccgctggtgtccccgctccccgcgctgtcacccccgcatcgctgctcccggccgccccggaggctggagaactgcggcctccatggaggaaagtgggactcaggccctggaacacttgccgccgcctcgcccttttctccctcaacatcggactccgcggcctccgcagctcccccgccgccagggtcctccccggggttctccttcacggcagtctgatgaacacacatcttccttggtgacgttcctttggaagcttgttcttgaagcacttttccgacgagtctgacagcgtctttacccttggccgagtccagccccactcctaaggcatggcccttcggggaatgccctgggcgccccgaatactcagtggggcctgttacttggctggtggcagcttcagtgatttccagccccacctgatctttgggagtttgtatgggacttggccttgatcgtcttctgttgctcatctggtgggaactgagtttctcaacatggaggagcgtggcccagacggctttcccacgcaggggagcatggtccagatggctttcccacgtggggcagcctggctcagacggctttcccacgcaggggagcatggtccagacggctttcccacaccggggagcgtggcccagacggctttcccacgctggggagcctggtccagacggctctatatccaactgccggttgagcagctctccctgggtgctgcacaggcaactttgatgtccagtatctaaggtcacacagctcaagctaagaaactgggacgcgtcttgagaggcagaggactctaccgagcctactgggtcatcaccttccaaatgccactgctgtgaagaggagccatcgcagatcgccatggcgacagagcccttctgacccaggggatccactgctctcaggcactgtccaaccgacacctggtatagccgattgtttttcccaaaggtccactgctgggatcctcctgacccgtggcatttcatgagccgtggcgggtctgatgagcgagtctctgacatatctagacaaaggagactatttaaaaccaattcatgctcttcattatagatccagatctgatttgggtcactgtagtcacaggccttaagcaccacgagacctcccttctgacttgggcggccctgggccaccaggcatttgttggtctggaggtgatagagccttccacgttgaaggactttgggtcgttttggccctctattgacaaaaatgggttgttggggtttggcgtgggacccagatatctgcatctctgggtatacattatccaaataccatttaaatgatttacagcccaacttctttctcagttccacacgctcactgatattgccatagcttttcgtcttcaggtcaggtcttaaggaaaaatactgctccttgtattcatccaaccagacatgtgccagccgcaaagagttgtgtgtcatggtgtcctggccttcgggagatccatatggtcgcctttttcggaaaatgtgtcctactctagagcaagggatgatgaagagcttaccgccacacatccagatccgaaatgatatttccaaattttctcctccccagatatccatgccactatcatactgtccaagttcatggaaatactgtctgttcatggcaaacaaacctccagccattgttggtgactttattggtgcagtggctccctccgctcgtcctagctcagaaagggggacaagatcccatttgaagtgcagtccccagttgaaccctccgcggacgacaggggacgagctgtaggccagcgtgtcggcgctgatgatgtcaatcactgggcacaccacggtgtgccggtcctcacggatggcggccagcaagggctgcagccacatcacattcacttcacagtggctgtccaggaacacaaggacttctccaaagtcactatcatcatccacaaggatgatctcatgaagcaggtgtgctggcgtgcggtctatgacactgtgcactgtccgaagcaaggcagaaaacgcttcattatagaaacagataacaacactagcagctggcaggtcaggtgggtagaacttttctttacatgctgcattccttgtgtctggcacatctctgtggtagcccaagcggtcactgataagcatattaaaagcatgtttctgatagcccaagtctctcaactcttgatcgcgttcattaaaaatcatacctaattcagaagagaatttcaagtggccttcttctggatcttcaacacgactgtctatcacatcgtcaattttgtttgctttgaactgtggctcgagcactcgacttgggcctcgagtgaaacggggatagaatttttttggagatggtccgtggggcccagaccccttgacgggcacattcttaagtggctgagtcacttcatgctcgggagtcatgtggccagacgtcgcaaaattcatgacttcctcgattgttcgtctttcctttgttcgaatgtgctctcgccattgttccaactgcgatgagcaccctttctttctcagcattccacaagttacttcctctttcctttgttctcctctgcctttgcctcttttaaaaagttctaagttgctagccaatcgggacaaatacagaatgtgaggtcccgttccagccaatggaaaccagacacagcagtagggtggatgcgtcaggttataaatgaccctgtctcctttgttcggtgtactctcatggcaaaactgctggtaagtgtacccttttgttgtttgcaggtccccttgagcattactatcccgcacagtgttctgaattccaactgccagtacctgtatctctggcttctgaagcccatctgcccacgtgcagggcaggcccaaactggagcagaaactgccagagccataagctggtgctggatgctcggtgtggactagtgagagtgagaaactcggggaagcagtctcaggaggtgcgagacccacacttctgtgggctttacctccaggaactccaccaggcactaaggtaaaagatcccagagagatccctcttctgccatgattggatgcttcccgaggccttcctagaagccaagcagatgccagcaccat

SEQ ID NO: 131436 - DNA, 1115 bp, Homo sapiens
atggtgtgtgtaggaggctcagtgagagtgaaggctttgctttggccatggggagtactgccagactactacctaagttcccttaaggcccacaagctcttcagtcagtttgtggtgaatgctgcctggcctgggcctcacccttcagggcggcgtgctcccctctgtccaagggcaggtccagaaatgctgtccaagagtcaaatccttggactggggaccccaagagcccacgtggtgctctgccctgccatggctttgcttgtacctaagaaagggtacactcgccagcagttttaccacaagagtacaccaaacaaaggagacagagtcatttataacctgacgcgtccaccctactgctatgtccggtttccattggctagtacgggacctcacattctgtatttgtcccaattggctagcaacttagaactttttaaaagaggcacgggcagacgagaacaaaggaaggaggaagtaacttgtggaatgctgagaaagatcattgaaaaccaactggatacagaaacaataactattagttatgaatttatcctctgtcaacatcttatcgcaaataccgagttcagctatttggcactccctgaaaattataaccgtttgtttttaccaaattcaaaaaaccaaacaaataatcgtttcaaaacgttaaacagcaaagctattggcaggctacttgctgctggtggcgtatacaatgggaacattgaaggattcagagatactgcggaaaaactgggtggagatgcaataaaaggctatgatcaaatactaaatgaaaaaacagcgggcatagcgatagcaacagcatctattcttttaacaaagcgttctaatgttgatacatatacagaaataaatagttacttaggcaaacttagaggtcaacaaaaacttcttgatggtatagacataatagaaataatatacattaagagaccttcaaaagacttagctaacttacgaaaggagtttaataaaactgtgcgttaccagctaagcgcgcggcctcatctccagtttcgagaaattctcgtgcttcgaaacagaaataccagccctggctaaagcgtccatgtagagtaatgacg

SEQ ID NO: 131437 - DNA, 1150 bp, Homo sapiens
aatgcaaggatggaagagggaaagaggatgctcttccccttctccctcaagtaccccaggtatctgttaggaagagaagggagccagggatacctgctcctctctttctagatgagtagcccttcatcttcagtctgtgcccctttagaatgcatcctgaatccctgggactcctttgaaaaaatgccttctctttttcctttcttttcctctgtcctctcttcactgataggtaattgtgtctctgtactatgggaccctcccctcagatgcatcctccaaactggaaagagttaatttcccaaaccttaaactggttggcttaggactgggttcaggggaaggaaacccagaagcccaacatgccggcaaaagggccatcaaactccaagcggtcatgcaaccagaacctctgacaatagccccttctgccagggacccttaccatctgactgtcaccattgccacaaacccaattcaacacaaaagcagctcctacgtcagaaccagtcctcgcagcagttcagataggcctaggaggcaaaatgaaatggatctacccacactgattcatttacctgaagagaatcagctcaggaagtgggagaacaacacagccacaagcacgcaacagtgctcagacaggaaggcttgggaaaaatcaagttttttgctggtgggaatgaccatcaaactgcatgaccattttgatgatgcagcaggcgaggaagcctggggtctggctctaggtgcagcgtcggaagggcccagaggagcaggtcatccagagccagcccctcgtggcataatcaggactgcagggattggcaacatctacctccaggagcctgtctccagtctcccagatctggcccctcagttccttgtgacatcacacgactggctcctcgcccttcagagctcagcttgcacgtgccctccccactccatcctctgtactccccccagcagctcctacactgtacatactttgtctgcctccatgccaattctcagctccacgaggccagggcctgtctttgtctatggctctactgccagcactttgccattatcatcccctgaaggaggagaccagagcctcggaccaccaccagcctgggcagggagaccggatgctctactctga

SEQ ID NO: 131438 - DNA, 1719 bp, Homo sapiens
atggacggcgagagcgaggtggatttttctagcaacagcataacccctttgtggcggaggcggtcgattcctcagccccaccaggttctgggccggagcaagccgaggccccagtcctaccagagccccaacgggttactaattacggatttcccggtggaggacggagggacgctcctcgcagcgcagattcccgcccaggtgcccaccgcctcggacagcaggacggtacataggagccccctgcttctgggcgcccagcggagagcggtggccaatggtgggacggcatccccggagtacagggctgcctctcctcgacttcgacggcccaagtcacccaagctccccaaagcggtgcctggcggctccccgaaatccccagcaaatggcgcggtgaccttgcctgcgccgccgccgccgccggttctgcgccccccgcggactcctaacgcgcccgccccctgcacccccgaggaggaccttactgggttgactgccagcccggtgccttcgcccactgcaaatggccttgccgctaataacgactctcctgggtcaggttcgcagtccggccggaaggcaaaggaccccgaacgggggctctttcctgggccccagaaaagttcttcggaacaaaaactccccctccaaaggctgccctcccaggagaacgagctcctcgagaatccttccgtggttttgagtacaaacagccccgccgccctcaaagtggggaagcagcagatcattccgaagagtctggcctcggaaattaaaataagtaaatccaacaatcaaaatgtggagccccacaagagactcctcaaggtgcgcagcatggtggagggcctaggaggacccctgggtcacgcaggggaggagagtgaggtcgataacgacgtggatagcccagggtctctgcggagaggcttgcggtccacgtcttatcgcagggcagtggtcagtggctttgattttgacagtcctaccagctcgaagaagaagaacagaatgtcccagcctgttctgaaagtggtgatggaagacaaggagaagttttccagtctgggaaggataaagaaaaaaatgctgaaaggacaaggaacatttgatggggaagaaaatgctgtcctgtatcaaaactacaaggaaaaggcccttgacattgattctgatgaagagtcagagcccaaagaacagaagtcagatgaaaaaattgtgattcaccataagccattgagatccacatggagccaactctctgcgattgcactggccaggacttccagtactattgtattagtccgttttcatgctgctgataaagacatccctgagactgggttctttatagagttggaagcaagacatcagaataatatcttcatagatgacataagtgacattgtggaaaaacacacagcatccacatttgacccatatgtgaaatactgcacaaatgaagtctaccaacaacgaacactacaaaaattgttagctaccaatccatcctttaaggaagtattgtcaaggattgagtcccatgaagactgtaggaacttacccatgatctcttttctcattctccccatgcagagggtgacccgccttcccctgctgatggatactatctgtcaaaaaacacctaaggactctccgaagtatgaagtctgcaaaagagccttgaaggaagttagcaaggtaactgttgggtga

SEQ ID NO: 131439 - DNA, 588 bp, Homo sapiens; identical to SEQ ID NO: 117952
  misc_feature (1)...(588): n = a,t,c or g

SEQ ID NO: 131440 - DNA, 2109 bp, Homo sapiens
atgccaagcctgggggccaagttgctccatttaataaaccacacagcaccctgcagagggccccatcaccattaccaccaccgccatcaccaccgtcatcaccatcaccaccatcgtcaccaccactgccatcaccaccgtcatcaccatcgccaccatcaccaccaccaccaccgccatcaccatcaccaccaccatcaccatcatcaccaccgtcaccaccaccaccatcacatcaccatcaccaccatcatcaccatcaccaccaccaccattaccaccatcaccgtcaccaccaccaccaccatcaccaccgtcataaccaccaccaccaccaccatcaccaccaccaccaccgtcaccaccaccaccaccgtcaccaccaccatcgccatcaccaccatcaccatcactgtcaccaccaccaccaccgccataaccatcaccatcatcaccaccaccgccatcaccactgtcaccaccatcaccaccactaccgtcaccaccatcaccaccaccaccatcaccactgccatcaccatcaccaccaccgccatcaccaccaccaactgctcccttctgggggccaacagccctgcagggcaggcaggatcctcagacgtgccacgccacatcgcccatcattgtcatcgcaattggagtggttttccaatactgcaacgttgtatcaactggcatgggaccttatctcctaagctgtgcttttggaatgccttggtgctcaggcacacattcatggctcccgtgaccagtgccttgagcaagtcacagaatagcaggatccgggcagcctccctcagcgggccacctatgagccaaaaagttcagaaagaggtggccactggaagagcaggaacagaatgttccagacggaggagcagcccccgtgacggcactgaggaagcgagtcacgtcccagcgctgctccctggagtttctggaagatgccgtgggatgcgctccagcacagaggtacacgcccccgtccgccccgagctctacgactccgctcgggctgccactgacccctgcggggccagagggtcctgggaggaaaagagtgacctgtgtcctttgccttgcagaaccaaacacacatctggatcaccgagacataaaggcctgaagaagacccacttcatcaagaacatgaggcagtacgacaccaggaacagcaggatcgtgctcatctgtgccaagcggtccctgtgcgcggccttctcggtcctgccctatggggaaggcctgcggatcagtgacctgagggtggacagccagaagcagaggcacccgtccggcggcgtctctgtgtcttccgagatggtctttgagctagaaggtgtggagctaggagcagacgggaaggtcgtgtcttatgcgaagttcctgtatcccaccaacgccctggtcacacacaagagtgacagccatggcctgctgcccacacctcggcccagtgtcccccggactctgccagggtcaagacataaacctgcccccaccaagtcggcaccagccagcacagaactagggagtgacgtgggggacaccctggagtacaaccccaacctcctggatgacccgcagtggccctgcggcaagcacaaacgtgtcctcatctttgcgtcgtacatgaccacagtgatagaatacgtgaagccctcagacctcaaaaaggacatgaacgagaccttcagggagaagttcccccatgtcaaactgacgctgagcaaaatcaggagcttaaagcgggagatgcggagcctgtcggaggagtgcagcctggagcccgtgacggtggccatggcctacgtgtactttgagaagctggtcctgcagggcaagctcatcaaacagaaccgcaagctgtgcgctggcgcctgcgtgctgctggctgccaagatcagcagtgacctgcgcaagagcggcgtgacgcagctcatcgataagttagaagaaaggtttcgattcaacaggcgcgacctgatagggtttgagttcacagtgctcgtggccttggagctggccctgtatcttcccgagaaccaagtgttacctcattacaggcgcctcacccagcagttctag

SEQ ID NO: 131441 - DNA, 2531 bp, Homo sapiens
atggagagcttcatggagtcgctgaacaggctgaaggagatccacgagaaggaagtcctgggcctgcagaacaagcttctggaactgaactcagagaggtgccgggaccacactggccacttcatccccctgaagccccagtgtgccagcactaccaccgtcctatggtgcagaagggaaactgaggctcagtgtgggggcggggggagtcacttgtccaaggtcacacggacagacatcacagaggagcgtgcagatgactggggggggtgcgtggacgggacagacgtcacagaggagcgtgcagatgactggggggggtgggacgcccagaggatcgaggagctcttctccaagaaccaccagctccgggaacagcagaagacactgaaggagaacctgcgggtgctggagaacaggctgcgggccggcctgtgcgaccgctgcatggtcacccaggagctggccaggaagcggcagcaggagttcgagagctcccacctgcagaacctgcagcgcatcttcatcctcagccggcactgctcattcaacagcatccaatcagccatgcacgcagccagcatccacggcgcccctgctgcctgccaggccctgggctacgtgctgggggcactgctgaggggcttccctgtgccttttgcagccaacgagatgaacgggctgaaggaagagaacgagaccttgaaggaggaggtgaagcggcttcggggcctgggagacaggcccaagccccgggccaaggagggcacctcggaccccccctcacccctgctgctcccctcccctggtggctggaaggccatcacagagaagccaccgggaggccacgaggaggctgaggaagaccaccagggcgtgggcctacggggagaagaaaagccagcagggcacaggacatctccagtggccaaaatctccccaggggccaccctgcctgagtcgcgagccccagacatgagcccccagcgcatctccaaccagctgcacgggaccattgccgtggtgcggcctgggtcccaggcttgccctgccgaccgaggccccgccaatgggacgcccccaccactgcccgccaggagcagcccacccagcccagcgtatgagcgtggcctctccctggacagcttcctgcgggcctcccggccctccgccatgacccatgaggccccgaagctctccccgaaggtggaccggctctgcctcctaaaccgccccctgtccctgcaccttcagagcccccacagcagccccctggcccctgctgcagcccccagcgacccccggctccaggacctgaaggccagagaagcagaggcctgggaggagcccacagaactgctggggctgcccagtgccctggcgggcatgcaggaccttcgcctggagggggcactgcacctgctcctggcccagcagcagctgcgggctagggccagggcaggcagtgtcaggccaaggggccagcccacacccggggagatgctgccctccctaccagtcggctcagactctgagggccctgagaatgaggggaccagggcagctctggccgcagcaggcctgtctggagggcggcacacacagcctgcaggcccgggccgcgcccagaggacagaggctgcagccacgcaggactgtgccctagacaagcccctggacctctcggagtggggccgggcccggggccaggacactcccaagccggccggccagcatgggtcactcagccctgccgctgcccacactgccagccccgagccacccacccagtccggacccctgactcgcagtccccaggcactcagcaatggcaccaaggggaccagagtgccagagcaggaggaggcttccactcccatgccgcctgacctggacggccacccagagcccagcaaggctgaagtgctgagaccagagtccgacgaactggatgagacagacaccccaggcagcgaggtgggcctgagctcccaggcggaggccactacgagcacgaccggggaggggcctgagtgcatctgcacccaggagcacgggcagggtccaccacggaagaggaagcgggcctcggagcctggggacaaaggtacagctggcatggggcagccgttcccaggcagtgcccacgctctgggaggcaacggaccactcggacccccacccctgcccgccaagctccaagcacaatcttggacgccccctcgtgggctgacagcaaacagatgtctggcagaagcgagtcacgtcccagcgctgctccctggagtttctggaagatgccgtgggatgcgctccagcacagaggtacacgcccccgtccgccccgagctctacgactccgctcgggctgccactgacccctgcggggccagagggtcctgggaggaaaagagtgacctgtgtcctttgccttgcagaaccaaacacacatctggatcaccgagacataaaggcctgaagaagacccacttcatcaagaacatgaggcagtacgacaccaggaacagcag

SEQ ID NO: 131442 - DNA, 1509 bp, Homo sapiens
atggatgctatgttcccactcagtgctgctctgaaagtgtgggcccctctgccgctcagatactggctgcagatctcagtttcacacttccagattgcacactacaaccctgggcttgggcacactggaggtgccaggacagcaaagagtgtcttttttccccagcgcagtggcaacaagggaggtactgctacattggcaatggcaaaggtgctgtctgtttcctctgagaactccaacgcagaaagacatagaggcgctgccaatgagattgttcagccaggggtgagagatcctggcttccttgttggcaggactatggcagctggcaccagggttttcagagatccagggccctctgggctccaagtgggtctgagtggtggctctgctcagactccacatggctctgcatgtcagtctggaggccccatgagtagcaggtcaagggaatctcctgtgcccaggattgcaaaggtccataggtccatagcagaagtgaacaccaaatttaacaactatctacaccaaaaaaggcaccttcgtaagaaccaaaaaccaggtagcacagcttgcagctttgaaagagacctctaccttccatttgaggagaggagaggagagccactccaactccagccatggctaaaaggggccaaggtgcagattgggccactgtttcagaggatgcaagccccaagccttggtggtttccacgtagtgttgggcctgacggtgcacagaaggcaagagtttaaaaacctccacgaagatttcagaagatgcctgaaaacacctgcatgtctaggtagaagtctgctgcaggggcagagccttcatgaaaagcttctaccagatcagcttgcagttaccttgctctatgtacaatttcctgatgtgaataataaactccttgcaaattatcaagtattggaagttctggccagggcaatcaggcaagagaaagaaacaatgggtattcaaataggaagagaggaagtcaaattttctctatttgcagatgacatgaatttatatttagaaaaccccatcatcatctcagcccccaaactacttaagctgataagcaatttcagcaaagtctcaggacacaaaatcaatgtgcaaaaatcacaagcattcctttacattaacaatacacaagcaaagagccaaatcatgaatgaactcccattcagaatcactaccaagagaataaaatatgtaggaatacagttaacaaggtacgtgaaggacctctttgaggagaactacaaaccactcctgaaggaaataagagaggatgcaaacaaatggaaaaacattccatcctcattgataggaagaatcaatatcgtgaaaatggccacactgaccaaagtaatttatagattcaatgctattcccattaaactaccattgacattcttcacagaattagaaataaactggcacatgtgtacatatgtaactaacctgcacattgtgcacatgtaccctaaaacttaa

SEQ ID NO: 131443 - DNA, 579 bp, Homo sapiens
tttcgtgacttaggacggggcgatggcggctgagaggagctgtgcgtgcgcgaacatgtaactggtgggatctgcggcggctcccagatgatggtcgtcctcctgggcgcgacgaccctagtgctcgtcgccgtggcgccatgggtgttgtccgcagccgcaggtgagaggcggggaggagagtcttggcgcagggcgggaggtagggcacgcagctgggctacgggggcggcgatgctgttgggggcgacagacgcccagtctgggaaaccttcggtccactttgccgcgccaaagattaaacccgacctgggctcgcaaatcaaccaggagaaagtggtgttctgggtcctctcttgccgcttgcctgtggccgtgtacgggtcctcgggagcgcccgggtcccacccccgtgaaatggcggtgccagagctttgtgtcgagtttgattctttccgggaaactcatcagatattgttagtgtattttgtgtgtggcccaagacagttgttcttccagtgtggcccacggaagccaaaaagagtggacacccttgatgcagatgaggcctgcagatag

SEQ ID NO: 131444 - DNA, 2844 bp, Homo sapiens
agaccgcgccgaactacccggtcgacccacgcgttcggggcggtgagagctaaaaggggcagcgcgtgtgcagaggggcggtgtgacttatgacggggcgatggcggctgagaggagctgcgcgtgcgcgaacatgtaactggtgggatctgcggcggctcccagatgatggtcgacctcctgggcgcgacgaccctagagctcgtcgccgtggcgccatgggtgatgtccgcagccgcaggtggaaaaaatctaaaatctcctcacaaagtagaggtcgacatcatagatgacaactttatcctgaggtggaacaggagcgatgagtctgtcgggaatgtgactttttcattcgattatcaaaaaactgggatggataattggataaaattgtctgggtgtcagaatattactagtaccaaatgcaacttttcttcactcaagctgaatgtttatgaagaaattaaattgcgtataagagcagaaaaagaaaacacttcttcatggtatgaggtttgactcatttacaccatttcgcaaagctcagattggtcctccagaagtacatttagaagctgaagataaggcaatagtgatacacatctctcctggaacaaaagatagtgttatgtgggctttggatggtttaagctttacatatagcttacttatctggaaaaactcttcaggtgtagaagaaaggattgaaaatatttattccagacataaaatttataaactctcaccagagactacttattgtctaaaagttaaagcagcactacttacgtcatggaaaattggtgtctatagtccagtacattgtataaagaccacagttgaaaatgaactacctccaccagaaaatatagaagtcagtgtccaaaatcagaactatgttcttaaatgggattatacatatgcaaacatgacctttcaagttcagtggctccacgcctttttaaaaaggaatcctggaaaccatttgtataaatggaaacaaatacctgactgtgaaaatgtcaaaactacccagtgtgtctttcctcaaaacgttttccaaaaaggaatttaccttctccgcgtacaagcatctgatggaaataacacatctttttggtctgaagagataaagtttgatactgaaatacaagctttcctacttcctccagtctttaacattagatcccttagtgattcattccatatctatatcggtgctccaaaacagtctggaaacacgcctgtgatccaggattatccactgatttatgaaattattttttgggaaaacacttcaaatgctgagagaaaaattatcgagaaaaaaactgatgttacagttcctaatttgaaaccactgactgtatattgtgtgaaagccagagcacacaccatggatgaaaagctgaataaaagcagtgtttttagtgacgctgtatgtgagaaaacaaaaccaggaaatacctctaaaatttggcttatagttggaatttgtattgcattatttgctctcccgtttgtcatttatgctgcgaaagtcttcttgagatgcatcaattatgtcttctttccatcacttaaaccttcttccagtatagatgagtatttctctgaacagccattgaagaatcttctgctttcaacttctgaggaacaaatcgaaaaatgtttcataattgaaaatataagcacaattgctacagtagaagaaactaatcaaactgatgaagatcataaaaaatacagttcccaaactagccaagattcaggaaattattctaatgaagatgaaagcgaaagtaaaacaagtgaagaactacagcaggactttgtatgaccagaaatgaactgtgtcaagtataaggtttttcagcaggagttacactgggagcctgaggtcctcaccttcctctcagtaactacagagaggacgtttccctgtttagggaaagaaaaaacatcttcagatcataggtcctaaaaatacgggcaagctcttaactatttaaaaatgaaattacaggcccgggcacggtggctcacacctgtaatcccagcactttgggaggctgaggcaggcagatcatgaggtcaagagatcgagaccagcctggccaacgtggtgaaaccccatctctactaaaaatacaaaaattagccgggtagtaggtaggcgcgcgcctgttgtcttagctactcaggaggctgaggcaggagaatcgcttgaaaacaggaggtggaggttgcagtgagccgagatcacgccactgcactccagcctggtgacagcgtgagactctttaaaaaaagaaattaaaagagttgagacaaacgtttcctacattcttttccatgtgtaaaatcatgaaaaagcctgtcaccggacttgcattggatgagatgagtcagaccaaaacagtggccacccgtcttcctcctgtgagcctaagtgcagccgtgctagctgcgcaccgtggctaaggatgacgtctgtgttcctgtccatcactgatgctgctggctactgcatgtgccacacctgtctgttcgccattcctaacattctgtttcattcttcctcgggagatatttcaaacatttggtcttttcttttaacactgagggtaggcccttaggaaatttatttaggaaagtctgaacacgttatcacttggttttctggaaagtagcttaccctagaaaacagctgcaaatgccagaaagatgatccctaaaaatgttgagggacttctgttcattcatcccgagaacattggcttccacatcacagtatctacccttacatggtttaggattaaagccaggcaatcttttactatg

SEQ ID NO: 131445 - DNA, 373 bp, Homo sapiens
ggcgtattaggggcagcagtgcctgcggcagcattggcctttgcagcggcggcagcagcaccaggctctgcagcggcaacccccagcggcttaagccatggcaggatgccttctccgggacagattggatgttggagaaaatggatttgaaggagttcgacttggatgccctgttgggtatagatgacctggaaaccatgccagatgaccttctgaccacgttggatgacacttgtgatctctttgcccccctagtccaggagactaataagcagcccccccagacggtgaacccaattggccatctcccagaaagtttaacaaaacccgaccaggttgcccccttcaccttcttacaacctcttcccctttc

SEQ ID NO: 131446 - DNA, 432 bp, Homo sapiens
ctgccacgtttcgtggggcaacagccaagacccctgggacccttgcggggctcggggtccgagggctgtagggctcctggggaagcagtccgggcacccgactacgctttcccgatcccaggcacgcgagcgtctcgttaaatcgcttcccccttggcggcaccgcctggccccaggcgcaccccaccaatccaaaacccgcgccggccccaggagcacagctggacgacccgccccggtactcacgccatggcttaagccgctgggggttgccgctgcagagcctggtgctgctgccgccgctgcaaaggccaatgctgccgcaagctgctgcccctaatacgccatggtggccgtggaccctgagggcggggaggagggaaaacgcacacgcgcagagaaaactacatctgtgggcgggcaaagtagaaa

SEQ ID NO: 131447 - DNA, 376 bp, Homo sapiens
cctggccgtatttggacgtggggacggagcgctttcctcttggcggccggtggaagaatcccctggtctccgtgagcgtccattttgtggaacctgagttgcaagcagggaggggcaaatacaactgccctgttcctcccccttcgaccagtcgggtttgggggctgaagaaagcctaggtctcttagatgattacctggaggtggccaagcacttcaaacctcatgggttctccagcgacaaggctaaggcgggctcctccgaatggctggctgtggatgggttggtcagtccctccaacaacagcaagggtgagtgggccaccaccacatcgtcctggtgggatctagggttaggggcctcctacctttgtatc

SEQ ID NO: 131448 - DNA, 457 bp, Homo sapiens
cgggttttggggcttgaagaaagcctaggtctcttagatgattacctggaggtggccaagcacttcaaacctcatgggttctccagcgacaaggctaaggcgggctcctccgaatggctggctgtggatgggttggtcagtccctccaacaacagcaaggaggatgccttctccgggacagattggatgttggagaaaatggatttgaaggagttcgacttggatgccctgttgggtatagatgacctggaaaagaagaacgaggctctaaaagagagggcggattccctggccaaggagatccagtacctgaaagatttgatagaagaggtccgcaaggcaagggggaagaaaagggtcccctagttgaggatagtcaggagcgtcaatgtgcttgtacatagagtgctgtagctgtgtgttccaataaattattttgtagggaaaaaaaaaaaaa

SEQ ID NO: 131449 - DNA, 1233 bp, Homo sapiens
gttcgcagttcgaggcggagccggggcaggcacaaagatggcaagcacgtggtggggcccctgaggtgtgcagagggtcgctgcacctataagcctgtcgctggcgcggtctgggcgggaggttctgcggcgggaggcagcctgttggttgcagggctgaaaaagcagttctacaaggcaagccagctggtcagtgagaaggtcggagggtctgaggggaccaagctggacaatgacttcaaagagatggagaagaaggtggatgtcaccagcaaggcggtgacagaagtgctggccaggaccatcgagtacctgcagcccaacccagcctcgcaggctaagctgaccatgctgaacgcggtgtgcaagatccggggccaggtgaagaaccccggctacccgcagtcggaggggctcctgagcgagtgcctgatccgccaccagaaggagctaggcaacgagtccaacttcagtgacgcactgctggatgccggcgagtccatgaagcacctggcagaggtgaaggactccctggacatagagaagcggcaggacaagatccccgatgaggagctgcgccaggcgctggagaagtctgaggactccaaggaggtagcagaaaccagcatgcggtcctggacaccgacattgagcagggtccacggccaccatggcgtatcaggggcagcagtacctgtggcagcattggcctttgcagcggcggcagcagcaccaggctctgcagcggcaccccccagcggcttaagccatggcgcttctcagggcattcagcagcagcgttgctcaaagcaccgcaacatgaccgaaatgagcttcctgagcagcgaggtattggtgggggacttgatgtcccccttcgaccagtcgggtttgggggctgaagaaagcctaggtctcttagataactacctggaggtggccaagcacttcaaacctcatgggttctccagggacaaggctaaggcgggcttctccgaatggctggctgtggatgggttaggcagtccctccaataacagcaaggaggatgccttctccgggacagattggatgttggagaaaatggatttgaaggagttcgtctttgatgccctgttgggtatagatgacctggaaaccatgccagatgaacttttgaccactttggatgacacttgtgatctctttgcccccctagtccgggagactaataaggagacccccagacggtga

SEQ ID NO: 131450 - DNA, 2085 bp, Homo sapiens
  misc_feature (1)...(2085): n = a,t,c or g
gttttctactttgcccgcccacagatgtagttttctctgcgcgtgtgcgttttccctcctcccccgccctcagggtccacggccaccatggcgtattaggggcagcagtgcctgcggcagcattggcctttgcagcggcggcagcagcaccaggctctgcagcggcaacccccagcggcttaagccatggcgtgagtaccggggcgggtcgtccagctgtgctcctggggccggcgcgggttttggattggtggggtgcggcctggggccagggcggtgccgccaagggggaagcgatttaacgagcgcccgggacgcgtggtctttgcttgggtgtccccgagacgctcgcgtgcctgggatcgggaaagcgtagtcgggtgcccggactgcttccccaggagccctacagccctcggaccccgagccccgcaagggtcccaggggtcttggctgttgccccacgaaacgtggcaggaaccaagatggcggcggcagggcggcggcgcgggcgtgagtcaagggcgggcggtgggcggggcgcggccgccctggccgtatttggacgtggggacggagcgctttcctcttggcggccggtggaagaatcccctggtctccgtgagcgtccattttgtggaacctgagttgcaagcagggaggggcaaatacaactgccctgttcccgattctctagatggccgatctagagaagtcccgcctcataagtggaaggatgaaattctcagaacagctaacctctaatgggagttggcttctgattctcattcaggcttctcacggcattcagcagcagcgttgctgtaaaccgacaaagacaccttcgaattaagcacattcctcgattccagcaaagcacctgcaacatgacgcagaatgagcttcatgagcagcgaggtgttggtgggggaattgatgtcccccttcgaccagtcgggtttgggggcttgaagaaagcctaggtctcttagatgattacctgggaggtggccaagcacttcaaacctcatgggttctccagcgacaaggctaaggcggggctccttccgaatggcttggctgtggaatgggttggtcagtccctccaacaacagcaaggagagatgccttcttccgggacagattgggatgttgggagaaaatgggttttgaaggagttcgactttggatgcccatgcttgggtatagaatgaccctgggaaaccattgccagattgacctttttgaccacgtttgggattgacatttgtgattctcttttgcccccctagttccaggggagattaattaaggcagccccccccagacggttgaacccaattgggccatcttccccagaaatttttaacaaaaccccgancagggttggcccccttcaccttctttacaacctctttcccctttccccaggggtcctgttcctccactccagattcatttccttttagttttaggagctggggcagttgaaagtgggatattcactgaaagggagattagggaagccagactacactgcttacgttgccaatgatccctcagtgcataaaggagggaagacaccccttcagattaatgattagtggcatctggtatgagcccagagtcctaatctggggtctcctcagcacagcccctctaccaaggggctctccaaataggagcctcccatctccaggtgttctctgtgggtctgcccgtcccaaaccttacgatcctcctggagagaagatggtagcagcaaaagtaaagggtgagaaactggataagaagctgaaaaaaatggagcaaaacaagacagcagccactaggtaccgccagaagaagagggcggagcaggaggctcttactggtgagtgcaaagagctggaaaagaagaacgaggctctaaaagagagggcggattccctggccaaggagatccagtacctgaaagatttgatagaagaggtccgcaaggcaagggggaagaaaagggtcccctagttgaggatagtcaggagcgtcaatgtgcttgtacatagagtgctgtagctgtgtgttccaataaattattttgtaggg

SEQ ID NO: 131451 - DNA, 1824 bp, Homo sapiens
tcatcagagtccacagaccatatcggtgaagaagatgaataggattcttgctgcatccagggtacaatgcgcctttccagaacacagcagcgacccggggtagagggatcgctcaaacagcaccagaggctgcattccaacttttcctccatcaacgagtccgttttcattgttagtttctccttaaacacgattggctctggcgggaggggcgcggaaggtgagcccgtcgggagccgctgtcacggccgcaaccacccgcgggacctctcggcggcgctctcccagctccgcctctccctgatgcctcaactctagtcggagtagggccgacttcttcagctcctttacttgctgctccaactgcagtgtgctcttgttctcgttgttcagctcctcgaagccgctgcgtggctcggcccgctgctcgtacagggcttcccaccccagctccagcatcctctccagctcccgcagcctctccagctcccgcagcctctccagctcctgcagagtctcctgctgccacagcctctcatcctgttgccgaagcctctcctgctccaggagctcctccacctcgtccaggagctcctccacctcgtccagcagcctctccctctccagcagcctctcctgctcctcctgccgcctctcctgttctaacagcttctccacctcttccagcagcctctccctctccagcagcctctcctgctcctcctgctgcctctcctgttctaacagcttctccacctcttccagcagcctctccctctccagcagcctctcctgctcctcctgccgcctctcctgttctaacagcttctccacctcttccagcagcctctcctgccctggcagcttctcctgttcacacagcctctcctcctgttcacgtagcctctcctcctgttcacacagcctctcctcctgttcacgtagcctctcctcctgttcacacagcctctcctcctgttcacgtagcctctcctcctgttcacacagcctctcctcatgttcacgtagcctctcctcctgttcacacagcctctcctcctgttcacgtagcctctcctcctgttcatgtagcctctcctcctgttcacgtagcctctcctcctgttcacatagcctctcctcctgttcacacagcctctcctcatgttcacgtagcctctcctcctgttcatgtagcctatcctcctgttcacgttgcctctcctcctgttcatgtagcctctcctcctgttcacgtagcctctcctcctgtctcctgttcaggagactcaacatctgattgttttccacctcagcctggagctgtcttcccacactctctagctccttccttaggtggttggtctcatcttgtagctgctctaccttagatggccctgctgggggctctggggccaggggttcagccatctggtttttgagtttgaacaagctcctcccaagcttctgtaccagatgtatctcatgcttcttctcctccttagatgtgcgaaccagtgaattgatgttttcagtgagttgactgattattgcggagcttgaatccagggccactgatagttcttggtactggctctccagatcctccagggtagtagaggatgcacggccctccccgtagatacctgttgctgaatccccaggtgagtggtaaccaccagaagtggctgtgtcagggctactgccattgactttctttttcctgttagctcctgctggaatgccagggctcttcctctgccaatatgcttttaactttttcttggctgcggccaatttcccctgttgtgttttttctgacat

SEQ ID NO: 131452 - DNA, 704 bp, Homo sapiens
ttactcacgatgaaccagcacgaataaacccagcaaaaagagaactgcatacttaaatttaggatagtcattcatgaggatcgtcacaattccaatataaggaacaaatcccctggctctccccacaacatcttttttctctagccaatgttgtccttgtttatagaggcctcggtcatcaaccgcattattatctcctttggtcaaaaacttgatatgcccattttgcttttcatgaatcttcaagactcggtgaactataggaatctctcttccttctatcctaaaaacaacaatttctcccactcgtatgggatcttcaactcgatttgttagaaagagaagatctcctctatgaaatgcaggttcccatgctgccactggagcaccactacaatcggactttcacttccagtttattaccattaaccccttccagatcattagtgccgatgagacaatcattccaaaatttaggacttgataatagagcttacaggtgtataaagtgcttcacacatggcaagagctcaaaaaagttattgttttgccttagtccttttctacacatttaggctccttgaaggccgagtctttcttaactatctttgcatttctctcattgtacctgccgcttgttcatccgccgcacatcgtccaaaaagtctagagacagcatggcggggacggcgagcaggacaccg

SEQ ID NO: 131453 - DNA, 1019 bp, Homo sapiens
cgacgatttcgtctggaggggccgggccgagcccgggggcgctttttcatgcgaagcaaccgctagagcaggacctggtctcccgagaggtgagccggagaggcaggcctggagccacgcggaccccgggcagtagcccgagcgggactacttgttgatatttgaggagggaagtgtcttacctgagagcctggctggagaagactgaggtccaaggcttgaagcctaagtgattgccccaggactgtggatgatggctgcagacatcccgagagtgaccactccgctgagctccttggtccaggtgcctcaagaggaagatagacaggaggaggaggtcaccaccatgatcctggaagatgactcctgggtgcaagaagctgtgctgcaggaggatggccctgagtctgagccctttccccagagtgctggcaagggcggcccccaggaggaggtgaccaggggaccacagggtgcactcggccgcctccgagagctctgccggcgctggctgagaccagaggtacacaccaaggagcagatgttaaccatgctgccaaaggaaattcaggcttggctgcaagagcatcggcctgaaagcagtgaggaggcagcggccctggtggaagacttgacccagaccctttaggacagtgctgtagctgtctttgcttcccttccggtggaggtgaccagtttgtaatgaacttctggatctccagtcagatactatggaggagagagtgatggagggctgaggagtaggcctcaggttgttatttggttggggaggcacagagcagaggttcaggtctcagcaggtgtcagaggtgattacagcccttcccatccaccttgcagcaggggctttgtgcctttcatctttaactgggcacctgagatgggaaccaatggggaccatcccagacacatgggtttgtctgtccctgacttctgcctctgagattgtctttgttggtctttgtttaataaacgccccgaccttcctcatgattgca

SEQ ID NO: 131454 - DNA, 1280 bp, Homo sapiens
ctcaacatcatctcttgccagccggcagctccttttcttccttgatcttctaaatgtacaggggaagacagctggcagcctgtcatgtttcaaaccttcattaaagttctggattttggcctcttcgttttcccctagatgtcattaaagctgtcagcaccattgctgtgcatgagaaagaggagagtctctggcctagggtggccgtcttctccacattggcacccggagtcctccatggggcgaggctccgcagtctgcaggtcgttgatctggagtcccggaagaccacgtacacctcaggtaccgtggtactttgtcccttgcttgctgctccagccggcatcaccccccagcccaactcagccactataaaaactgagttcaactctctgtgccaggtgttggggatacacagtgaataagaggtaagccctggcctctaagggctcctatgctggggcaggattaggcagtcccagggaccagcacccaaccagctgagcagacaatggtgagatgagtgggaagggagatgtgatttattctgcctgggactggtgggaagggacctgtgaccagccagccctgccaaattgccagacccatctgcctccagccgcttgtctcctttgctgtcggtcttccagatgtcagtgacagtgaggagctgagtagcctgcaggtcctagatgcagacacctttgccttctgctgtgcttcgggccggctggggcttgttgacacccaggcagaagtgggcaccgttggagaatcgcagccctggccctgggtctggtggagagagatggtgtgctgaagttgggagctggggccagggccctgggcccagcattgccagccttggctcagatgggcatctttgtcttcttgacccccgggatctctgccatcctgtgagctcagtccagtgcccagtatccgtacctagccctgacccagagctgctgcgagtgacttgggccccaggcctgaagaattgcttggccatctcaggttttgatggtacagtccaggtctatgatgccacatcttgggatggaacacggagccaagatggaacacggagccaagtagaacctctcttcactcacagaggtcacatcttcctagatggaaatgggatggaccctgctcctttgggtcaccacccacacctggcatccctgcagaccaaggactttggttatcagcaacaaatgatgcctctctgcatgtgtgggactgggtggacctttgtgccccccgctgacaccagc

SEQ ID NO: 131455 - DNA, 1916 bp, Homo sapiens
ccgggtcgcccacgcgtccgggcggtggtgctggtgtccttttaagctgtggcttgacaggaggagcgcctcctgtcggtggagtctgttacaaggggagcagccgcccaggccgccacacagctccccgcagaggcctcggtgccccttgccattttccagccctactccgactagagttgaggcagcggggagaggcggagccgcgagagcgccgccgagaggtcccgcgggtggtcgcggccatgacagcggctcccgaccggctcaccttccgcgcccctcccgccagaggtgagagtaaaatgtccgtgtcagggttcaaggccaagctgaagttgttgtcctctattttccacaagaaccaggagccgccgcggcagctcaggctccactgcaacatcacggtgaggcgcccagtggcggcctcacggggcagggcgagggcggagaggaggcgcccagagtcccgggacaaaaggggaacctggcccaggagaggccccggttccccgggccgggagtctttgttgctggctatgaaagcctgaaaaagaatgaaattcttcatctgaaattacctctcagactttctgtaaaggaaaacaagggcttattcccagaaagagatttcaaagtgcgccatggaggattttcagacaggtctatctttgatctaaagcatgtgccacataccaggtatggtcaattttgtgatccagccatccacacaggatgggatgggatggctgcaaatgcctgggggtattctgcctcctcatctccattcccaccccctcagcacacaggcacatatgtcattaaagctgtcagcaccattgctgtgcatgagaaagaggagagtctctggcctagggtggccgtcttctccacattggcacccggagtcctccatggggcgaggctccgaagtctgcaggtcgttgatctggagtcccggaagaccacgtacacctcagatgtcagtgacagtgaggagctgagtagcctgcaggtcctagatgcagacacctttgccttctgctgtgcttcaggccggctggggcttgttgacacccggcagaagtgggcaccgttggagaatcgcagccctggccctgggtctggtggagagagatggtgtgctgaagtttgggagctggggccagggccctgggcccagcattgccagccttggctcagatgggcagctttggcttcttgacccccgggatctgtgccatcctgtgagctcagtccagtgcccagtatccgtacctagccctgacccagagctgctgcgagtgacttgggccccaggcctgaagaattgcttggccatctcaggcactgcccaggctgtcagccccaaaccctactccggggaccgcggtcaggttcgtctccgggcggactacatctcccacaatgccttgggcccagcctccctcctgccgcccggctgggtgccgtctccaccaacagaaaggcagaatttccagggccgttctcggcagccaatgagcgcggcggtgcctcaagaggaagatagacaggaggaggaggtcaccaccatgatcctggaggatgactcctgggtgcaagaagctgtgctgcaggaggatggccctgagtctgagccctttccccagagtgctggcaagggcggcccccaggaggaggtgaccaggggaccacagggtgcactcggccgcctccgagagctctgccggcgctggctgagaccagaggtacacaccaaggagcagatgttaaccatgctgccaaaggaaattcaggcttggctgcaagagcatcggcctgaaagcactctattatcaagtcctaaattttggaatgattgtctcatcggcactaatgatctggaaggggttaatggtaataactggaagtga

SEQ ID NO: 131456 - DNA, 403 bp, Homo sapiens
ggcaagtgcttctgcaaggggctttgcttctcctcataacagtggcacaggctggccgcgtgctcaaacttggcgtcagccgtgagtttcaggatcttcttatactatggggaaaggagaccttcaggcggtgccaggcccatgctcaccagcccttcacttacagcctggatcatcaatcccctgtcccagcagctcctttagtacctggctgcagagcagccgcaacttcacagaggaccgccccgtacccccgcccctgtctcgggagcggagtagcggtggacttttctcacgcccgcacacactgtttgcggagaggccagggcagacaacctccacccgtttccggagccactggcgccccctcattcccgctccagcagcccatgcctcgacgaaa

SEQ ID NO: 131457 - DNA, 299 bp, Homo sapiens; identical to SEQ ID NO: 128355

SEQ ID NO: 131458 - DNA, 398 bp, Homo sapiens
gctcaaacttggcgtcagccgtgagtttcaggatcttcttatactatggggaaaggagaccttcaggcggtgccaggcccctgctcaccagcccctcacctacagcctggatcatcaatcccctgtcccagcagctcctttagtacctggctgcagagcagccgcaacttcacagaggaccgccccgtacccccgcccctgtctcgggagcggagtagcggtggacttttctcacgcccacacacactgtttgcggagaggccagggcagacaacctccacccgtttccggagccactggcgccccctcattcccgctccagcagcccatgcctcgcttcacccctggtgcctcatcatcgcaccaggaagccacgaaatcgtcgacccgggaattcc

SEQ ID NO: 131459 - DNA, 626 bp, Homo sapiens
ttttttttttttttttttctttttagtttgttcctttaataaacacacttgcatagttacattacaatttcataaaaataaaaactgattatctcatgccaactgtccccagcattttcacagtctcaatactcttaatactatagttttcaagacacataaaattttaaggcaaaaacagcactttgcaacaatttaataatttattacattacagtagcatcacagtagcagtgaataatcccactttaggcaacagtgtttccgtatttccattatacattctgtttacaggaattcatcaattggtaaaagtcattctaagaaaacttggcaaataaaggtttggacttgaattggcatctctttctctacttttccttcctccagtttctttgttttaaactactgtattcatattttaaaatgttataatctcagccaccgctttgccccaagcttcctgctgctgcagctggtccacgagctgggtctgcagcagtaactgcctgtgcagcgcctccttctcagaggtcagctgctgataggtgggccacgtactgctgcaggtgacccaggtactagtctcactgctgctgcagactctgagactcttggctcttcat

SEQ ID NO: 131460 - DNA, 467 bp, Homo sapiens
ggatttcgtcccagtcccacaaggagcttggatgtgcggacaagcagggtgccaatcgtgtttaaggagaaactaacaatgaaaacggactcgttgatggaggaaaagttggaatgcagcctctggtgctgtttgagcgatccctctaccccgggtcgctgctgtgttctggaaaggcgcattgtaccctggatgcagcaggaatcctattcatcttcttcaccgatatggtctgtggactctgatgagccaaatctgacatcagttctggaacgtctagaagatactaaggacaacagttcgcttccttctttggttacaaccacccggaggtgactgtggccatggctctgactgacatagacctgcagctgcagttctccatgtcccaacccgaagccctccttctcctggcagcaggcccagctgaccacctcctgctgcagctctactctggacacctgcag

SEQ ID NO: 131461 - DNA, 478 bp, Homo sapiens
tgaccatgcttacgtctttcttggccggacggcctgttacctgatgaaagcatacagaaaggtcaatccgcgggttattttttcttctaatactatagaaactcatcccaaagacttattacactcttgtgaccatccttttgccgaaaaaacccagttcacagtgagtacattggatgatgtgaagaattctggcagtattcgagacaattattgtcgaacttctgaaatatctgctgtccacattgatacagagtgtgtttcagttatgctgcaagctggtacacctcctttacaagtaaaatgaaggaaaaatttccagcagagaaagcaaggatagaaaatgaaatgggacccttcagatatttcaaattccatggcagaagtccttggctaaaaaagaagagctagcagatcgtctaggaaaaggccaatgaagaagccattgctagtgctattgctgaagaagaacagttaa

SEQ ID NO: 131462 - DNA, 436 bp, Homo sapiens
gaaaaagaaattcccgggccctggcttcttggcgcgatgaggttccggttctgtggtgatctggactgtcccgactgggtcctggcagaaatcagcacgctggccaagatgtcctctgtgaagttgcggctgctctgcagccaggtactaaaggagctgctgggacaggggattgattatgagaagatcctgaagctcacggctgacgccaagtttgagtcaggcgatgtgaaggccacagtggcagagctgagtttcatcctctccagtgcggccaagcacagtgtcgatggcgaatccttgtccagtgaactgcagcagctggggctgcccaaagagcacgcggccagcctgtgccgctgttatgaggagaagcaaagccccttgcagaagcacttgcgggtctgcagcctacgcacagacaagttccaggtcg

SEQ ID NO: 131463 - DNA, 1950 bp, Homo sapiens
ctacgactctgaggcctgaaggtcggggagggaagccctgtcttctctttcctcttgccttctaatctcctgccagttcctccacttgctaatccagccagaaactgctgacacggaagccttagaagcacataggaactcttctaccagagtcacaggtccacctggttttaagggaggggacatagaacaaacaataattttacgtacttcttcagcattaccctccaacagaaggctgttttgtatacatcgaacctgttgtttagtgtagccatgttcatcagtgatcttagctagatcttttggataacttgctgcagcttctacatcagcacttgctgcctcaccttgcatttttatgttgtggagacagcttctttccttaaacctcatgaaccaacctctgctagcttctgacttttcttttgcagcttcctcacctctctcagccttcatagaattggagcgagttaggacattgctctggattaggctttggctctcaagttttttaaaaagtgtcttcacaatgtaagtctcgggcacactagcagttctataataaaacaccaagtagatcagaatgtccaaacttactgcaccacatgaggacagagggtccacctggaggagtggatcagccagatggccaccaagctggatggccaccgccagagcctgcaggacagcagagggggcgccagagtgggtgccaccttcttcagggtggcgccagccccaggccttcatgtggcactgtgcacgccagggcctgcacaccaccagcctcctgtcctccatgccacaggtatcggtctcatttacagagggggaaatggtggccaaaagcctcccccagcacacacggctagaccacacagaggtcttaggtgcagctgaggggtccacagtctctgctgtcccttctgccactcgtgctgccagggaccacgtgcgtaggctgcagacccgcaagtgcttctgcaagggggctttgcttctcctcataacagcagcacgggctggccgcgtgctctttgggcagccccagctgctgcagttcactggccaaggatttgccatcgacactgtgcttggccgcaccggagaggatgaaactcagcactgccactgtggccttcacatcgcctgactctccctgttgccctattaacttcagctcaaagcccccaggcctcctggagccataggcactgctactgctccaccaggagctggcagaggacaggaaggtgggactgtcaatgtctttctttccctcatgctcctccacaaacttggcatcagctgtgagtttcaggatcttcttataccctcctccacccagtgtagaccctgtgcactcaaccatcttggccagcgtgctgatctctgccaggacccggtcaggacagtccagatcaccacagaaccgaaacctccgccccattcgggagagggatggcggtggacttttctctaccagacctgctgccctgacgcccgcacacactgtgtttgcggagcggccagtgcagacaacctcaacccgtttccggagccactggcgccccctcattcccgctccagcagcccatgcccgcttcacccctggtgcctcatacatcgcgcgaggaagccagggcccgggaatttctttttccggtcccgccaggtcagctgagtcgacgatcacgtgacttggactaacggcctctggcggggcgggacctgctcgagtgaggccgggagcggaccgcagcccgctggaggtgccgggggcgaaatgctggcgtctgctcctccgtctcccagaatcctgccctatcattcgatgcagagaccagcttcttccctgggccagggctgctctggaggcagggaggtcgtggccaggccatggggtgtagcagagcactgggtatggatcaggctctccaggtacac

SEQ ID NO: 131464 - DNA, 6628 bp, Homo sapiens
gcggccgcggagcccggggcgggtccggcgcgggagccagcgcggctgtgtggctatctgcagaagctgtcgggcaagggccccctgcgtggctaccgcagccgctggttcgtgttcgacgcgcgccgctgctacctttactatttcaagagtccgcaggacgcgctgcccctcggccacttggacatcgcggacgcctgcttcagctaccagggccccgacgaggcggcggagccgggcacggagccgcccgcgcacttccaggtgcacagcgcgggagccgtcacggtgctcaaggctcccaatcgtcaactcatgacttactggttacaggagcttcagcagaagagatgggaatattgtaacagtcttgacatggtcaagtgggacagcaggacctctccaactcccggggattttcctaagggtcttgtagccagagataacactgatttaatttacccacacccaaatgcttctgcagaaaaagccagaaatgtcctagctgtggagactgtgcctggagagctggtgggagaacaagctgcaaatcagcccgccccagggcatccaaattccattaatttttactctttgaaacagtggggcaatgagctcaagaattcgatgtcttctttccgtcctgggagaggacataatgatagtcggaggactgtgttttataccaatgaagagtgggaacttttagacccaacccctaaggacctagaggagtccatagtacaggaagaaaagaagaagctgacccctgaaggaaacaaaggagtaactggctcaggattcccctttgattttggacgtaacccctacaaaggaaagcgccctttgaaagacataattgggtcgtacaaaaatcgtcacagcagtggtgacccttcaagtgaaggcacatcaggcagtggcagcgtcagcatcaggaagccggcctccgaaatgcaactgcaggtccagagccagcaggaagagctggaacagttaaagaaagacctgtccagtcagaaggagcttgttcgactgctccagcagacagtccggtcatcccagtatgacaagtatttcacaagcagccggctctgtgagggggtcccaaaggacacgctcgagcttctgcaccaaaaggatgatcagattctgggccttaccagccagctggagaggttcagcttggagaaggagagtcttcagcaggaagtaaggacgctgaagagcaaagtgggcgagctcaacgagcagctgggaatgctcatggagaccatccaagccaaggacgaggtcatcatcaagctcagcgagggcgagggcaacgggcctcctcccaccgtggcgcccagctccccttcggttgtgcctgttgccagggaccagctggaactggacaggctgaaagataatctacaggggtacaaaacccaaaacaaatttctaaataaggagattttggaactctcagctctacgaagaaatgcagaaaggagagagagggatctgatggcaaagtattctagcctggaagccaagctctgccagatagaaagtaaatacctgatattgctccaagaaatgaagacaccagtgtgctcagaagaccaggggcccacccgggaggtcatagcccagttgctggaggatgctctgcaggttgagagccaagagcagccggagcaagcatttgttaaacctcatcttgtcagtgaatatgatatttatgggttcaggactgtacctgaggatgatgaggaagagaaattggttgccaaggtccgcgcgttggatctgaagactctctacctcacagaaaaccaggaagtctccactggggtcaagtgggaaaactattttgcaagtacagtgaacagggagatgatgtgctctccagagttaaaaaacctcatccgtgcgggcattccccacgagcaccgttccaaggtgtggaagtggtgtgtggaccgtcacaccaggaagttcaaggacaacactgagcctggccacttccagaccttgctgcagaaggcgctggagaaacagaacccagcctccaagcagattgagctggacttgctgcgaactctgcccaacaacaaacattactcctgccccacctcagaaggcatacagaagttacgcaatgtcctcctcgccttctcctggcggaatccagatatcggctactgtcaaggcctaaacaggttggtggcagtggccctcctgtacctggaacaagaagatgctttctggtgtctcgttaccatagtggaagttttcatgcctcgagactattatacaaagactcttttaggatcccaggtggaccagcgggtgttcagagaccttatgagtgagaagctgcctcggttgcatggccactttgaacagtacaaagtcgactacactctcatcactttcaactggtttctggtggtatttgtggatagtgtcgttagtgacatcctctttaaaatatgggactctttcctttatgaaggaccaaaggttattttccgttttgctctggcactttttaagtacaaggaagaggagattttgaaattgcaagattcgatgtctatatttaagtatctccgctacttcactcgcactatccttgatgctagatccggaaccgacgcgcctaccacttggagaaagtccggctggagctgaccgagctggaggccatccgtgaggacttcctgcgtgagcgggacaccagccctgacaagggtgagctggtcagtgacgaggaggaggatacctgagtgggctcgggatgctgctcttccttccttcacaaccaaagtgtgcccaaagggtgaaagtgcacttaaaagccagaatgtaacgtgtgtgtcctctggggatctgctgggcagatgtcccaagccaggctgcccttcctcatttcccactgtgcggggggcaggggtgggaggtctaatctgtttacaaccatttccgtgccatgcttttggttacacgtatctcagtcacgctttctgcctggttggtggatcctcaggcttaccagtggctatttgcaagagcctgtttccagcctccgtcagcctgtcggtgctctgaccctctgaaaccttgctttgctgggcatctccccatattctctctcctgtacatagtgggcagtggtgtgtggttttgaatggcagtgctataaaggatgccagctgtgctttaggcacctgtaggccagagggttgctgcctcaggcataaggttggtatgaaaaggggctgccttagaaaagcaggcacatcccttgttcagaaatggccactgtaggaaagcctgtgaacctcccaccagtggctttaagctgccagccatgccccatttctagaatagcctttgctcttccacacgcaacccttccatcagtgtcttccagcctgcatggggagggcctggctgcccagacacccaccctcacttctcatggccagcctgtgtttgcagatcactgggctgctctgtccccagcttgccccgtgccaggcatggctctgtgagattctgtggaatgcccttcttgacttgtggaaatcattcaccaagtacgatgggatgggattccaagtaaacagtggaccgtcatattgcaaagcaggcccacgcctgggctggccttggttgaggggatggaggaatgttttcgggggtgctttgcagggcagtggtgcagccgcagcgtgaacgctcttggacagctgaaaaccatggcctccttggggatggccagtgctcctggtgtctccacctgcctgggttgtgcaggaggccggctgccagtgcctggggctgggaaacttttttgcttggggcaggcttgggtgagctctcccagatgtgtgcccaccccaccactgcctggaacatccttgttctctgccaggatgcaggggcactgttgcctctgacacagcagtttctgggaactcagaggactgcctttctgaaggctggggagaggctttgagcaaggagcttgtttttgcttaatcgctctagaccatccctgatgcgtagatgtgagaggatgttttctggcacagtgttatgaaaatacaagataaatgatctcagtggaatgtttcatattacccgaaaaaaactggaaatcatcctttgttgtgaacacactgagactaagaattgaagcaatgcagttttaagaagtatttttcctattttttgctgtcaactttttggcaatgccacggcaaagttggtgtttcagcacatgctagagtgagctccggcttcgtgtctttaaccaactccactaatgtttcactgggtagacggagctggcctctatatttagccagaagcctttgcctcttttcaggcatcaaaaatgggttttgtcattgtctttgtctttgagagcagcagtttgaggtctgactccttcagttgtcctgtgagctgggcgttgcagtctgctcgaatcaagtgttggaaaccccccacccctcagcccatcgtgaaacgacagctgtcagcctggggggcggctgctgaggaggtgcagcaggaatggggctgggccctgaggttttactttccgagccaatggcccctggaacatgccagcacacactgccatgtcctggggctaagagctgcctttagggacaggctcgtgttgtccagtttgccctgagagatgcacctgaccaggggcccgtcgtggctgcaacccacggtggtatgttagtgtttccaggcagttgtcagcagctgccgggtagtgtgtgtgtgcgacagcaggagagttcctggaggaaagggactggggacactttctcagaggttctcctgcctggaatcaagtgatgcgtgtccagaaggcaagagagggcggctccgcctggttaaagtttgggaacgggacggagccaactcctccttccaggactgtgggccccactcttttgcgctaacacttcccctccctcgggtcactgaggaaagagctgctctgtcccctccagtgccctgaaggtccctggcctccactggctgccatggcagggggcccttctgacaggggctgccccaagctgctgttcctcctctgaaccttcaccccaacacccagcccgtggcccctgcaagggggaccctgccagctgggaaacccaaaggcctgtccaaacgtgcgcaccaggaccgaggggagctccctcccaacacctgctaggaattgccaacttttaaatggatggggttttttatgggttgaacctctgttaatacttttgtacactctcactacagtttatatttttataggctattttctcaaggtgtttctagattccacatatctattttatataacaagttattatgttatgtgtgtgactcccttgtgtgtatctgtgccagcctcagcctccgagttgcttttccctctggccctgactctcactgactcaccgatgtgatgtgcaggcccacttcttaccccagatagcctcgggcgctgcctgtagtcatgctgacagctgtacagtagccgccaagactgctgacagctggagacggttctggtttcaactacgaagagtcaacagatacaacaggcccagggaggtgcccctgggggccccagtccccatcactccaaggggcagtcctgcaagtgacaaggtgggcccaatccctgtggaacaggtctctgaggaccacagagtggggccccagggaaagctgggagccgagctagaggcaggcagcaagtaagggcaaagctgtgcccctgcccggaagaccttcctgcccccagaacccgaccctccgcagatagccctccctgggcagcagccccccagcttccaaggcccgtgcctcaccagacgccatgctctcacggacttgtttgctgctctgtaccctgcagatctgccccagaggagcaggtgaaaagccgcgcctgccgaggtgctgtggcggtggagttttgggcagaggagtggggggaagagtttctcacttttaagattctccaaatccaagatgaagtcatgctgtgctttggaatggtagatgctcatttatgtaaaatcataataaatgttacacaaactgttagaataaaaaaataccttttttgagggggaggaggtccccagcctgctgctgggtagtgagagggggttagcaccattagggcgcagggggcgggagctccgccacagcccgtggtgggcactgaggtctgtcggtcggtctgtgcatcctggcacagtcagcggcgggcaacccgctgatggcctcggggagggggcgccgtggctgggctaagagcacgaagcggcaacactgggtgcggatggtgggcagctggcagcggcccagtaggcgcagcgtctcgcagaacccgaaggacaggcggtcccgctcacagcggggaggctcgacgggctcacaatcctcggtgccacacggccgggagctctcaggccaggcctcgtggccacactggtcactgtcttcctcgggcagccctggtctgggtgttgacacacttgaccaggcgccgctggacaccaccaccacagggggctgagcactggccccaggg

SEQ ID NO: 131465 - DNA, 4559 bp, Homo sapiens
  misc_feature (1)...(4559): n = a,t,c or g
atgggctgctggagcgggaatgagggggcgccagtggctccggaaacgggtgcaggttgtctgccctggcctctccgcaaacaatttaaatttacccaccacccaaatgcttctgcagaaaaagccagaaatgtcctagctgtggagactgtgcctggagagctggtgggagaacaagctgcaaatcagcccgccccagggcatccaaattccattaatttttactctttgaaacagtggggcaatgagctcaaggtgtcttcagatgagtcagcatgtgggctgttttactccccgctcagctcctccatgtggcctgggtcacaaatgattgtgatgattagccagtaccaagaactagcagtagccctggagtcaagctccgtgacaatcaatcaactcaatgaaaacatagaatcattgaaacagcagaagaaacaagtggaacatcagctggaagaaataacgtgattttctttgcttacaacatgactgctgggtttggggggcactcagatgcagagaacaatgagaaaaagagcgcactgcagttggagcagcaagtaaaggagctgcaggagaagctagacgaggtgaaggagatgagccagtaccaagaactagcagtagccctggagtcaagctccgtgacaatcaatcaactcaatgaaaacatagaatcattgctggcccttgtagagcatagcgtcaaagtggctgcactggacgtggcggaaggaggggcggccagcggagcaggcctgcaggttgcagaggcggaagcgcttccgctcacccacacagtatctgcctttgtatttgggcctgtggggagaaccggggtgggccccagtgagggcccagcagggggccggcgtggggacttcatctatgtggacatatttgagggccacctgcgggccgtggtggagaagggccagggtacggtattgctccacaacagtgtgcctgtggccgatgggcagccccatgaggtcagtgtccacatcaatgctcaccggctagaaatctccgtggaccagtaccctacgcatacttcgaaccgaggagtcctcagctacctggagccacggggcagtctccttctcggggggctggatgcagaggcctcttgtcacctccaggaacaccgcctgggcctgataccaggggccaccaatgtctccctgctgggctgcatggaagacctcagagtcaatggccagaggcaggggctgcgggaagctttgctgacgcgcaacatggcagccggctgcaggctggaggaggaggagtatgaggacgatgcctatggacattatgaagctttctccaccctggctcctgaggcttggctggccatggagctgcctgagccatgcgtgcctgagccagggctgcctcctgtctttgccaatttcacccagctgctgactatcagcccactggtggtggccaaggggggcacagcctggcttgagtggtggcacgtgcagcccacgctggacctgattggagctgagctgcgcaaatcccagtgctcagccccctgtggcagtggcgtccagcggcgcctagtcaagtgtgtcaacacccagacagggctgcccgaggaagacagtgaccagtgtggccatgaggcctggcctgagagctcccggccgtgtggcaccgaggattgtgagcccatcgagtctccccnagctacacatgtgaacgtctgggtcatcaccaatgtggatggagagggtacagagcagggggaatggtggagctgtgacatggaaacagaaggtgtccttgactgcctccgaggcacgtgccatggccccataggtcacccggccagcctgtacatcatcctagggagagccacgaggctcaaccgggtctctagctgttggttccgctggctggcagcttctaggtgctcccaaggggatgggaaacagagtgagaaggcacggaggttgccaggtcatccccctcggggccccatcctcagcaactccctcccctgggtctcctgcaacttttggcgggccatctcagccaccgctttgccccaagcttcctgctgctgcagctggtccacgagctgggtctgcagcagtaactgcctgtgcagcgcctccttctcagaggacgaaggaaccctagagtttacactcaccacacagagccggcaggcacccttggccttccaggcagggggccggcgtggggacttcatctatgtggacatatttgagggccacctgcgggccgtggtggagaagggccagggtacggtattgctccacaacagtgtgcctgtggccgatgggcagccccatgaggtcagtgtccacatcaatgctcaccggctagaaatctccgtggaccagtaccctacgcatacttcgaaccgaggagtcctcagctacctggagccacggggcagtctccttctcggggggctggatgcagaggcctcttgtcacctccaggaacaccgcctgggcctgataccaggggccaccaatgtctccctgctgggctgcatggaagacctcagagtcaatggccagaggcaggggctgcgggaagctttgctgacgcgcaacatggcagccggctgcaggctggaggaggaggagtatgaggacgatgcctatggacattatgaagctttctccaccctggctcctgaggcttggctggccatggagctgcctgagccatgcgtgcctgagccagggctgcctcctgtctttgccaatttcacccagctgctgactatcagcccactggtgtgctctaccacctgcggcctgggtgtggtctggaggccggtgcgctgtagctctggccgggatgaggactgtacccccgctggccggccccagcctgcccgccactgccacctgcagccctgtgccacctggcactcaggcaactggagtaagctaaaagaatatcagcaaaggaagagccctggtgttccagcaggagcaaagacaaaaaagaaaaaaactggcagtagccctgagacaaccacttctggtggttgccactcacctggggatctaaaagaatatcagcaaaggaagagccctggtgttccagcaggagcaaagacaaaaaagaaaaaaactggcagtagccctgagacaaccacttctggtggttgccactcacctggggatagataccccgtggcagtgctgagtttcatgctctccggaactgccaagcacagtgtcgatggcgaatccttggccagtgaactgcagcagctggggctgcccaaagagcacgcggccagcctgtgccgctgttatgaggagaagcaaagccccttgcagaagcacttgcgggtctgcagcctacgcacgtggtccctggcagcacgagtggcagaagggacagcagagactgtggacccctcagctgcacctaagacctctgtgtggtctagccaaccacctggtcggtcggctctgaccgacatagacctgcagctgcagttctccacgtcccagcccgaagccctccttctcctggcagcaggcccagctgaccacctcctgctgcagctctactctggacgcctgcagactcggaaggtagggagggagcgtggccagggcggctgcctgcaggtgcgtgtcctgctgctccccaactcaacatgctcacctcatttcacaccaacaagccccatcctcagaggaggagcccaaggctctgagaggaagaagctgatcagtatctcctttggggacctgaaccctttccccctacgccagatccggaaccgacgcgcctaccacttggagaaagtccggctggagctgaccgagctggaggccatccgtgaggacttcctgcgtgagcgggacaccagccctgacaagggtgagctgtccatggcagaagtccttgctaaaaaagaagagctagcagatcgtctagaaaaggccaatgaagaagccattgctagtgctattgctgaagaagaacagttaactagagaaattgaagctgaagaaaacaatgatattaacattgaaactgacaacgacagtgatttttctttcacagtgagtacattggatgatgtgaagaattctggcagtattcgagacaattatgttcgaacttctgaaatatctgctgtccacattgatacagagtgtgtttcagttatgctgcaagctggtacacctcctttacaagtaaatgaagaaaaatttccagcagagaaagcaaggatagaaaatgaaatggacccttcagatatttcaaatgtgagtgctgctaacttgttcacagtgagtacattggatgatgtgaagaattctggcagtattcgagacaattatgttcgaacttctgaaatatctgctgtccacattgatacagagtgtgtttcagttatgctgcaagctggtacacctcctttacaagtaaatgaagaaaaatttccagcagagaaagcaaggatagaaaatgaaatggacccttcagatatttcaaatgtgagtgctgctaacttggatatgctggctttgtaa

SEQ ID NO: 131466 - DNA, 2664 bp, Homo sapiens
atgagacagaaagttaacaaggatatccaggaattgaactcagcgctgcaccaggtggacctaatagatatctacagaactctccatcccaaatcaacagaatatacattcttctcagcaccacatctcacttattccaaaattgaccacttagttagtagtaaagcactcctaagcaaatgtaaaagaacagaaattataagaaactgtctctcagaccacagtgcaaccaaactagaactcaggattaagaaactcactcaaaaccgctcaactacatggaaactgaacaacctgctcctgaatgactactgggtacataacgaaatgaaggcagaaataaagatgttctttgaaaccaatgagaacaaaaacacaacataccagaatctctgggacacattcaaagcagtgtgtagagggaaatttatagcactaaatacccacaacagaaagcaggaaagatctaaaattgacaccctaacatcacaattaaaagaaccagagaagcaagatcaaacacattcaaaagcgagcagaaggcaagaaataactaagatcagagcagaactgaaggaaatagagacacaaaaaacccttcaaaaaatcaatgaatccaggagctggttttttgaaaagatcaacaaaattgatagaccgctagcaagactaataaagaaggaaggagagaagaatcaaatacacacaataaaaaatgataaaggggatctcaccaccaatcccatagaaatacaaactaccatcagagaatactatatacacttctacgcaaatacactagaaaatctagaagaaatggataaattcctcaacacatacaccctcctaagactaaatcaggaagaagttgaatctctgaatagacgaataacaggctctgaaattgaggcaataattaatagcttaccaaccaaaaaaagtccaggaccagatgcagaaaaggcctttgacaaaagtcaacaacgcttcatgctaaaaactctcaataaattaggtattgatgggacgtatctcaaaataataagagctatctatgacaaacccatagccaatatcatactgaatgggcaaaaactggaagcattccctttgaaaacaggcacaagacagggatgccctctctcaccactcctattcaacatagtgttggaagttctggccagagcaatcaggcaggagaaggaaataaagggtattcaatcaggaaaagaggaactcaaattgtccctgtttgcagatgacatgattgtatatctagaaaatcccatcctctcagcccaaaatctccttaagctgataggcaacttcagcaaagtctcaggatacaaaatcaatgtgcaaaaatcacaagcattcctatacaccaagaacagacaaacagagagccaaatcatgagtgaactcccattcacaattgcttcaaagagaataaaagacctaggaatccaacttacaagggacgtgaaggacctcttcaaggagaactacaaaccactgctcgaagaaataaaagaggatacaaacaaatggaagaacattccatgctcatggataggaggaatcaatattgtgaaaatagccatactgcccaagccatgtggaaagctgaaactggatcccttccttacaccttatacaaaaattaattcaagatggattaaagacttacatgttagacctaaaaacgtaaaaaccctagaagaaaacctaggcaataccattcaggacataggcatgggcaaggacttcatgtctaaaacaccaaaagcaatggcaacaaaagccaaaattgacaaatgggatctaattaaactaaagagcttctgcacagtaaaagaaaccaccatcagagtgaacagacaacctacagaatgggagaaaatttttgcaatctactcatctgacaaagggctaatatccagaatctacaatgaactcaaacaaatctacaagaaaaaaacaaacaaccccatcaaaaagtgggcaaaggatatgaacagacacttctcaaaagaagacatttatgcagccaaaagacacatgaaaaaatgctcagcatcactggccatcagagaaatgcaaatcaaaaccacaatgagataccatctcacaccagtcagaatggcgaccattaaaaagtcaggaaacaacaggggatatatgacaatgttggagcaagagagcttctttctctccctgaatattgcttatgactcagtacttttgccagtcattttaccggtccctccattcggggtccctgacttcccgcaacaggtacctggttcatctcactgggactggttggacagtgagtgcagcccatggaggtgtagcctgactgggagacacctcccagtaggggccaacagacacctcatagaggtgggtgcccctctgggacgaagcttccagaggaaggatcaggcagcaatatttgctgttctgcagcctctgctggtgatacccaggcaaacagcgtctggagtggacctccggcaacctccaacagacctgcaggaacacaactcctcaccagcaagggaagaaaactggacagagaatgagtttgatgagttgacagaagtaggcttcagaaggttggtaataacaaagttctccgagctaaaggaggatgtttga

SEQ ID NO: 131467 - DNA, 2290 bp, Homo sapiens
tgcaatcaaactagaactcagaattaagaaactcactcaaaactgctcacctacatggaaactgaacaacctgctcctgaatgactactgggtacataacgaaatgaaggcagaaataaagatgttctttgaaaccaacgagaacaaagacacaacataccagaatctctgggacacattcaaagcagtgtgtagagggaaatttatagcactaaatgcccacaagagaaagcaggaaagatctaaaattgacaccctaacatcacaattaaaagaactagaaaagcaagagcaaacatattcaaaagctagcagaaggcaagaaataactaagatcagagcagaactgaaggaaatagagacacaaaaaatccttcaaaaaatcaatgaatccaggagctggttttttgaaaagatcaacaacattgatagaccgctagcaagactaataaagaagaaaagagagaaaaatcaaatagatgcaataaaaaatgatacaggggatatcaccaccaatcccacagaaatacaaactaccatcagagaatactataaacacctctacacaaataaactagaaaatctagaagaaatggataaattcctggacatatacacactcccaagactaaaccaggaagaagttgaatctctgaatagaccaataacaggctctgaagttgaggcaataattaatagcttaccaaccaaaaaaattccaggaccagatggattcacagccgaattctaccagagaaaaagaggaatccttcccaactcattttatgaagccagcattatcctgataccaaagcctggcagagacacaacaaacaaagagaattttagaccaatatccttgatgaacatcgatgcaaaaatcctcaataaaatactggcaaaccgaatccagcagcacatcaaaaagcttatccaccatgatcaagtgggcttcatccctgggatgcaaggctggttcaacatacgcaaatcaataaacgtaatccagcacataaacagaaccaatgataaaaaccacatggttatctcaatagatgcagaaaagacctttgacgaaattcaacaacccttcatgctaaaaactctcaataaattaggtattgatgggacgtatctcaaaataataagagctgtctatgataaacccacaggcaatatcatactgaatgggcaaaaactggaagcattccctttgaaaactggcacaagacagggatgccctctctcaccactcctattcaacatagtgctggaagttctggccagggcaatcaggcaggagaaggaaataaagggtattcaattaggaaaagaggaagtcaaattgtccctgtttgcagatgacaagattgtatatctagaaaaccccatcgtctcagcccaaaatctccttaagccaataggcaacttcagccaagtatcaggatacaaaatcaatgtgcaaaaattacaagcattcttatacaccaataacagacaaacagagagccaaatcgtgagtgaattcccattcacaattgcttcaaagagaataaaatacctaggaatccaacttataagggacatgaaggacctcttcaagcagaactacaaaccactgctcaatgaaataaaagaggatacaaacaaatggaagaacattccatgctcatggataggaagaatcaatatcatgaaaatggccatactgcccaaggtaatttatagattcaatgccatccccataaagctaccaatgactttcttcacagaattggaaaaaactactttaaacttcaggtggaaccaaaaaagagcccgcattgccaagtcaatcctaagccaaaagaacaaagctggaggcatcacgctacctgacttcaaactatactacaaggctacagtaaccaaaacagcatggtactggtaccaaaacagagatatagacaaatggaacagaacagagccctcagaaataatgccgcatatctacaaccatctgatctttgacaaacctgacaaaaacaagaaatggggaaaggattccctatttaataaatggtgctgggaaaacgggctagccatatgtagaaagctaaaactggatcccttccttacaccttatacaaaaattaattcaagatggattaaagacttaaacgttagacctaaaaccataaaagccctagaagaaaacctaggcaataccattgaggacataggcatgggcaaggacttcatgtctaaaacaccaaaagcaagggcaacaaaagacaaaattgacaaatag

SEQ ID NO: 131468 - DNA, 1992 bp, Homo sapiens; identical to SEQ ID NO: 118317

SEQ ID NO: 131469 - DNA, 1680 bp, Homo sapiens; identical to SEQ ID NO: 120942

SEQ ID NO: 131470 - DNA, 2178 bp, Homo sapiens
atgggagactttaacaccccactgtcaacattaggcagatcaacgagacagaaagtcaacaaggatacccaggaattgaactcggctctgcaccaggcggacctaatagacatctacggaactctccaccccaaatcaacagaatatacatttttttcagcaccacaccacacctattccaaaattgaccacatagttggaagtaaagctctcctcagcaaatgtaaaagaacagaaattataacaaactgtctctcagaccacagggcaatcaaactagaactcaggattaagaaactcactcaaaaccgctcaactacatggaaactgaacaacctgctcctgaatgactactgggtacataacgaaatgaaggcagaaataaagatgttctttgaaaccaacgagaacaaagacacaacataccagaatctctgggacacattcaaagcagtgtgtagagggaaatttatagcactaaatgcccacaagagaaagcaggaaagatccaaaattgacaccctaacatcacaattaaaagaactagaaaagcaagagcaaacacattcaaaagctagcagaaggcaagaaataactaaaatcagagcagaactgaaggaaatagagacacaaaaaacccttcaaaaaattaatgaatccaggagctggttttttgaaaggatcaacaaaattgatagaccgctagcaagactaataaaggaaaaaagagagaagaatcaaatagacgcaacaaaaaatgataaaggggatatcaccactgatcccacagaaatacaaactaccatcagagaatactacaaaaccctctacgcaaataaactagaaaatctagaagaaatggataaattgctggacacatacactctcccaagactaaaccaggaagaagttgaatctctgaacagaccaataacaggatctgaagttgtggcaataattaatagcttaccaaccaaaaacagtccaggaccagatggattcacagccaaatactaccagaggtacaaggaagaactggtaccattccttctgaaactattccaatcaacagaaaaagagggaatcctccctaactcattttatgaggccagcatcatcctgataccaaagcctggcagagacacaaccaaaaaagagaattttagaccaatatccttgatgaacgttgatgcaaaaatcctcaataaaatactggcaaaccgaatccagcagcacatcaaaaagcttatccaccatgatcaagtgggcttcatccctgggatgcaaggctggttcaatatatgcaaatcaatcaatgtaatccagcatataaacagaaccaaagacaaaaaccacatgattatctcaatagatgcagaaaaggcctttgacaaaattcaacaacccttcatgctaaaaactctcaataaattagtgttggaagttctggccagggcaattaggcaggagaaggaaataaagggcattcaattaggaaaagaggaagtcaaattgtccctgtttgcagatgacatgattgtatatttagaaaaccccatcatctcagcccaaaatctccttaagctgataagcaacttcagcaaagtctcaggatacaaaatcaatgtgcaaaaatcacaagcattcttatacaccaataacagacaaacagagagccaaatcatgagtgaactcccattcacaattgcttcaaagagaataaaatacctaggaatccaacttacaagggatgtgaaggacctcttcaaggagaactacaaaccactgctcaatgaaataaaagaggatacaaacaaatggaagaacattccatgctcatggataggaagaatcaatatcgtgaaaatggccatactgcccaaggtaatttatagattcaatgccatccccatcaagctaccaatgactttcttcacagaattggaaaaaactactttaaagttcatatggaaccaaaaaagagcccgcatcaccaagtcaatcctaagccaaaagaacaaagctggaggcatcacgctacctgacctcaaactatactacaaggctatagtaactcaaaacagcatggtactgctaccaaaacagagatatagaccaatggaacagaacagagccctcagaaataatgctgcatatctacaactatctgatctttga

SEQ ID NO: 131471 - DNA, 1773 bp, Homo sapiens
atgggagactttaacaccccactgtcaacattagacagatcaatgagacagaaagttaacaaggatacacaggaattgaactcagctctgcaccaagcagacctaatagacatctatagaactctccaccccaaatcaaaagaatatacatttttttcagcactgcaccacacctattccaaaattgaccgcacagttggaagtaaagctctcctcagcaaatgtaaaagaacagaaattatcacaaactctctctcagaccacagagcaatcaaactagaactcaggattaagaaactcactcaaaaccgttcaactacatggaaactgaacaacctgctcctgaatgactactgggtacataacgaaatgaaggcagaaataaagatgttctttgaaaccaacgagaacaaagacacaacataccagaatctctgggacacattcaaagcagtgtgtagagggaaatttatagcactaaatgcccacaacagaaagcaggaaagatccaaaattgacaccctaacatcacaattaaaagaactagagaagcaagagcaaacacaatcaaaagctagcagaaggcaagaaataactaaaatcagagcagaactgatggaaatagagacacaaaagacccttcaaaaaagtaatgaatccaggagctggttttttgaaaggatcaacaaaattgatagaccactagcaagactaataaagaagaaaagagagaagaatcaaatagacgtaataaaaaatgataaaggggatatcaccaccgatcccacagaaatacaaactaccatcagagaatactacaaacatctctacgcaaataaactagaaaatctagaagaaatggataaattcctggacacatacaccctcccaagactaaaccaggaagaagttgaatctctgaatagaccaataacaggctctgaaattgtggcaataatcaatagcttaccaaccaaaaagagtccaggaccagatggattcacagtcgaattctaccagagggcaattaggcgggagaaggaaataaagggtattcaattaggaaaagaagaagtcaaattgtccctgtttggagatgacatgattgtatatctagaaaaccccatcgtctcagaccaaaatctccttaagctggtaagcaacttcagcaaagtctcaggatacaaaatcaatgtacaaaaatcacaagcatttttatacaccaataacaggcaaacagaaagtcaaatcatgagtgaactcccattcacaattgcttcaaagagaataaaatacctaggaatccaccttacaagggatgtgaaggacctcttcaaggagaactacaaaccactgctcaatgaaataaaagaggatacaaacaaatggaagaacattccatgctcatgggtaggaagaatcaatatcgtgaaaatggccatactgcccaaggtaatttgtagattcagtgccatccccatcaagctaccaatgactttcttcacagaattggaaaaatctactttaaagttcatatggaaccaaaaaagagcccgcatcaccaagtcaatcttaagccaaaagaacaaagctggaggcatcacgctacctgacttcaaactatactacaaggctacagtaatcaaaacagcatggtactggtaccaaaacagagatatagatcaatggaacagaacagagccctcagaaataatgccacatatctacaacaatctgatctttgacaaacttgagaaaaataagcaatggtga

SEQ ID NO: 131472 - DNA, 1104 bp, Homo sapiens
atggcacaagaactacatgacgaatgcacaagcctcagcagccgatgtgatcaactggaagaaagggtatcagcgatggaagatgaaatgaatgaaatgaagcgagaagagaagtttagagaaaaaagaataaaaagaaacgaacaaagcctccaagaaatatgggactacgtgaaaagaccaaatctacgtctgattggtgtacctgaaagtgacggggagaatggaaccaagttggagaacactctgcaggatattatccaggagaacttccccaatctagcaaggcaggccaacattcaaattcaggaaatacagagaacgccacaaagatactcctcgagaagagcaactccaagacacataattttcagattcaccaaaattgaaatgaaggaaaaaatgttaagggcagccagagagaaagaactcaggattaagaaactcactcaaaaccgctcaactacatggaaactgatcaacctactcctgaatgactactgggtacataacgaaataaaggcagaaataaagatgttctttgaaaccaacgagaacaaagacacaacataccagaatctctgggacacattcaaagcactgtgtagagggaaatttatagcactaaatgcccacaagagaaagcaggaaagatctaaaattgacaccctaacatcacaattaaaagaactagagaagcaagagccaacacattcaaaagctagcagaaggcaagaaataactaagatcggagcagaactgaaggaaatagagacacaaaaaacccttcaaaaaatcaatgaatccaggagctggttttttgaaaagatcaacaaaattgatagaccactagcaagactaataaagaagaaaagagagaagaatcaaatagacgcaataaaaaatgacaatggggatatcaccaccgataccacagaaatacaaactaccatcagagaatactataaacacctctacgcaaataaactagaaaatctagaagaaatggataaattccttgacacatacactctcccaagactaaaccaggaggaagttgaatctccaaaaagaccaatagcaggctctgaaattgaggcataa

SEQ ID NO: 131473 - DNA, 1614 bp, Homo sapiens
atgagacagaaagttaacaaggatatccaggaattgaactcagcgctgcaccaggtggacctaatagatatctacagaactctccatcccaaatcaacagaatatacattcttctcagcaccacatctcacttattccaaaattgaccacttagttagtagtaaagcactcctaagcaaatgtaaaagaacagaaattataagaaactgtctctcagaccacagtgcaaccaaactagaactcaggattaagaaactcactcaaaaccgctcaactacatggaaactgaacaacctgctcctgaatgactactgggtacataacgaaatgaaggcagaaataaagatgttctttgaaaccaatgagaacaaaaacacaacataccagaatctctgggacacattcaaagcagtgtgtagagggaaatttatagcactaaatacccacaacagaaagcaggaaagatctaaaattgacaccctaacatcacaattaaaagaaccagagaagcaagatcaaacacattcaaaagcgagcagaaggcaagaaataactaagatcagagcagaactgaaggaaatagagacacaaaaaacccttcaaaaaatcaatgaatccaggagctggttttttgaaaagatcaacaaaattgatagaccgctagcaagactaataaagaaggaaggagagaagaatcaaatacacacaataaaaaatgataaaggggatctcaccaccaatcccatagaaatacaaactaccatcagagaatactatatacacttctacgcaaatacactagaaaatctagaagaaatggataaattcctcaacacatacaccctcctaagactaaatcaggaagaagttgaatctctgaatagacgaataacaggctctgaaattgaggcaataattaatagcttaccaaccaaaaaaagtccaggaccagatgcagaaaaggcctttgacaaaagtcaacaacgcttcatgctaaaaactctcaataaattaggtattgatgggacgtatctcaaaataataagagctatctatgacaaacccatagccaatatcatactgaatgggcaaaaactggaagcattccctttgaaaacaggcacaagacagggatgccctctctcaccactcctattcaacatagtgttggaagttctggccagagcaatcaggcaggagaaggaaataaagggtattcaatcaggaaaagaggaactcaaattgtccctgtttgcagatgacatgattgtatatctagaaaatcccatcctctcagcccaaaatctccttaagctgataggcaacttcagcaaagtctcaggatacaaaatcaatgtgcaaaaatcacaagcattcctatacaccaagaacagacaaacagagagccaaatcatgagtgaactcccattcacaattgcttcaaagagaataaaagacctaggaatccaacttacaagggacgtgaaggacctcttcaaggagaactacaaaccactgctcgaagaaataaaagaggatacaaacaaatggaagaacattccatgctcatggataggaggaatcaatattgtgaaaatagccatactgcccaag

SEQ ID NO: 131474 - DNA, 1878 bp, Homo sapiens; identical to SEQ ID NO: 125307

SEQ ID NO: 131475 - DNA, 1764 bp, Homo sapiens
gccttagaagcttcttattttatatcttcaaaaacttctggacaaaaaaggtatcaaccccactgtcctccaagctgtgatcacaattgtctccaaaagggactctacctccatagcccaccccaatttcctttcaatggcttcaaggccttcaagagtgcactgatgagttcctactggtgctcagggaaaggggatgtgatcgatgactggtgcaggtgtgacctcagcgcctttgatgccaatgggctccccaactgcagcccccttctgcagccggtgctgcggctgtccccaacagtggagccctccagtactgtggtctccttggagtgggtggatgttcagccagctattgggaccaaggtctccgactatattctgcagcataagaaagtggatgaatacacagacactgacctgtacacagtgggcaaggtgaaccccctgggcagttacaaattcaggggcttgtccaggattgcccttgtggctacctgctcatggttcagtgcccccccacgctccagcaatggatccagaggccagcccaagtggctgcctagttcttttggactggggctgactctggtactctattggtgggaacacagtgcaatcaaacttgaactcaggattaagaaactcactcaaaaccgctcaactacatggaaactgaacaacctgctcctgaatgactactgggtacataacgaaatgaaggcagaaataaagatgttctttgaaaccaatgagaacaaagacacaacataccagaatctctgggacacattcaaagcagtgtgtagagggaaatttatagcaataaatgcccataagagaaagcaggaaagatctaaaattgacaccctaacatcacaattaaaagaactaaaaaagcaagagcaaacacattcaaaagctagcagaaggcaagaaataactaaaatcagagcagaagtgaaggaaatagagacacaaaaaacccttcaaaaaattaatgaatccaggagctggttttttgaaaggatcaacaaaattgatagaccactagcaagactcataaagaagaaaagagagaagaatcaaatagacgcaataaaaaatgataaaggggatatcaccaccgatcccacggaaatacaaactaccatcagagaatactacaaacacctctacgcaaataaactagaaaatctagaagaaatggataaattcctggacacatacaccatcccaagactaaaccaggaagaagttgaatctctgaatagaccaataacaggatctgaaattgtggcaataatcaatagcttaccaaccaaaaagagtccaggaccagatggattcacagccgaattctaccaggggtacaaggaggaactggtatcattccttctgaaactattccaatcaacagaaaaagagggaatcctccctaactcattttatgaggccagcatcatcctgataccaaagccgggcagagacacaaccaaaaaggagaattttagatcaatatccttgataaacattgatgcaaaaatcctcaataaaatactggcaaaccgaatccagcagcacatcaaaaagcgtatccaccatgatcaagtgggcttcatccctgggatgcaaggctggttcaatatatgcaaatcaataaatgcaatccagcatataaacagaaccaaagacaaaaatcacatgattatctcaatagatgcagaaaaggcctttgacaaaattcaacaaccttcatgctaa

SEQ ID NO: 131476 - DNA, 1878 bp, Homo sapiens; identical to SEQ ID NO: 118975

SEQ ID NO: 131477 - DNA, 1614 bp, Homo sapiens; identical to SEQ ID NO: 126815

SEQ ID NO: 131478 - DNA, 4542 bp, Homo sapiens; identical to SEQ ID NO: 126825

SEQ ID NO: 131479 - DNA, 6294 bp, Homo sapiens
atggcgcgatctcggctcaccgcaacctccgcctcccgggttcaagcgattcttctgcctcatcctcccaacccggtgtcgttccccgcggtaggtggtccccgacgagctgcagccatgggaaacaccaccagcgaccgggtgtccggggagcgccacggcgccaaggctgcacgctccgagggcgcaggcggccatgccccggggaaggagcacaagatcatggtggggagtacggacgaccccagcgtgttcagcctccctgactccaaggtggaagagccaatgattccacgacttgtttactcctcagtagtacttcaaaatgttgcgtggctaaaaaaacgacaacccacagctgccctgaagaccttgctctcaattccaaggactttcaggaagagaacaacttgttttcactctctccctggggacaaagagtttgtatcatggcagcaggatttggaggactccgtaaagcccacacagcaggcccggcccactgttatccgctggtctgaaggaggcaaggaggtcttcatctctgggtccttcaacaattggagcaccaagattccactgattaagaggattaagaaacccactcaaaaccgctcaactacatggaaactgaacaacctgctcctgaatgactactgggtacttaacaaaatgaaggcagaaataaagatgttctttgaaaccaacgagaacaaagacacaacataccagaatctctgggacacattcaaagcagtgtgtagagggaaatttatagcactaaatgcccacaagagaaagcaggaaagatccaaaattgacaccctaacatcacaattaaaagaactagaaaagcaagagcaaacacattcaaaagctagcagaaggcaagaaataactaaaatcagagcagaactgaaggaaattgagacacaaaaaacccttcaaaaaattaatgaatccaggagctggttttttgaaaagatcaacaaaatcgatagactgctagcaagactagtaaagaagaaaagagagaggaatcaaatagatgcaataaaaaatgataaaggggatatcaccaccaatcccacagaaatacaaactaccatcagagaatactacaaacacctctatgcaaataaactagaaaatctagaagaaatggataaattcctcaacacatacaccctcccaagactaaaccaggaagaagttgaatctctgaatagaccaataacaggatctgaaattgtggcaataatcaatagcttaccaaccaaaaaaagtccaggaccagatggattcacagccgaattctaccagaggtacaaggaggaactgcatataaacagagccaaagacaaaaaccacatgattatctcaatagatgcagaaaaagcctttgacaaaattcaacaacccttcatgctaaaaactctcaataaattaggtattgatgggacgtatctcaaaataataagagctatctatgacaaacccacagccaatatcatactgaatgggcaaaaactggaagtattccctttgaaaactggcacaagacagggatgtcctctctcaccactgctattcaacatagtgttggaagttctggccagggcaattaggcaggagaaggaaataaagggtattcaattaggaaaagaggaagtcaaattgtccctgtttgcacatgacatgattgtatatctagaaaaccccattgtctcagcccaaaatctccttaagctgataagcaacttcagcaaagtcttaggatacaaaatcaatgtacaaaaatcacaagcattcttatacaccaataacagacaaacagagacccaaatcatgagtgaactcccattcacaattgcttcaaagagaataaaatacctaggaatccaacttacaagggatgtgaaggacctcttcaaggagaactacaaaccattgctcaaggaaataaaagaggatacaaacaaatggaagaacattccatgctcatgggtaggaagaatcaatatcgtgaaaatggccatactgcccaaggtaatttatagattcaatgtcatccccatcaagctaccaatggctttcttcacagaattgggaaaaactactttaaagttcacatggaaccaaaaaagagcctgcattgccaagtcaatcttaagcaaaaagaacaaagccagaggcgtcacgctacctgacttcaaactatactacaaggctacagtaaccaaaacagaatggtactggtaccaaaacagacatatagatcaatggaacagaacagagccctcagaaataatgccgcatatctacaaccatctgatctttgacaaacctgagaaaaacaagaaatggggaaaggattccctatttaataaatggtgctgggaaaactggctagccatatgtacaaagctgaaactggatcccttccttacaccttatacaaaagttaactcaagatggattaaagacttacatgttagacctaaaaccataaaaaacctagaagaaaacctaggcaataccattcaggacataggcatgggcaaggacttcatgtctaaaacaccaaaagccatggcaacaaaagccaaaattgacaaatgggatttaattaagctaaagagcttctgcacagcaaaagaaactaccatcagagtgaacaggaaacctacagaatgggagaaaatttttgcaaactactcatctgacaaagggctaatatccagaatctacaatgaactcaaacaaatttacaagaaaaaaacaaccccatcaaaaagcgtcagagccagcgtcccgggaaacgcccgggtccgcgacttcccaaaggaagcagaacgccccgtggactctagtgatggctctttccgttcttggctccgccttcacccgactttctacgccgcttgggctcccctagctcaactcggcttcggtcgagcaaggtcaagcatcaccgcttgccttgtggcccgccgtgatcgtatagtggttagtactctgcgttgtggccgcagcaacctcggttcgaatccgagtcacggcaaagttgctcgtctgggtagtcagctgatccgttttgctccccgcaaccaggcgcgtcaggatcagcccttaattcaaataagagcagttggaacgacaaaaggtgttcagttgtacccttggaatccacagaaatcctgggtagggaagctcgagtaccaccaactggaaagacagggatgcctagtagctgattcggggcccattgtcgtaggctttgtccactttgcaaactggagacagggactcgactcaccttctccagccactggaggaccgggaggaccttcagaggaggtgaggtcgacttcatggaggggcgagaggatcctcggtgagcgaacccagccttctacctggctggccctggtcaacaggctcagaagaggccgatttggaggacagaacagaaggaaagacctaaaggtagaaactcatgatgtcgagatgttaaaagcctcaaatcctaagtcagcggaggcgagggatgcggctaaacaccttacaatccaccgaagggcccctcccccaccccgtaatacccattccgcggaggtggagaaactcgcgtgtagatcaatgcccacgcacttggccgatgggaaatcacgaattggtgaccagttcgatcttggccctgaggaaaaaactcaaacgtcagcgggaacccttggagctttgcccagagcatacggaagggtggcgttgcagtatagcctaagatgggaaaatggcagtgcgcggctctggcccggtgacccgctactgtctctccatgcgctgccgcttcacaaaggcgcatctctaggtcggtggtcaggttctgcccggacgctgcaactggctccgggacttgtgtccttgaatttagcgctttcaccgccgcagctcgggttggattaccagtcagggaattgttttgcactgactgccttcccgcaggaatcttcctttacgcccgctagatgccagccctcctggaactgcacccaagaagcccaccgtctttgccgcctctgccgtcccggaggcgccgatcgggctgagctgcgaataactaagagagaggccaaggcaagtcgtggcgtttgtgcgtgccacaaattatcagctgacaggggacggtcagtggagcctcctcacctccgttcgcgggtaacgtgcttcttaggccttcagaagaagcgactggaggcgatgcccgcgaggttggaagtgggactgagcggtaaagggaggcgatgtttgctgacccaacaaagacagcacgtggagcaggcacaaatggaaaactgtggccgctctcgaacagacagatgtgagctctctgtcttttacacgctgaatttggctattggcaaaaaagccctgacccagagcttgggtctccttccgacctgcacacgactccccgactcccgcctccaagcgcggctcttggctcgctggcgggcagcgtccacagagtgtggaaccgccgcagccgcagctcccgcccgctggcgggcagacactagcaggagaaaggacacaaggcctgcgtggtgggaaagcatgggagacctcgctttcccaccggacgagaaggtctccctgcagtctttggacaccagatggatggaggcaccccttctaggaacaaggcggctgctcctgaggcctggcttcgcacagtggctcctgggtcccgcgcgccctctcccttcccgcggtagcaagagctgctttacacatctcagccggcttcctctttctccccagctgtccttgggacagcaaggcccccagccccgggtccagggggctggttcagggcccaggactcctcgctcctcctggagggcctgggtcgcgtggcctaggagctggccacatgggcatctccagcactgctcctcagggaacgggaggcattatcctgcaggacccactcttacccatgagagacaccgggaaatgctcctgcggaagctggagctctgcgcgcttgaccacttcggggtgaagcttccgtccgcccatccttccttcgaggggccttggggagaggagaaatgctccaggacgatgccctttgcagtgtctcaaccgagaccagaggaaaggaggtcttacaggagcacctttcactcattagaggaacagcaagttggcttggctcttgacataggtagtgagtactccattgtgaaggtgataaagctccagttagcatcccaggccagtgtcacccttgtctacctctcagtggaagatgtgacccaggtttcactgaatttatctccattttctgtgtcttctaagttggcttgttttagctcatctgtccatcatcttgctggacctcagtgtgatcaagtgaaaaaggacgatcgagaggcaacatgtcccagtttttcctacttcttcaagctcagcagggagctgttggaagtggaagagcctgaagtcttgcaggactcactggatagatattattcgactcctaccagttatcttgaactgcctgactcatgccagccctacagaagtacttttactcattggaggaacagcatgttggcttggctcttgatggggacagattggacagtggattgttgcatgaataggggaatagacttaatgtgtctgtccctgtctgactttgttgcagacattgaaaaaaatcaagaagaagaagaagaccaagacccacaatgccccaggctgagcccggatctgccagaggtggaggaacaggacgtcccacaggactccctggatgaagtttacttgactccttcactcccccatgacctgtctgactgccagcaaccttacaacagcacgttgtactcattggaggatcagctcacctgctttgctctcgatgtagcctgtgctggcctaactgatgaagaaagcacagtggttctcatccccatgatctccagcaaacccctccttctcttgtcccacctgatgagaaacgcccacaggtgtggaggggcaggccaccccttcaagtctgatacactgtgctctcaggaagatgaagaacagatacacggaaggcattttaaggaaaacttagagaaaccttgctcccacccaggtggcctgtcctcacgggccttggagtggagacttgagccaccacctgtcagaggtggaggcttcacaggcacagctggagccaagaaccctggtgcccagttgtctgtgactgcaactggatcaagggtttga

SEQ ID NO: 131480 - DNA, 1915 bp, Homo sapiens
atcactgaccttcagtccagcaatttccagtgtcctgcaggctgctgatcccaagatgctcagccacacaaaggtgttgcggccaacctccgctggtgatacccaggcaaacagggttggagtggacctccagcaaactccaacagacctgcagctgagggtcctcactgttagaaagaaaactaacaaacagaaaggacatccacaccaaaaccccatctgtacgtcaccatcatcaaagaccaaagacagatccacgagacagaaagttaacaaggatatccaggacttgaactcagctctgcacaaagcggacctaatagacatctacagaactctccaccccaaatcaacagaatatacattcttcttagcaccacatcacacttattccaaaattgaccacatagttagaagtaaagcactcctcagcaaatgtaaaagcatagaaattataacaaactgtctctcagaccacagtgcaatcaaactacaactcaggattaagaaactcactcaaaaccactcaactacatggaaactggacaacctgctcctgaatgactactgggtacataacgaaatgaaggcagaaataaagatgttctttgaaaccaatgagaacaaagacacaacataccagaatctctgggacacatttaaagcagtgtgtagagggaaatttatagcactaaatgcccacaagagaaagcaggaaagatctaaaatgggtaccctaacatcacaattaaaagaactagagaagcaagagcaaacatattcaaaagctagcagaaggcaagaaataactaagatcagagcagaactgaaggagatagagacacaaaaaacccttcaaaaaaaaatcaatgactccaggagctggtttttggaaaagatcaacaaaattgataaaccgctagcaagactaataaagaagaaaggagagaagaatcaaatagatgcaataaaaaatgataaaggggatctcaccaccgatcccacagaaatacaaactaccatcagagaatactataaacacctctatgcaaataaactagaaaatctagaagaaatggataaattcctgcacccacacaccctctcaagactaaaccaggaagaagttgaatctctgaatagaccaataacaggctctgaaattgaagcaataattaatagcctaccaaccaaaaaatgtccaggaccagacggattcacagccgaattctaccacagcatcatcctgacaccaaagcctggcagagacacaacaaaaaaagagaattttagaccaatatccctgatgaacatcgatgcaaaaatcctcaataaaatactggcaaacggaatccagcagcacatcaaaaagcttatccaccatgatcaagtgggcttcatccctgggatgcaaggctggttcaacatacgcaaatcaacaaatgtaatccatcatataaacagaaccaaagacaaaaaccacatgattatctcaatagatgcagaaaaggcctttgacaaaattcaacagcccttcatgctaaaaactctcaataaactaggtattgatgggacgtatctcaaaataacaagagctatttatgacaaacccacaggcaatatcatatggaatgggcaaaaactggaagtattccctttgaaaactgccacaacacagggatgccctttctcaccactcctattcaacatagtgttggaagttctggccacggcaatcaggcaggagaaagaaataaaggttattcaattaggaaaagaggaagtcaaattgtccctgtttgcagatgacatgattgtatatttagaaaactccatcgtctcaatccaaaatcttcttaagttgataagcaacttcagcaaagtctcaggacacaaaatcaatgtgcaaaaataa

SEQ ID NO: 131481 - DNA, 1029 bp, Homo sapiens
atgcctaatgcctatctaattggccatattgctggctggatttcagatgtgctttatacttctcttagaacagggatcctcaactccggctgcactttagagtcacctgcagaacttctgaaacataccaatgttgggccaccaacaccaaagagacggaaggttaacaaggatatccagggcctgaactcagctctgcaacaagcagacctaacagaaatctacagaactctccaccccaaatcaacagaatatacattcttctcagcaccacatcgcacttattctaaaattgaccacataattgaaagtaaagcactcctcagcaaaggtaaaagaccagaaatcacaacaaactgtctctcagaccacagtgcaatcaaattagaactcaggattaagaaactcactcaaaaccacacaactacatggaaactgaacaacctgctcctgaatgactactgggtaaataaggaaatgaaggcagaaataaagatgttctttgaaaccaatgagaacaaagacacaatgtaccagaatctctgggacacatttaaagcagtgtgtagagggaaatttatagcactaaatgcccacaagagaaagcaggaaagatctaaaatggacatcctaacatcacaattaaaagaactagagaagcaagagcaaacaaatgcaaaagctagcagaaggcaagaaataactaagatcagagcagaagtgaaagagatagagacacacaaaaaaaaaaccttcaaaaaaatcaatgaatccaggagctggatttttgaaaaaatcaacaaaattgatagaccgctagcaagactaataaagaagaaaagagagaagaatcaaatagatgcaataaaaaatgataaaggggatatcaccacccatcccacagaaatacaaactaccatcagagaatactataaaatatatataaaatacctctatgcaaataaactagaaaatctagaagaaatggataatttcctggacacatacaggttcccagaactaaactag

SEQ ID NO: 131482 - DNA, 2115 bp, Homo sapiens; identical to SEQ ID NO: 123077

SEQ ID NO: 131483 - DNA, 1884 bp, Homo sapiens
atggagaatggctttgacgagttgagagaagaaggcttcagacgatcaaactactccgagctacaggaggaaattcaaaccaaaggcaaagaagttaaaaacattgaaaaaaatttagatgaatgtataactagaatacccaatacagagaagtgcttaaagaagctgatggagctgaaaaccaaggctcgagaactacgtgaagaatgcataagcctcaggagccgatgcgaccaactggaagaaagcgtatcagtgatggaagatgaaatgcatgaaatgaagcgagaagggaagtttagagaaaaaagaataaaaagaaatgaacaaagcctccaagaaatatgggactatgtgaaaagaccaaatctacgtctgattggtgtacctgaagacagatcaatgagacagaaagttaacaaggatacccaggaattgaactcagctctgcaccaagcggacctaatagacatctacagaactctccaccccaaatcaacagaatatacatttttttcagcaccacaccacacctattccaaaattgaccacatagttggaagtaaagctctcctcagcaaatgtaaaagaacagaaattataacaaactatctctcagaccacagtgcaatcaaactagaactcaagattaagaagctcactcaaaacttctcaactacatggaaactgaacaacctgctcctgaatgactactgggtacataacaaaatgaaggcagaaataaagatgttctttgaaaccaacgagaacaaagacacaacttaccagaatctctgggacacattcaaagcagtgtgtagagggaaatttatagcactaaatgcctacaagagaaagcaggaaagatccaaaattgacaccctaacatcacaattaaaagaactagaaaagcaagagcaaacacattcaaaagctagcagaaggcaagaaataactaaaatcagagcagaactgaaggaaatagagacacaaaaaacccttcaaaaaattaatgaatccaggagctggttttttgaaaggatcaacaaaattgatagaccgctagcaagactaataaagaaaaaaagagagaagaatcaaatagacgcaataaaaaatgacaaaggggatatcaccaccgatcccacagaaatacaaactaccatcagagaatactacaaacacctctacacaaataaactagaaaatctagaagaaatggataaattcctcgacacatacaccctcccaagactaaaccaggaagaagtggaatctctgaatagaccaataacaggatctgaaattgtggcaataatccatagcttaccaaccaaaaagagtccaggaccagatggattcacagcccaattctaccagaggtacaaggaggaactgagaataaaatacctaggaatccaacttacaagggatgtgaaggacctcttcaaggagaactacaaaccactgctcaaggaaataaaagaggagacaaacaaatggaagaacattccatgctcatgggtaggaagaatcaatatcgtgaaaatggccatactgcccaaggtaatttacagattcaatgccatccccatcaagctaccaatgactttcttcacagaattggaaaaaactactttaaagttcatatggaaccaaaaaagagcccgcatcgccaagtcaatcctaagccaaaagaacaaagctggaggcatcacgctacctgatttcaaattatactacaaggctacagtaaccaaaacagcatggtactggtaccaaaacagagatatagatcaatggaacagaacagagccctcagaaataacgccacatatctacaactatctgatctttgacaaacctgagaaaaacaagcaatag

SEQ ID NO: 131484 - DNA, 1698 bp, Homo sapiens
atgaggaacagtagggagaggtctgaagagaaccaaccagcagcatcacagaagtctaaggagcagaaagttcgagagtgtcaaagttggcagggattaaaagaactgaagaagtcctgctattgcgtaagatgtcagccacagctcccagagagctgcagagccaaccagcaggcaagttttaattccccggccgaagagatttcgacctgcagggcactggtgacaatggatgaacagaggcaggatggctcctggaacaatgcgaccggcacccaagtgttctgcatcttggtaaacaacaccgccagctacccggacactcaacccaaaaccttgcccccgtctgcatttctgtcacatcccacggtccgttcttcagaaaattctgtgttctaccttcaaatacagccaaatccaaccacttctcaccatgtcttctctatcatcctcattgagacaccaccagctctcacttgctcattgcatgagcctcccctacttctgctcctccaaacccaccctccagaatattccacaaagcagccagagcatccatttaaaacacccatcagacacgttgactgccacatcccagccccagttcagcacggctggggaggactcaaggaacttatgatcatagtggaaggggaagcaaacacatccttcttcacatggcagcaacaaggagaagtgcagcacgaagagggagagaagccccttataaaagcatcagatctcaagagaactcactatcacaagaaaagcatggagaacaatgaaattgaccaaatagcaacggggggaaagagtcctgggatccgaataagccacaaactggatattgggctctggatcctggagagctaccctctggccagaaaccaaaatgggcttggctcattcctggtaaatattccaaccacactaggtgccgagcacctgagagagcaaggggaagggagccaggccccaggcctgccaccggtcactgggccggggacccaactggacagcagcttcccagaggcagcgcctcccaacgccccctcctccggtggctccacctccgcaacagaccgggttccgggcatccctgtgagctcgggcctgtccaaccacaccagtgcttcaggcgaccagattaagaaactcactcaaaaccacacaactacatggaaactgaacaacctgctcttgaatgactactggctacataacaaaatgaaagcagaaataaagatgttctttgaaaccaatgagaacaaagacacaaggtaccagaatctctgggacacatttaaagcagagtgtagagggaaatttatagcactaaatgcccacaagagaaagcaggaaagatctaaaatcgacaccctaacatcacaattaaaagaactagagaagcaagagcaaacacattcaaaagctagcagaaggcaagaaataactaagatcagggcagaactgaaagagattacagacacaaagaaacccttcaaaaaaatcaatgaatccaagaactggttttttgaaacgatcaacaaaattgatagagcactagcaagattaataaagaagaaaagagagaagaatcaaacagacacaataaaaaatgataaagggaatatcaccaccgatcccacggaaatacaaactatcatcagagaatactataaacacttctatgcataa

SEQ ID NO: 131485 - DNA, 3779 bp, Homo sapiens
atggagctgaaaaccaaggctcgagaactacgtgaagaatgcagaagcctcaggagccgacgcaatcaactggaagaaagggtatcagcaatggaagatgaaatgaatgaaatgaagcgagaagggaagtttagagaaaaaagaataaaaagaaatgagcaaagcctccaagaaatatgggactatgtgaaaagaccaaatctacgtctgattggtgtacctgaaagtgatgcggagaatggaaccaagttggaaaacactctgcaggatattatccaggaggacttccccaatctagcaaggcaggccaacgttcagattcaggaaatacagagaacgccacaaagatactcctcgagaagagcaactccaagacacataattgtcagattcaccaaagttgaaatgaagcaaaaaatgttaagggcagccagagagaaagactttaaaccaacaaagatcaaaagagacaaagaaggccattacataatggtaaagggatcaattcaacaagaggagctaactatcctaaatatatatgcacccaatacaggagcacccagattcataaagcaagtcctgagtgacctacaaagagacttagactcccacacattaataatgggagactttaacaccccactgtcaacattagacagatcaacaagacagaaagtcaacaaggatacccaggaattgaactcagctctgcaccaagcagacctaatagacatctacagaactctccaccccaaatcaacagaatatacatttttttcagcaccacaccacacctattccaaaattgaccacatagttggaagtaaagctctcctcagcaaatgtaaaagaacacaaattataacaaactatctctcagaccacagtgcaatcaaactagaactcaggattaagaatctcactcaaagccgctcaactacatggaaactgaacaacaacatgctcctgaatgactactgggtacataacaaaatgaaggcagaaataaagatgttctttgaaaccaaaagagaacaaaggacacaacataccagaatctctgggacgcattcaaagcagtgtgtagagggaaatttatagcactaaatgcgcacaagagaaagcaggaaagatctaaaattgacaccctaacatcacaattaaaagaactagaaaagcaagagcaaacaaacacattcaaaagctagcagaaggcaagaaataactaaaatcagagcagaactgaaggaaatagagacacaaaaaacccttcaaaaaaattaatgaatccaggagctggttttttgaaaggatcaacaaaattgatagaccactagcaagactaataaagaagaaaagagagaagaatcaaatagacacaataaaaaatgataaaggggatatcaccaccgatcccacagaaatacaaactaccatcagagaatactataaacacctctacgcaaataaactagaaaatctagaagaaatggataaattcctcgacacatacaccctcccaagactaaaccaggaagaagttgaatctctgaatagaccaataacagactctgaaattgaggcaataattaatagcttaccaaccaaaaaaagtccaggactagacggattcacagccgaattgtaccagaggtacaagggaggagctggtaccattccttctgaaactattccaatcaatagaaaaagagagaatcctccctaactcatttcatgaggccagcatcatcctgataccaaagcctggcagagacacagcaaaaaaaagagaattttagaccaatatccctgatgaacattgatgcaaaaaatcctcaataaaatactggcaaaccgaatccagcagcacatcaaaaagcttatccaccatgatcaagtgggcttcatccctgggatgcaaggctggttcaatatacgcaaatcaataaatgtaatccagcatataaccagaaccaaagacaaaaaccacatgattatctcaatagatgcagaaaaggcctttgacaaaattcaacaacccttcatgctaaaaactctcaataaattaggtattgatgggacgtatctcaaaatcataagagctatctatgacaaacccacagccaatagcatactgaatgggcaaaaactggaagcattccctttgaaaactggcacaagacagggatgccctctctcaccactcctattcaacatagtgttggaagttctggccagggcaatgaggcaggagaaggaaataaagggtattcagctaggaaaagaggaagtcaaattgtccctgtttgcagatgacatgattgtatatctagaaaaccccattgtctcagcccaaaatctccttaagctgataagcaacttcagcaaagtctcaggatacaaaatcaatgtacaaaaatcacaagcattcttatacaccaacaacagacaaacagagagccaaatcatgagtgaactcccattcacaattgcttcaaagagaataaaatacctaagaatccaacttacaagggatgtgaaagacctcttcaaggagaactacaaaccactggtcaaggaaataaaagaggatacaaacaaatggaagaacattccatgctcatgggtaggaagaatcagtattgtgaaaatggccataccgcccaaggtaatttacagattcaatgccatccccatcaagctaccaatgactttctttacagaattggaaaaaactactttaaagttcatatggaaccaaaaaagagcccgcatcgccaagtcaatcctaagccaaaagaacaaagctggaggcatcacgctacctgacttcaaactatactataaggctacagtaaccaaaacagcatggtactggtaccaaaacagagatatagatcaatggaacagaacagagccctcagaaataacgccgcatatctacaactatctgatctttgacaaacctgagaaaaacaagcaatggggaaaggattccctatttaataaatggtgctgggaaaactggctagccatatgtagaaagctgaaactggatcccttccttacaccttatacaaaaatcaattcaagatggattaaagacttaaacattagacctaaaaccacaaaaaccctagaagaaaacctaggcattaccattcaggacataggcatgggcaaggactttatgtccaaaacaccaaaagcaatggcaacaaaagccaaaattgacaaatgggatctaattaaactaaagagcttctgcacagcaaaagaaactaccatcagagtgaacaggcaacctacaaaatgggagaaaattttcgcaacctactcatctgataaagggctaatatccagaatctacaatgaactcaaacaaatttacaagaaaaaaacaaacaaccccatcaaaaagtgggcgaaggacatgaacagacacttctcaaaagaagacatttatgcagccaaaaaacacatgaaaaaatgctcatcatcactggccatcagagaaatgcaaatgaaaaccactatgagatatcatctcacaccagttagaatggcaatcattaaaaagtcaggaaacaacagtcaggtggaacattcaggaggccctgagctaaacattgccagcagcaaggtcacaactgccagaacagccaaggccactcctgctcagcacagagaaggcagccaagcagatttcttggagcagctgccaagagagtctgcccagtgtgatggagaaagagccccacgtgtggagcacctgccag

SEQ ID NO: 131486 - DNA, 738 bp, Homo sapiens
atgagagggagggatgagcttatagaacacacacagctggacgtggtggttttgcaatggggcatgagaaatgagggaataatcaagagtgagccccaggcatctagtacgggacaattccttcggcgaggggaggtgttttgggatgacttgaactgcaccgtcaagtgccgctgtctggatttcaacaatgagatctactgccaggaggcttcctgtagcccctacgaggtgtgcgaacccaaaggcaaattcttctactgcagcgctgtggagaccagcacatgcgtggtgtttggggagccacactaccacacttttgacggcttcctcttccacttccaaggctcctgtgcctacttgctggcccgacagtgtttgcagacttccagcctccctttcttcagtgtggaggccaagaatgaacaccgcagaggttcagccgtctcctgggtgaaggagctctcagtggaggtgaatggctacaagattctcatccccaaaggaagctatggaagagtcaagagctgctgcttcattttcagagaaacctccaaatggattgatgtctccagaggtaccacctgtgcaggcacctggattggctttggtgacttccttagtgaggcttgggtgggaaagtcccatgaaagctctgcccagacacccctcgaatacagtccccaactcccacctagaataacagagaagaacatgggcatctgctggccagtttag

SEQ ID NO: 131487 - DNA, 2544 bp, Homo sapiens
atgcagatatttggggaagacaagtgggaaacatctatggcttcagggtctcacaaggccaaaatcaatgtgtctgcagggctgttttctatatcagaggctctggaggagaatctctttgcaggtacagtcagaatggtggcagaattctcttctttcttatacttttcatgtgtgccatcttcaaaccagcaatggtatcatgaactgatcactaaatatgggaagttggagcctttggcagaagtggacctaagaccccagagcagtgcaaaagtagaagtccactttaacgatcaggtggaagaaatgagcattcgtctggaccaaacagtggcagaactaaagaaacagttaaaaactctagtacaattacccacaagcaacatgcttctctactattttgaccatgaagcaccctttggcccagaggaaatgaaatttttggaagtaggaaaaaagtatggcaacagtgtcatgaagattgaaactgtcagtaaaattgtgtcaaatgttcctcagttggagtttctaaacctgagttccaaccctctgaatttgtcggttttagaaagaacatgtgctgggtccttctctggggttcgcaaacttgtcctcaacaacagcaaagcttcttgggagacggtccacatgatactacaggagttaccagatttggaggagctcttcctgtgccttaatgactatgaaacagtgtcttgtccttctatttgctgtcattctcttaagctactacatataacagacaataacctccaagactggactgaaatacgaaagttaggagttatgtttccttcactggataccctcgtcctggccaacaatcatttgaatgctattgaggagcctgatgattcattggccaggttgtttcctaatcttcgatccatcagcctccacaagtcaggtttgcagtcctgggaagacattgataaactaaattcatttcccaaactggaagaagtgagattgttaggaattcctcttctgcagccatataccaccgaggagcgaaggaaattggtaatagccagattgccatcagtttccaaacttaatggcagcgttgttactgatggtgaacgagaagattctgagagattttttattcgttactatgtggatgttccacaggaagaagtgccattcagactgggagatgcgccacttagacccccgtacaacagagatgtgagaagcacagttggccaacagcctccagccctcagtgccttcaggctcagccccagtgctgaaacccaggacacactcttcatggggcagccctccgccaatgaccgggcaaggtgctccagaaggtggaagataaatcctacaaagattcagggatgctatttcagtaaagttgtaaggaatccagtggccaggaacatgctgggacaactcctccaaaggaaaaggcaaattgctgcatcttgtagcctgtctacaaagaaattctttgttctttgtcagcttcttcgggttctgcaggctacattttccaaactcagagaaattgcctcagtactgctcactctttgggtccacactgcttttatgagctgtaacactcaccgcgaaggtctgcagcttcactccggagccagcgagaccactaacccaccagaaggaagaaactccggacgcatccgaacatcagaaggaagaaactccagacgcgccaccttaagagctgtagcattcaccgcgagggtccgcggcttcattcttgaagtcagacaattccttcggcgaggggaggtgttttgggatgacttgaactgcaccgtcaagtgccgctgtctggatttcaacaatgagatctactgccaggaggcttcctgtagcccctacgaggtgtgcgaacccaaaggcaaattcttctactgcagcgctgtggagaccagcacatgcgtggtgtttggggagccacactaccacacttttgacggcttcctcttccacttccaaggctcctgtgcctacttgctggcccgacagtgtttgcagacttccagcctccctttcttcagtgtggaggccaagaatgaacaccgcagaggttcagccgtctcctgggtgaaggagctctcagtggaggtgaatggctacaagattctcatccccaaaggaagctatggaagagtcaaggttgaggacagggtcagaggaatgaagcaaggaattacatttggggacaagagttctctgggatctcctgctctaagcactgtgggacacaagcacaatgactctatagggagagtgaaagggggtgcaatgatcacttatgccagaaaaaaaaaggtatcaactggaacattactgacacccacagtcacccaggtgtcaggtcagcctgagtgcgacaagaacagaggcagggaaactggcgtcctgagggttgtgatgttcttctctggaaaagaagttcctgtttggtctttacaacaaccctacgaggtcgacactcttatctccattttcttactagtgaggaagttgatgcacagatag

SEQ ID NO: 131488 - DNA, 1464 bp, Homo sapiens
atggctaatccaaggctagagcagagaaagtacaagatgagcccggagtacatcgtgcctcgtggaaagcaacgaatgatgaagcaaatgtcaacagaaaccattgctggaggggactcccactggccgtatatggaacaatttgagcataaaacaaattatgataacagatacaatcggtatcatgaactgatcactaaatatgggaagttggagcctttggcagaagtggacctaagaccccagagcagtgcaaaagtagaagtccactttaacgatcaggtggaagaaatgagcattcgtctggaccaaacagtggcagaactaaagaaacagttaaaaactctagtacaattacccacaagcaacatgcttctctactattttgaccatgaagcaccctttggcccagaggaaatgaaccagattctcaaagacattctaattcatgtatgccgccatcttgtgtatctggttatgcccagacggcatttataccagcagcagtcttgcctcgagaaggatggagcatcaaattgtgtgctggtgctttgcacctgcagcaccttcgtgggcacagtctctttagactcctgtcaggcccagcatgtctctggctgggttatgtggcagcttagcccagattataggcctggcattcaggagagaagggttcttacgtggattaaatggtataatggaagtaaagcatttagcccaatgcctggcacagaggggaaatgctcagtaaatgttggctctaatgtcattattccccaggacaattccttcggcgaggggagcgctgtggagaccagcacatgcgtggtgtttggggagccacactaccacacttttgacggcttcctcttccacttccaaggctcctgtgcctacttgctggcccgacagtgtttgcagacttccagcctccctttcttcagtgtggaggccaagaatgaacaccgcagaggttcagccgtctcctgggtgaaggagctctcagtggaggtgaatggctacaagattctcatccccaaaggaagctatggaagagtcaaggtcaataacaacggagttgtttccttcaatgtgctagtgagccagttcacgccagaatcctttcccctgacagatgggagagccttcgtcgccccattttgggcagatgtgcacaatggaattcgaggcgagatctattacagagagaccatggagcctgccatcttgaaaagagccaccaaggacatcaggaagtacttcaaagacatggcaaccttctctgccacttgggttttcattgtgacatgggaggaagtcacgttttatggaggcagcagcaccacacctgtaataattcaaattttctgctttccacttcataacctgacatctaattcttgtccatcttcgctaccacgaaggagtctaattattagagctaaggagtgtcagttcccttga

SEQ ID NO: 131489 - DNA, 429 bp, Homo sapiens
  misc_feature (1)...(429): n = a,t,c or g
cgccgcttgtgctgcagccatgtctctagtgatccctgaaaagttccagcatattttgcgagtactcaacaccaacatcgatgggcggcggaaaatagcctttgccatcactgccnnnnnnnnnnnnnnnnnnnnnnnnnnnnnnnnnnnnnnnnnnnnnnnnnnnnnnnnnnnnnnnnnnnnnnnnnnnnnnnnnnnnnnnnnnnnnnnnnnnnnnnnnnnnnnnnnnnnnnnnnnnnnnnnngttaaccttctgtcgaacggtttatatctggaaagggtgtgggccgaagatatgctcatgtggtgttgaggaaagcagacattgacctcaccaagagggcgggagaactcactgaggatgaggtggaacgtgtgatcaccattatgcagaatccacgccagtacaagatcccagactggttcttg

SEQ ID NO: 131490 - DNA, 618 bp, Homo sapiens; identical to SEQ ID NO: 125674

SEQ ID NO: 131491 - DNA, 643 bp, Homo sapiens
attgcaccgcctgcaggaattcggcacgagccgccgcttgtgctgcagccatgtctctagtgatccctgaaaagttccagcatattttgcgagtactcaacaccaacatcgattgggcggcggaaaatagcctttcgccatcactgccattaagggtgtgggccgaagatatgctcatgtggtgttgaggaaagcagacattgacctcaccagagagggcgggagaactcactgaggatgaggtggaacgtgtgatcaccattatgcagaatccacgccagtacaagatcccagactggttcttgaacagacagaaggatgtaaaggatggaaaatacagccaggtcctagccaattggtctggacaacaatgctccgtgaagacctgggagccgactgaagaagattcgggcccatagagggctggcgtcacttactggggcccttcgtgtccgaaagccagcacaaccaagaaccactgggccgcckgtgggccggcaccgtcgggtgtgtccaaggaggaaataaggtctgtagggcttgtcttgttaataaataggtttatataccaaaaaaaaaaaaaaaaaaaaaaaaagtcgacgcggccgcgaatttagtagtagtagtagtagtaggcggccgc

SEQ ID NO: 131492 - DNA, 406 bp, Homo sapiens
tttttttttttttttttacagaaagtgggtatttacttacacatcaaaacttttcaacaacatcgtttgtgggtgacatcagctgctttcttgtctctaagcagcatggctgcagttgggacatcctcctccctcagtgagaatagtggtcctggccacggcgggaagcagacattctaaggacctggggcacagacattccagaaggtaggcaccatttcagtgcccaggccttctctgtagttgctgggaggggtacggctgctgccctcctgcacgggagccatgtgcctcaggggcgtctcaagaatcggttctcgcagtgggggccctcccagccatcccgacacttgcagcggtagctcccattctgcaggacgcagctgccctcattcatgcacgggct

SEQ ID NO: 131493 - DNA, 3485 bp, Homo sapiens
gagtaaagccatcattaggaatttggactccagaagctatttgtctcatgaaaaaacttgtacagaacaaaataatcacagtgaaagtggtggacaagttggaaaacagttccctggtggagcttattgataaatccgagacgcctcatgtcagtgttagcaaagttctcctagatgcaggctttgctgtgggagaacagagtatggtgacagataaacccagtgacgtgaaagaaaccagtgttcccttgggtgtggaaggaaaagtaaatccattggagtggacatgggttgaacttggtgttgaccaaacagtagatgttgtggtctgtgtgatatatagtcctggagaattttattgccatgtgcttaaagaggatgctttaaagaaactcaatgatttgaacaagtcattagcagaacactgccagcagaagttacctaatggtttcaaggcagagataggacaaccttgttgtgctttttttgcagatatacagtctagaaacaaacattggtctgaagaagccataacaagattccagatgtgtgttgctgggataaaattgcaagccagagtggttgaagtcactgaaaatgggataggagttgaactcaccgatctctccacttgttatcccagaataattagtgatgttctgattgatgaacatctggttttaaaatctgcttcaccacataaagacttaccaaatgacagacttgttaataaacatgagcttcaagttcatgtacagggacttcaagctacctcttcagctgagcaatggaagacgatagaattgccagtggataaaactatacaagcaaatgtattagaaatcataagcccaaacttgttttatgctctaccaaaagggatgccagaaaatcaggaaaagctgtgcatgttgacagctgaattattagaatactgcaatgctccgaaaagtcgaccaccctatagaccaagaattggagacgcatgctgtgccaaatacacaagtgatgatttttggtatcgtgcagttgttctggggacatcagacactgatgtggaagtgctctatgcagactatggaaacattgaaaccctgcctctttgcagagtgcaaccaatcacctctagccacctggcgcttcctttccaaattattagatgttcacttgaagcccctggcttgcagatcactcccaactactttgtaggaagccagagggccctggtaaatctcatcttgtgccggatggagtgtgagagctgctggcaggaagtccatgtaagcaaagaaaccatcgggaagatttcagctgccagcaaaatgatgtggtgctcggctgcagtggacatcatgtttctgttagatgggtctaacagcgtcgggaaagggagctttgaaaggtccaagcactttgccatcacagtctgtgacggtctggacatcagccccgagagggtcagagtgggagcattccagttcagttccactcctcatctggaattccccttggattcattttcaacccaacaggaagtgaaggcaagaatcaagaggatggttttcaaaggagggcgcacggagacggaacttgctctgaaataccttctgcacagagggttgcctggaggcagaaatgcttctgtgccccagatcctcatcatcgtcactgatgggaagtcccagggggatgtggcactgccatccaagcagctgaaggaaaggggtgtcactgtgtttgctgtgggggtcaggtttcccaggtgggaggagctgcatgcactggccagcgagcctagagggcagcacgtgctgttggctgagcaggtggaggatgccaccaacggcctcttcagcaccctcagcagctcggccatctgctccagcgccacgccagctgggagccccgagcttgtcttcatggagcggttaatgggcatctctctgataggcccctgtgactcgcagccctgccagaatggaggcacatgtgttccagaaggactggacggctaccagtgcctctgcccgctggcctttggaggggaggctaactgtgccctgaagctgagcctggaatgcagggtcgacctcctcttcctgctggacagctctgcgggcaccactctggacggcttcctgcgggccaaagtcttcgtgaagcggtttgtgcgggccgtgctgagcgaggactctcgggcccgagtgggtgtggccacatacagcagggagctgctggtggcggtgcctgtgggggagtaccaggatgtgcctgacctggtctggagcctcgatggcattcccttccgtggtggccccaccctgacgggcagtgccttgcggcaggcggcagagcgtggcttcgggagcgccaccaggacaggccaggaccggccacgtagagtggtggttttgctcactgagtcacactccgaggatgaggttgcgggcccagcgcgtcacgcaagggcgcgagagctgctcctgctgggtgtaggcagtgaggccgtgcgggcagagctggaggagatcacaggcagcccaaagcatgtgatggtctactcggatcctcaggatctgttcaaccaaatccctgagctgcaggggaagctgtgcagccggcagcggccagggtgccggacacaagccctggacctcgtcttcatgttggacacctctgcctcagtagggcccgagaattttgctcagatgcagagctttgtgagaagctgtgccctccagtttgaggtgaaccctgacgtgacacaggtcggcctggtggtgtatggcagccaggtgcagactgccttcgggctggacaccaaacccacccgggctgcgatgctgcgggccattagccaggccccctacctaggtggggtgggctcagccggcaccgccctgctgcacatctatgacaaagtgatgaccgtccagaggggtgcccggcctggtgtccccaaagctgtggtggtgctcacaggcgggagaggcgcagaggatgcagccgttcctgcccagaagctgaggaacaatggcatctctgtcttggtcgtgggcgtggggcctgtcctaagtgagggtctgcggaggcttgcaggtccccgggattccctgatccacgtggcagcttacgccgacctgcggtaccaccaggacgtgctcattgagtggctgtgtggagaagccaagcagccagtcaacctctgcaaacccagcccgtgcatgaatgagggcagctgcgtcctgcagaatgggagctaccgctgcaagtgtcgggatggctgggagggcccccactgcgagaaccgtgagtggagctcttgctctgtatgtgtgagccagggatggattcttgagacgcccctgaggcacatggctcccgtgcaggagggcagcagccgtacccctcccagcaactacagagaaggcctgggcactgaaatggtgcctaccttctggaatgtctgtgccccaggtccttag

SEQ ID NO: 131494 - DNA, 390 bp, Homo sapiens
gacgctctcagctctcggcgcacggcccagcttccttcaaaatgtctactgttcacgaaatcctgtgcaagctcagcttggagggtgatgggctgggaaccgaccaggactctctcattgagatcatctgctccagaaccaaccaggagctgcaggaaattaacagagtctacaaggaaatgtacaagactgatctggagaaggacattatttcggacacatctggtgacttccgcaagctgatggttgccctggcaaagggtagaagagcagaggatggctctgtcattgattatgaactgattgaccaagatgctcgggatctctatgacgctggagtgaagaggaaaggaactgatgttcccaagtggatcagcatcatgaccgagc

SEQ ID NO: 131495 - DNA, 425 bp, Homo sapiens
ccgggtcgacccacgcgtccggctctcagctctcggcgcatggcccatttttcttcaaaatgtctactgttcacgaaatcctgtgcaagctcagcttggagggtgatcactctacacccccaagtgcatatgggtctgtcaaagcctatactaactttgatgctgagcgggatgctttgaacattgaaacagccacctccagaaagtatttgataggtacaagagttacagcccttatgacatgttggaaagcatcaggaaagaggttaaaggagacctggaaaatgctttcctgaacctggttcagtgcattcagaacaagcccctgtattttgctgatcggctgtatgactccatgaagggcaaggggacgcgagataaggtcctgatcagaatcatggtctcccgcagtgaagtggacatgg

SEQ ID NO: 131496 - DNA, 333 bp, Homo sapiens
gtgtattgctggggataatagtacagggacttgccgcactttctcttgaattcagacctaattttcaacatgtccacttcactgcgggagaccatgattctgatcaggaccttatctcgcgtccccttgcccttcatggagtcatacagccgatcagcaaaatacaggggctcgttctgaatgcactgaaccaggttcaggaaagcatattccaggtctcctttaacctctttcctgatgctttccaacatgtcataagggcctgaactctttgacctatcacaaactttctggaggggggcacgctccggtcggcaatatgctgaccacttg

SEQ ID NO: 131497 - DNA, 1137 bp, Homo sapiens
atggtgagcaccatttctggacgctcaggccgtgtcgggcttcagtcatctccaccacacagagtatccaccagctctcatggtgctaaacctaggcccaatgttacaataacaattacaattgtcgcaattaaccctaacctcaagtaccccctcgcaagaattgaaattgagattgggggcgcgtcgcgaattcagctcaggatggccgaaaaaatagaacgacaccgcgactggctggtcgtcaatttgctctctccggcgggtgatatcttcatccatctgattaaaatgattgttgtgccgattgtgatctccacgctggtggtgggtatcgcgggtgttggtgatgccaaacagctcgggcgtattggcgcgaaaaccattatctacttcgagttgaacgacaagaagctgggtggaaagaacacggacttctggttgccagtagttatctgtctcaggactgcccggatcctcgaggcagaagatgcatttgcgcgaagttgtatgatttcgggcttccctggcaacgaaaacatccacttcgctcaaaaaaacaaaaagataccggcgggatcggggaaagtatttgataggtacaagagttacagcccttatgacatgttggaaagcatcaggaaagaggttaaaggagacctggaaaatgctttcctgaacctggtatgtcacgttctcgcgtttctgaacggggaacggcgctccattgaggaagtcattcatatgaaaaatataaaattcagcctggcctggcagattctgtttgctatggtgctgggcattctcctgggaagctacctgcactaccatagcgacacgcgcgactggctggtcgtcaatttgctctctccggcgggtgatatcttcatccatctgattaaaatgattgttgtgccgattgtgatctccacgctggtggtgggtatcgcgggtcttggtgatgccaaacagctcgggcgtattggcgcgaaaaccattatctacttcgaggtgatcaccaccgtcgccatcattttggggatcactctggcgaacgtcttccagcccggtgccgggggtagaagagcagaggatggctctgtcattgattatgaactgattgaccaagatgctcgg

SEQ ID NO: 131498 - DNA, 1511 bp, Homo sapiens
tctcatctctcggcgcacggcccagcttccttcaaaatgtctactgttcacgaaatcctgtgcaagctcaacttggagggtgatcactctacacccccaagtgcatatggctctgtcaaagcctatactaactttgatgctgagcgggatgctttgaacattgaaacagccatcaagaccaaaggtgtggatgagggcaccattgtcaacattttgaccaaccgcagcaatgcacagagacaggatattgccttcgcctaccagagaaggaccaaaaaggaacttgcatcagcactgaagtcagccttatctggccacctggagacggtgattttgggcctattgaagacacctgctcagtatgacgcttctgagctaaaagcttccatgaaggggctgggaaccgacgaggactctctcattgagatcatctgctccagaaccaaccaggagctgcgaggaaattaaccagagtctacaagggaaatgtacattgactgtatctggagaaggggacattatttcggacacgatctggtggacgttccgcaagctgatggttagccctggcaaagggtagaagagcagaggatggctctgtcattgattatgaacctgattgaccaagatgctcgggatctctatgacgctggagtgaagaggaaaggaactgatgttcccaagtggatccagcatcatgacccgagcggaagcgtgccccacctccaagaaaagtatttgataggtacaaagagttacagccctttatgacatgtttggaaaagcatcagggaaagaggttaaagggagaccttggaaaattgctttcctggaacctgggtttcagttgcatttcaggaacaagccccctgtaatttttgctgattcgggctgtatgtactcccatggaaggggcaaggggaccccgagattaaggtccctgattcagaatccatgggtcttcccgcagttgaagttggacatgtttggaaatttaggtcttgaatttcaaggagaaagtacgggcaagtcccctgttactatttattatcccagccaaggacattaaggggcgattacccagaaagccgctgctgtaacctgtgtggttggagattgactgaagccccgacaccggccttgagcgtccccgaaaatggtggctcacccatgctttccagcttaacaggttttagaaaaccagcttgcggaattaacagtccccgtggccatccctgttgaggggtgacgttagcattacccccaacctcatttttagttgcctaagcattggctggcccttctgtctagtctcttctgttagccaaagaaatgaacattccaaggagttggaagtgaagtctatgatgtgaaacactttgcctcctgtgtactgtgtcataaacagatgaataaactgaatttgtactttagaaacacgtactttgtggccctgctttcaactgaattgtttgaaaattaaacgtgcttggggttcagctggtgaggct

SEQ ID NO: 131499 - DNA, 377 bp, Homo sapiens
ggaccaaggggaacagtccaaaaaggaaaagcaagatcagagaaagaccgtagccttagtcatggccctcagacaaataaaccttggtggttcagagaggacagaaaatggagcaggtcaatcagccgggtttagggatagccctcaactgtttggtcaggcactggcccaagatctaggccacttctcaagtccaggcactcttgtccttcaatatgtggatgatttacttttggctaccagtttggaagcctcatgccagcaggctactctagatctcttgaactttctagctaatcaagggtacaaggtgtctaggtcgaaggcccagctttgcctacagcaggtcaaatatctaggcctaatcttagccagag

SEQ ID NO: 131500 - DNA, 211 bp, Homo sapiens
gatggggaaccaatcgagcatgactgccaacaaattatagtccagacttctgctgctcgagaggatcttttagaagtccccttagctaatcctgaccttaacctatataccgatggaagttcatttgtggagaatggggaagtagctaaagcggtcatcgcccaattcccgacaacagttggggtgtcctgtttagatgggagattgagag

SEQ ID NO: 131501 - DNA, 735 bp, Homo sapiens
atgcagcagtcccagcaacaaattctaggagtacaaaaactgaacagtcagtggagactagcgcaagattttagactcatcaatgaggcagtaattcctctatatccagttgtacccaacccctataccctgctctctcaaataccagaggaagcagaatcgttcactgttctggacctcaaggatgccttcttctgtattcccctgcactctgactcccagtttctctttgcctttgaggatcccacagaccacaactcccaacttacatggatggtcttgccccaggggtttagggatagccctcatctgtttggtcaggcacaggcccaagatctagttcacttctcaagtccaggcactctggttgttcagtatatggatgatttacttttggctaccagttcggaagcctcatgccagcaggctactctagatctcttaaactttctagctaatcaagggtgcaagagagtgggaatagctcttggagtccttactcagactcatgggacaaccccacaaccagtggcatacctaagtaaggaaactgatgtagcagcaaaaggtcccctgacagccatcttgctattactcgcctttgggccctgtatttttaacctccttgtcaaacttgtttcctccaggattgatgccatcaagttacaaatggtcttacaaatggaaccccaaatgagctcaactaacaacttctaccgaggacccctggactga

SEQ ID NO: 131502 - DNA, 3006 bp, Homo sapiens
atgcctggggctcaggacctgcagcccaccatgccggagcctccccacccccagtgggctcccacgtggcctgagcctcctcgacgggtgccgccccctgctccgcggcgcccagtcccattgactgcccaagggctgagtgtggatcaaagcagactggggaagttttcagatgatcctgataggtacatagatgtcctacagggtctagggcaaacctttgatctcacttggagagatgtcatgctactgttagatcaaaccctggcctttaatgaaaagaatgcagctttagctgcagcccgagagtttaaagatacttggtatcttagtcaagtgaatgatagaatgacagccgaagaaagggataaattcccttctggtcagcaagctgtccccagtatggatccccactgggaccttgactcagattatggggactggagtcataaatatctgttgacctgtgttcttgaaggactaaggagaattaggaaaaagcccatgaattattcaatgatgtccaccataactcaaggaaaggaagaaaatcctgccttccttgagcagctatgggaggccttaaggaaatatattcccctgtcacccaaatcactcgagggtcaattgattctaaaagataagtttattacccagtcagctgcagatatcaggggaaagctccaaaagcaatccctggtccctgaacaaaatttggaggcattactaaacctggcaacctcagtgttctataatagggaccaagaggaacaagcccaaaaggaaaagcaagatcagaaaaaggctgcagccttagtcttggcccccacacaagcaagccttggtggttcagagaggacagagggtggagcaggccaatcacccatgctaatctcctgtcctggacgactgtcctcaaggtccattaccatccgaggaatcctgggacagcctgtaaccaggcaatatcccttaaggcctgaagctcataaaggattacaggatattgttaaacatttaaaagctcaaggtttagcaaggaaatgcagcagtccctgcaacaccctaattctaggagtacaaaaaccgaatgttcagtggagactagtgcaagatcttagactcatcaatgaggtagtaattcctttatatccagttgtacccaactcctataccctcctctctcaaataccagaggaagcagaatggttcacagtgctggacctcaaggttgccttcttctgtattcccctgcactttgactcccagtttctctttgcctttgaggatcccacagaccacacatcccaacttacgtggacagtcttgccccaagggttcagggatagccctctcctgtttggtcaggcactggccaaagatctaggccacttctcaagtccaggccctctgttccttcagtatgtggatgatttgcttttggctaccagttcagaagcctcatgccagcaggctactctagatctcttgaactttctagctaatcaagggtacaaggcccagagggaccaaggccctcagcaaggaatgaatacagcctatactggcttatccttgcccgaagacattaaaacagttgtggggcttccttggaatcaccggcttttgctgactatggatcccctgatacaagagagcagagatagctcttggagtccttacccagactcgtgggaaaaccccacaccagtggcatacctaagtaaggaaactgatgtagtagcgaaaggctggcctcactgtttacgggtagttgcggcggtggctgtcttagtgtcagaggctatcaaaataataaaaggaaaggatctcactgtctggactactcatgatgtaaatggcatactaggtgccaaaggaagtttacggctatcagacaactgcctacttagataccaggtgctactccttgagggactggtgcttcaaaaatgtacatgcatggccctcaaccctgccacttttctcccaaaagatggggatccaatcgagcatggctgccaacaaattatagtccagacttatgctgcccgagatgatctcttagaagtctccttagctaatcctgactttaacctatataccaatggaagttcatttgtggagaatgggatacgaagggccggttatgccatagttagtgatgtaaccatacttgaaagtaagcctcttcccccagggaccagtgcccagttaccagaactagtggcatttacccgagctttagaactgggaaagggaaaaagaataaatgtgtatacagatagcaagtatgcttatctaatcctacatgcccatgctgcaatatggaaagaaagggaattcctaacctctgggggaacccctattaaataccacaaggaaattatagagttattgcacacagtgcaaaaacccaaggaggtgacagtcttacattgccaaagccaccagaaaggtgaaggagaaaaggcaggaggaaactgtcaggcagaagctgaggccaaaattgctgccaggcagaacctcccactagaaatacctacggaaggaccctcgagtgaccgcagcagcagcctcagcgaactcgcgtggacagaggcgtccctgatcaccaaacaggggccacacaccgtacatatagacggaagaacaagcgcggtggccccaccggtatgtcgggacagacgcccccagatacgccaaatcaacacatcggatcgtaacaacgggagaaaccaagcaggggaaaggttccccagaaaaaaatggctgcggggaaactggctaccaatatgtagaacgctgaaacggtatcctgtcgtcacacgttatacaaaaatcaatgcacgagggattaaagacttaaatgttcgacctaaaaccataaaaaccctagaagaaaacctaggcattactattcaggacataggcatgggcaaggacttcatgtctaaaacaccaaaagcaatggcaacaaaagccaaaattgacaaatgggactaa

SEQ ID NO: 131503 - DNA, 627 bp, Homo sapiens
atgaatacagcctatactggcttatcctcaccccaagacattaaaacagttgtgggggttccttggaatcaccgcttttgcccagtatggatccccagatgcagcaagatagccaagtccctctatactctaatcaaggagacccagagagcaaatactcatctagtagaatgggaaccagaggcagaaacagccttcaaaaccttaaagcaggccctagtacaagctccaactttaagccttcccacaggagaaaacttctctttatatgtcacagaaagagcagggatagctcttggagtccttactcagactcgtgggacaaccccacaacctgtgacatacctaaaggatggggaaccaatgaaatgtgactgccaacaaattatagtccagacttatgccacccaagatgatctcttagaagtccccttagctaatcctgaccttaacctatatactgatggaagttcatttgtagagaatgggatacgaagggcaggttatgccatagttagtgatgtaaccatacttgaaagtaagcctcttcccccagggaccagtgcccagttagcagaactagtggcacttacccgagccttagaactgggaaagggaaaagaataa

SEQ ID NO: 131504 - DNA, 2631 bp, Homo sapiens; identical to SEQ ID NO: 127756

SEQ ID NO: 131505 - DNA, 568 bp, Homo sapiens
atgcagcagtcccagcaacaaattctaggagtacaaaaactgaacagtcagtggagactagcgcaagattttagactcatcaatgaggcagtaattcctctatatccagttgtacccaacccctataccctgctctctcaaataccagaggaagcagaatcgttcactgttctggacctcaaggatgccttcttctgtattcccctgcactctgactcccagtttctctttgcctttgaggatcccacagaccacaactcccaacttacatggatggtcttgccccaggggtttagggatagccctcatctgtttggtcaggcacaggcccaagatctagttcacttctcaagtccaggcactctggttgttcagtatatggatgatttacttttggctaccagttcggaagcctcatgccagcaggctactctagatctcttaaactttctagctaatcaagggtgcaagagagtgggaatagctcttggagtccttactcagactcatgggacaaccccacaaccagtggcatacctaagtaaggaaactgatgtagcagcaaaag

SEQ ID NO: 131506 - DNA, 852 bp, Homo sapiens; identical to SEQ ID NO: 119397

SEQ ID NO: 131507 - DNA, 369 bp, Homo sapiens
gatggggatccaatcaagcatgactgccaacaaattatcgtccagacttatgccacacaagataatctcttagaagtccccttaggtaatcctgaccttagcctatatactgatggaagttcatttgtgaagaatgggatacaaagggcaggttatgccatagttagtgatgtaactatacttaaaaccctaatattactgagccaaaataacaaagaagaaacagatattttacctgagcctttttcttcaatacgtaagaaaaaggaccaggaataccctccagttattagtccctgtcttcagctggcagcaataaaaggagagttattagcctgcccggtaatgcaaaatcagccaagtaatcag

SEQ ID NO: 131508 - DNA, 1635 bp, Homo sapiens; identical to SEQ ID NO: 119415

SEQ ID NO: 131509 - DNA, 1837 bp, Homo sapiens
atgacagctgaagaaagggacaaattccctaccagtcagcaagctgtccccagtatggatgcccactgggacctcgactcagatcatggggactggagtcgtaaacatctgttgacctgtgttctagaaggactaaggagaattaggaaaaagcccatgaattattcaatgatgtccaccataactcagggaaaggaagaaaatccttctgccttccttgagcagctacaggaggccttaagaaaatatactcctctgtcacccaactcactagtgggtcaattgatcctaaaagataagtttattacccaatcaaccacagatatcagaagaaagctccaaaatagggaccaagaggaacaggcccaaaaggaaaagcgagatcagagaaaggccatagccttagtcatggccctcagacaaaccttggtggttcaaagaggacagaaaatggagcaggccaatcacctggtggggcttgttaccagtgtggtttgcaaggacaccttaaaaaagattgtccaacgagaaacaagccgccccatcgtccatgtccactatacggaggcaatcactggaagtcacactacccagagggcaaagcttctctgggccagaagcccccaaccagatgatccaatgacaggactgaggatgactgcggcaagcacccgttcatgtcatcaccccctcactgagccctgggtatgtttaatcattgagggccaggaaattgacttcctcctggacactggcacgaccttctcagtgttaatcccctgtcttggacgactgtcctcaaggtccgttaccatccaaggaatcctgggacagcctgtaaccaggtatttctcccacctcctcagttgtaattgggagactttgctcttttcacatgcctttcttgttatgcctgaaagtcccacacccttattagggagggatatattagccaaagctggagctattatctccatgaagacagggaacaagttacccatttgttgtcccctacttgagggaatcaaccctgaagtctgggcattggaaggacaatttggaagggcaaaaaatgcccatccactccaaatcaggctaaaagaccccatcagttttccttatcaaaggcaatatcccttaaggcctgaagctcataaaggattacaggatattgttaaacatttaaaagctcaagactcagtaagaaaatgcagcagtccctgcaacaccccaattctaggagtacaaaaactgaacagtcagtggagactagtgcaagatcttagactcatcaatgaggcagtaattcctctatatccagttgtacgcaacccctatacccttctctctcaagtaccagaggaagcagaatggttcactgttctggacctcaaggatgccttcttctgtattcccctgcactctgactcccagtttctttttgcctttgaggatcccacagaccacacatcccaacttatgtggatggtcttgccccaaaggtttagagatagccctcatctgtttggtcaggcacaggcccaagatctaggccacttctcaagtccaggcactctggtccttcaatacagcgagatagccaagaccctctatactctaatcaaggagatggagagggcaaatactcacctagtagaatgggaaccagaggcagaaacagccttcgaaaccttaaagcaggccctagtacaagctccagctttaagccttcccacaggacaaaacttcgctttatatgtcatagagagagcagggatagctcttggagtccttactcagactcacaggacaaccccacaaccagtggcatacctaa

SEQ ID NO: 131510 - DNA, 958 bp, Homo sapiens
tgaaatctcatttgtggagaatgggatacaaagggcaggttatgccatagttagtgatgtaactgtacttgaaagtaagcctcttctcccagggaccagtgctcagttagcagaactagtggcacttacccgagcctttgaactgggaaagggaaaaagaataaatgcaaatacagatagcaagtatgcttatctaattctacatgctcttgctgcaatatggaaagaaagggagttcctaatctctgggggaacccccattaaataccacaaggaaattatggagttattgcatgcaatgcaaaaacccaaggaggtggcagtcttacactgccaaagccatcagaagggctaggaatggctactgctacaggaactggaatagccagtttatctacttcagtatcctactaccacacactctcaaaggatttctcaagacagtttgcaagaaataacaaaatctatccttactctgcaatcccaaatagactctttggcagtagtgaatatccaaaaccgccaaggcctagacctcctcactgctgagaaaggaagactctgcaccttcttaggagaagactgttgtttttacactaaccactcagggatagtacaagatgctgcccagcagttacaggaaaaggcttctgaaatcagacaatgcctttcaaactcttataccaacctctagagttgggcaacatggtttctcccctttctacgtcccatgacagccatcttgctatcattcgcctttgggccctgtatttttaaccctcttgtcaaatttgtttcctctaggatcaaggccatcaagctacagatgatcttacaaatggaaccccaaataagctcagctaacaacttctaccgaggacccctggaccgacccgctggccctttcactggcctaaagagttcccctctggaggacactacaactgtggtgttgtag

SEQ ID NO: 131511 - DNA, 2508 bp, Homo sapiens
atgagtgaactcccattcacaattgcttcaaagagaataaaatacctaggaatccaacttacaagggacgtgaaggacctcttcaaggagaactacaaaccgctgctcaatgaagtaaaagaggacacaaacaaatggaagaacattccatgctcatgggtaggaagaatcagtatcgtgaaaatggccgtactgcccaaggtaatttatagattcaatgccatccccatcaagctaccaatgactttcttcacagaattcgaaaaaactactttaaagttcatatggaagcaaaaaagagcccacattgccaagtcaatcctaagccaaaagaacaaagctggaggcatcacgctacctgacttcaaactgtactacaaggctacagtaaccaaaacagcatgtgttcctgtgtgcacgggcatctgcagccaggcctgtaggggaccgctccccgaagatgttgggggtctttccaggaaagtggtgagttcagaagttgccctggtgcataggaagagaataccccaaggggctactgaaagggccttgagtagggcactgattggtccattttacagggtgctgactggtccattttacaaacctctagctagccacagagcactgactggtgcatttttacagagcgctgactggcgcattttacaatcctcttgtaagatatcaaagttctccaagtccccattcgacccagggagtccagctggcttcacctctcaatgtcccctctagacaggacaccccaactgctgttgggaatttggccgatgacagctctagctacttcctgctggatagggaaggaaacaagcaaagaaatctccaaaggaccacaaaaactcccaggctatcggttatgtccccttcaagctgtagggggaggggaatttggcccaacccagggtctagggcaaaccttcaatcctcacttggagaaatgtcatgctattgttagatcaaacccttgcctttaatgaaaagaatgtggctttagctgcagcccaagagtttgaagatacctggtatcttggtcaagtaaatgatagaatgacagccaaagaaagggacaaattccctaccagtcagcaagccatccccagtatggatccccaccgggtcctcgactcagatcatggggactggagtcgtgaacatctgttaacctgtgtcctagaaggactaagcagaattaggaaaaagcccatgaattattcaatgacatccaccataactcagggaaaggaagaaaatcctaccgccttcctcgagcggctacaggaggccttaagaaaatatacttccctgttacccgactcactcgagggtcaattgatcctaaaagataagtttattacccagtcagctgcagatatcaggataaagctccaaaagctagccctggcccctgaacaaaatttggacgcattattaaacctggcaacctccgtgttctacagtagggatcgagaagaacaggctgaaaaggaaaaacggctgtcctcaaggtccgttaccatccgaggctcagtgttaatctcctgtcccggacagctgtcctcaaggtccattaccatccgaggaatcctgggacagtctgtaaccaggagtacaaaaaccagtcagtggagactagtgcaagatcttagactcatcaatgaagcagtaattcctctatatccagttgtacccaagccctataccctgttctctcaaataccaaaggaagcagaatcgttcacagttctggacctcaaggatgccttcttctgtattcccctgcactctgactcccagtttctctttgcctttgaggatcctacagatcacacgtcccaacttacgtggacagtcttgccccaaaggttcagggatagccctcacctgtttggtcaggcactggtccaagatctaggccacttctcaagtccaggcactctggtccttcagtttgtggatgatttacttttggctgccagttcggaagcctcatgccagcaagctactcgagatctcttgaactttctagctaatcaagggtacaaggcatctaaatcaaaggcccagctctgcctacaacaagtcaaatatctaggcctaatcttagccagaggaaccagggccctcagcaagaaacgaatacagcctatactggcttatcctcgccctaagacattaaaacagttgcgggggttccttggaatcaccagcttttgccgactacagatccctggatacagcaagatggccaggccactctatactctaataaaggagacccagagggcaaatactcatctagtagaatgggaaccagaggcagaaacagccttcaaatccttaaagcaggccctagtacaagctccagccttaagccttcccacaagacaaaacttctctttatacgtcagagagagagcaggaatagctcttgaagtccttactcagactcacgggacaaccctacaaccagtggcaaaaggctag

SEQ ID NO: 131512 - DNA, 2418 bp, Homo sapiens
gtatgttcaactattgagggccaggaaattgacttcctcctggacactggcgccgccttctcagtgttaatctcctgtcctggacgactgtcctcaaggtccgttaccatccgaggaatcctgggacagcctgtaaccaggcaatatcccttaaggcctgaagttcataaaggattacagaatattgttaaacatttgaaagctccaggcttagtaaggaaatgcagcagtcactgcaacaccccaattctaggagtacaaaaaccgaacggtcagtggagactagtgcaagatcttagactcattaatgaggcagtagttccactatatccagttgtacccaacccctataccctgctctctcaaacaccagaggaagcagaatggttcatggttctggacctcaaggatgccttcttctgtattcccctgcactctgactcccagttcctctttgcttttgaggatcccacagaccacacgtcccaaattacgtggatggtcttgccccaagggtttagggatagcccttatctgtttggtcaggcactggcccaagatctaggccacttctcaagtcgaggcactctggtccttcaatatgcagatgatttacttttcgctaccagttcagaagcctcatgccagcaggctactctagacctcttgaactttctagctaatcaagggtacaaggtgtctaggtcaaaggcccagctttgcctacagcaggttaaatatctaggcctaatcttagccaaagggaccagggccctcatcaaggaacgaatacagcctatactggcttatccttgccctaagacattaaaacagttgcgggggttccttggaattaccggcttttgccaactatggatccccggatacagcgagatagccaggcccctctatactctaatcaaggacacccagagggcaaatactcatctagtagaatgggaatcagaggcagaaacagccttcaaaaccttaaagcaggccctagtacaagcgccaggtttaagccttcccacaggacaaaacttctctttatatgtcacagagagagccgggatagctcttggagtccttactcagactcgtgggacaaccccacaaccagtggcacacctaagtaaggaaactgatgtagtagcaaaaggctggcctcactgtttaagggtagttgcagcagtggccgtcttagtgtcagaggctatcaaaataatacaaggaaaggatctcattgtctggactactcatgaagtaaatggcatactaggtgccaaaggaagtttacggctatcagacaactgcctacttagataccaggtgctactccttgagggactggtgcttcaaaaatgtacatgcatggccctcaaccctgccacttttctcccaaaagatggggatccaatcgagcatggctgccaacaaattatagtccagacttatgctgcccgagatgatctcttagaagtctccttagctaatcctgactttaacctatataccaatggaagttcatttgtggagaatgggatacgaagggccggttatgccatagttagtgatgtaaccatacttgaaagtaagcctcttcccccagggaccagtgcccagttaccagaactagtggcatttacccgagctttagaactgggaaagggaaaaagaataaatgtgtatacagatagcaagtatgcttatctaatcctacatgcccatgctgcaatatggaaagaaagggaattcctaacctctgggggaacccctattaaataccacaaggaaattatagagttattgcacacagtgcaaaaacccaaggaggtgacagtcttacattgccaaagccaccagaaaggtgaaggagaaaaggcaggaggaaactgtcaggcagaagctgaggccaaaattgctgccaggcagaacctcccactagaaatacctacggaaggaccctcgagtgaccgcagcagcagcctcagcgaactcgcgtggacagaggcgtccctgatcaccaaacaggggccacacaccgtacatatagacggaagaacaagcgcggtggccccaccggtatgtcgggacagacgcccccagatacgccaaatcaacacatcggatcgtaacaacgggagaaaccaagcaggggaaaggttccccagaaaaaaatggctgcggggaaactggctaccaatatgtagaacgctgaaacggtatcctgtcgtcacacgttatacaaaaatcaatgcacgagggattaaagacttaaatgttcgacctaaaaccataaaaaccctagaagaaaacctaggcattactattcaggacataggcatgggcaaggacttcatgtctaaaacaccaaaagcaatggcaacaaaagccaaaattgacaaatgggactaa

SEQ ID NO: 131513 - DNA, 5168 bp, Homo sapiens
atgggtgcacatggattacaaggcggcataatagacactggagactacaaaaggtgcaagagtggaaggtccatgccatctttaagagctgtaacactcaccacgaaggtccgtggcttcattcttgaagtcactgagaccacaagcccactggaaggaaccaactccggacacatcttgggtgttcgtctgggatattgccacacggtgagtaccatcggactcgtctgggatattgccacacgaggaaaggcaatggtgcaggttttcgagaatgcgttggtgagggccactaaatccgaccttcctcggtcctctttgtggtctaggaggaaatctagtgtttccactgctgcttcacttgaccttttctgtaagagggaaggcaaatggagtgaaatgccttatgtccaagctttcttttcactgaaggataatccacaactatgcaaagcttgcaatctacatcccacaggaggacctctcagcttacctccatatcctagccttcctacagctctccttcctattaatgataagcctcctctaatctccccgacccagaaggaaacaagcaaagaaatctccaagggaccacaaaaaccccccggctgtcagttatgtccccttcaagctgtagggggaggggaatttggcccaacccagctacatgtccacttctccctctctgatttaaagcagatcaaggtagacctggaaaagtttccagatgatcctgataggcaatattcctttaggcctgaagctcgtaaaggattacaggatattgttagacatttaaaagctcaagacttagtgagaaaattcagcagtccctgcaacaccccaattctaggacgacaaaaactgaatggtgagtggagattagtgcaagatcttagactcatcaatgaggcagtaattcctctatatccagttgtacctaaccactataccctgctctctcaaatacccgaggaagaagaatggttcactattctggacctgaaggatgccttattctgcattcccctgaactctgactcccagtttttctttgcctttgaggatcccacagacaacacatcccaacttaggtggacgttcttgcctcaagggtttagggatagccatcatctatttggtcaggcactggcccaagatctaggccatttctcaagtccaggcactctgctccttcagcatgtgaatgatttacttttggctaccagttcggaagcctcatgctggcaggctactctagatctcttgaactctctagctaatcaagggtacaaggtgtctaaattgaaggcccagctctgcctacagcaagtcaaatatctaggcctaatcttagccagaggaaccagggccctcagcaaggaacgaatacagcctatactggcttatcctcaccctaagacattacaacagttgtgggggttccttggaatcaccggcttttgccaactatgtatccccgggtacagcgagatggccaggctaccctatactctaatcaaggagacccagagggcaaatactcatctagtagaatgggaaccagaggcagaaacagccttcaaaaccttaaagcaggccttagtacaagctccagccttaaaccatcccacaggacaaaacttatctttatacatcacagagagagcgggaatagcttttggagtccttactcagactcataggacaaccccacaaccagtggcatacctaaggtggttaacaacagaagagggaaaggtacttataccagaagccagccagtggaaaatactgaagtacctccaccaaacttttcatgtgagtattgagaacactcatcaaatgcccaaatctctatttacagggccaaatctcctctgggccgtccaacaagaagtcaaagcctgtgaggtgtgccaaatgaataatcccttggtccatcataaggcccctataggggaacaaagaacagggcactatcccagagaggagtggcagttagacttcacccatatgcctaagtcaaaaggatttcaatacttgttggtctgtgttgataccttgacaaattggatagaagctgtcccctgcaagacagagaaggctcaggaagtggttaaagtcctaattcatgaaataactactagatttgggcttccacaaagcttacaaaacgacaatggtccggctcttaaagccacggatcgataccatcaagctacagatggtcttacaaatggaaccccaaatgagctcaactcacaacttctaccaaggacccctggaccaaccagctggccctttgactggcctaaagagttcccctctggaggacactacaactgcagggccccttcttcacccctatccagcagaaagtagctagagcggtcatcagccaaattcccaacagcagttggggtgtccctagccagcagcggcaacccactcgggtccccttccacgctgtgtaagttttgttctttcactctttgcaataaatcttgctgctgctcactctttgggtccacactaactttatgagctgtaacactcactgtgaaggtctgcagcttcactccgtgaagatctgcagattcagtcctgaagtcagtgagaccacaaacccaccagaatgaaaaaactccggacacatcttggggacttgtccaggatatcgctatgcgaaaggcaaagaaacaggcaaagaaatcatcaagggaccacaaaaccccccaggctatcggttatgtccccttcaagctgtagggggaggggaatttggcccaacccaggtgcatgtccccttttctctctctgatttaaagcagatcagggtagacctggggaagttttcagatgatcctgataggcaatatcccttaaggcctgaagctcatgaaggattacaggatattctcagatatttaaaagttcaagggttagtaagaaaatgcagcagtccctgcaatacccgaattctaggagtacaaaaaccaaaaggtcagtggagactagtgcaagatcttagattcatcaatgaggcagtaattcctctacattcagttgtacccaactcctataccctgctctctcaaataccagaggaagtggaatggttcactgttttggacctgaaggatgccttcttctgcattcccctgcactctgtctgccagtttctctttgcctttgaggatcccacagaccacacgtcccaatttacatggacggttttgcctcaagggtttagggatagccctcatctgtttggtcagatattggcccaagatctaggccacttctcaagtccaggcactctggtccttcagtatgtggatgatttacttttggctaccagtttggaagcctcatgccagcaggctactctagatctcctgaaccttctagctaatcaagggtacaaagcatctaaaccgaaggcccagctctgcctacaacaagtcaaatatctagacctaagcttagccagagtaaccagggccctcagcaaagaacgaatacagcctatactggcttgtcctcgccctaagacattaaaacagttgcgggggttccttgggatcaccaacttttgccaactatggatccctggatacagtgagatggccaggccactctatactctaatcaaggagacccagagggcaaatagtcatctagtagaaagggaacgagaggcagaaacagccttcaaaaccttaaagcaggccctagtacaagctctagccttaagccttcccacaggacaaaacttctctttatatgccagagagagagcaggaatagctcttggaatccttactcagactcacgggacaaccccacaaccagtgacatacctaaggaaattgatatattcatttgtggagaatgggatgcgaagggcaggttatgccatagttagtgatgtaacagtacctgaaagcaagccccttcccccagggaccagcacccagttagcagaactagtggtgcttacccaagccttagaactgagaaagaaaaaaagaataaatgtgaacacagatagcaagtacgcttatctaatcctacatgcccatgctgcaatatggaaagaaagggagttcctaacatctgggggaacccccaataaataccacaaggaaatcatggagttactgcatgctgtacaaaaacccaaggaggtggcagtcataccctgccaaagccatcaaaaaggtgaagagaaaaggcagaaggaaaccgtcgggcagatgctgagggccaaaattgctgccaggcggaacctcccaacagaaatacctatggaaggacccttggtatggaacaaccctgtccaagagattaagccccagtattccctgaccaaaacagaatggggactttcacaggggcatagttttctccccctggggtggttaacgacattagaggggaaggctggtagagccaccccgaatccccgaaacgtctacttcccactacaccttcgtggactgcgaacgggacggctaccgctctcccagagcacccgggcccaagaaatgaccctcgtcaggccccgtcccagctcctccccgcccccggaaaaagcggcggaggggcgggggcggcgatgctcctctgagaccaagctgcgacacagacgcctcttccgcccgctccgcacccctctctgcgccaccgcccccttggccgcttccgtggccgccgtcctcgccgccgccccggctgctgcggcgcgcgtccgctttcacgcactccgccgtggccgcgcacgcgccactgcgcgctggcgtcacttagcaaccgatcgacagcgggctgctgggtccggcgatgcaggcccagaaagtcgcctaaggcagcttccgcggctttttcgcatcggcccgaccctctgcccctccagaacagggggccccagggtgtggctgccctgccggcacctggctccggtcaccacacgtcactgtatggcgtcaccggcgcacgtcactacggatgagaaggtcctgggcgcctgtggagtgacctcgtccagaccgccgcagacccgatcggcaagttcttggaggtgcaggaaggttctccaaggagtaggaccagaaagggatgagagcgcgagcgcggttaatgtcgaggctgctaagtga

SEQ ID NO: 131514 - DNA, 2208 bp, Homo sapiens
atggctgccttgtcagagcgctttcatgccaaggagccagcaggatctgacagctacccttggactagcagagttttgcaaagaaatgatggtgacagtttatttacggacgctcagattcgcggccgtataatggaggcagccctactaggaaaggcaagggtgcaggtttttgagaatgcatcggtaagggccattaaatccgaccttcctcagtcctccttgtggtctaggaggaaaactagtgtttctgcttctgtgtcagtgagcgcaactattctgatcagcagggtccgcggaccattaagaaaacaagcaaagaaatctccaaaggcccacaaaaaacccctggctattggttatgtcccctacaagcttagggggaggggaatttggcccaacccagaagggctaaggagaaataggaaaaagcccatgaattattcagtgatgtccaccataactcagggaaaggaagaaaatccttctgccttcctcaagtggctacaggaggccttaagaaaatatactcccctgtcaaccggctccatcaagggtcaattgatcctcaaagataagtttattacccaatcagctgcagatatcaggagaaagctccaaaagcaagccctgggccctgatctaaatctggaggtgttattaaatctggcaacctcggtgttccataatagggaccaagaagaacaggcccaaagggaaaagcgagatcagagaaaggctgcagcctttgtcatgacaattagagaaacaaacattggtggttcagagaggacagaaaatggagcaggagtacaaaaatcgaatggtcagtggagactagtgcaagatcttagactcatcaatgaggcagtaattcctctatatccaattgtacccaacccctataccctgctctctcaaatacaagaggaagcagaatggttcactgttctggacctcaaggatgccttcttctgtattcccctgcactctgactcccagtttctctttgcctttgaggattccacagaccacacgtcccaatttacatggatggtcttgccccaagggtttagggatagccctcatctgtttggtcaggcactggcccaagatctagaccacttctcaagtcgaggtactctggtccttcagtatgtggatgatttacttttggctaccaatttggatgcctcatgccagcaggctactctagatctcttaaactttctagctaatcaaggatacaaggcatctaaattgaaggcccaactctgcctacaacaagtcaaatatctaggcctaattttagccagaggaaccaagaccctcagcaaggaacaaatacagcctgtgctggcttatcctcaccctaagacattaaaactgttgcaggggttccttggaatcacaggcttttgccaactatggatcactagatacagtgagatagccaggcctctctatattctaatcaaggagacccagagggcaaatactcatctaatagaatgggaaccagaggcagaaacagccttcaaaaccttaaagcaggccctagtacaagctccagctttaagccttcccacaggacaaaacttctttttatacatcacagagagagcagggatagctcttggaatccttactcagactcgtgagacaaccccacaaccagtggcatacctaagtaaagaagttgatgtagtagcaaaagtctggcttcactgtttaagggatggggaaccaatcaagcatgactgccaacaaattatagtccagatttatgccgcccgagatgatctcttagaagtccccttagctaatcctgaccttaacctatatattgatggaagttcatttgtggagaatgggatacgaagggcaggttatgccatagttagtgatgtaactgtacttgaaaactctttggcagcagtgactctccaaaaccgccaaggcctagacctcctcactgctgagaaaggaggactctgcaccttctcagggaaagagtgttgtttttacactaaccagtcagggataagttcccctctggaggacactacaactgcagggccctttcttcaccccatccagcaggaagtagctagagctatcatcggccaattcccaacagcatttggggtgtcctgtttagaggggagattgagaggtgaagccagctggacttcctgggtcgagtag

SEQ ID NO: 131515 - DNA, 269 bp, Homo sapiens
cttaggctgtacacacactgtggaatttcttcaagggagctgccggccggcgcagaacccccaggagcacaggtctctccgggccgctgtcctgcgtaactgttctccagagcgccagccagccacgggccactgttctcagtcactgccatttcctttggtcccttgagtttgatggaagacatgtggctcccttgacaggcctctcccattcttcgtgggacagcctgtgggtcagcggctgtgaaagccaaagcagattgggacat

SEQ ID NO: 131516 - DNA, 1045 bp, Homo sapiens
tcactcaatacccacaaccatcgaaaatggattcttagtaccagacaatcccagtaatgaaggtttagtttccttgaaggaaactgtgtgtccgagacggtgcttccgcacctctgtaaggggccggggtcgggggctgccctcacgctccccagattggccgctgggttgcagcccgcggctttcacgcagctctctcattagtgggccacgaaggtcaagggcagccgccgcctccttgcctgcattctgggcgctgcatgactccgaaccggatgctggtgttggtgtctgtgctggggttcgggggtcgctggtgaccagctccagcctgcctgtgtactgtgatgggccggcttcccctctcacccggatgctggtgttggtgtctgtgatagaaacaggaccactgttctcagtcactgccatttcctttggtcccttgagtttgatggaagacatgtggctcccttgacaggcctctcccattcttcgtgggacagcctgtgggtcagcggctgtgaaagccaaagcagattgggacatggtggcaccctttctgtcatccccctggtccaggccggtgtgcagggcttgacagagccacccggcaggaccctttggtgttgcctgcaggccgcagcgagagggcagaggtccttgcggctcttctctagggtccgacgtagatccagacaggaaagtcagtggggcattctggacatgtcgtcgcaccaggccagcgaagtaacaaagcgacaatcggccttggtccttctcaaagttaggtttccttgtctgtgatctgagcagacccgccagcaccatccggaggtcaaaggcgaaggcgggctcagaaccactgttactttcatcagtgataggatgagcggagaggcagaacaagtgcatgcacacacagacacacatatgcaaacacagacactcaaactcgcactcatacatggacacattcacacactcatacacagccatccccttggacaccccagtggctctggtggcagccagctgatctgtgtct

SEQ ID NO: 131517 - DNA, 619 bp, Homo sapiens
  misc_feature (1)...(619): n = a,t,c or g
tttttttttttgacttactaccatctttataaaaatcgaatatacacaccaaacacatcaaccaactgtggaaactgtatcccanttaaactttgataagacaacacaaagaactaattagctaagatgtggctggagttgaaagcacttcccaatagtattttaattttaaaaggtccatatttacatggtatgctaaatgctcttgcatctcattttaaatgcatgatgaactcaagaacaaagataatggttgcagcagatcttccacgagggtttggctggtgtgggctgacttcacgtgagcagcataccaaacacctaagtaccattcctttctcattctgcttctttccttttctgtagtttccttcaaggaaactaaaccttcattactggggattgtctgggtactaagaatccattttcgatggttgtggggtattgagtgaggtcggactggtgttggactgttctaatcagcgctttaaggcggggcctgcatgactttgccaatcacctttcaagaacattctatgagaaagtctgcctatgtgcatgtgtagacagttagagaaacacgcacacccccagggcctgtgtcacactcaggtaacac

SEQ ID NO: 131518 - DNA, 2617 bp, Homo sapiens
tttcgtgtctgctccacccacctgcgctcggctctgggttctgtagctgagagacgacctggaagttctgaggcagcctttgtgtggcgggaacacgcattggcagcgggagctgtcggtaggacctgggacaccgcggaagtcgggaaatggcctcagtggcctttagaggatgtggctgtgaacttcacccgagaagagtgggctttgctgggtccttgtcagaagaatctctacaaagatgtgatgcaggaaaccatcaggaacctggattgtgtaggaatgaaatggaaagaccagaacattgaagatcaatatagatatcccaggaaaaatctaagatgtcgtatgttagagagatttgttgaaagtaaagatggaactcaatgtggagaaacatctagccagattcaagatagtattgtgaccaagaacactcttcctgggagttaggtccatatgaaagccgtatgagtggagaagtcatcatgggtcattcatcccttaattgttacatcagagttggtgctgggcacaaaccacatgagtatcatgaatgtggagagaagccagatacgcataaacaacgtgggaaagccttcagttaccacaactcatttcaaacacatgagaggcttcacactggaaagaaaccatatgattgtaaagaatgtgggaagtccttcagttctttgggaaaccttcaaagacacatggcagtgcagcgtggagatggaccttataaatgtaagttgtgtgggaaagcgtttttttggcccagtttattacatatgcatgaaagaacgcacactggagagaaaccatatgaatgtaagcagtgttctaaagccttttctttttacagttcctatctaagacatgaaagaacacatactggggagaaaccgtatgaatgtaaacagtgttctaaagcctttcctttttacagttcctatctaagacatgaaagaacacatactggggagaaaccatataaatgtaagcagtgttctaaagccttccctgattccagttcttgtctaatacatgaaagaactcacactggagagaaaccctatacatgtaaacaatgtgggaaagccttcagtgtttccggttcccttcaaagacatgaaaccactcacagtgcagagaaaccctatgcatgtcagcaatgtgggaaagcgtttcatcatctgggaagctttcaaagacacatgataaggcacactggaaatggacctcataaatgtaagatatgtgggaaaggctttgattgtcctagttcactgcaaagtcatgaaagaactcacactggagagaaaccctatgaatgcaagcagtgtgggaaagcattatctcatcgctcaagctttcgaagtcatatgataatgcacactggagatggacctcataaatgcaaggtatgtgggaaagcctttgtttatcccagtgtatttcaaagacatgaaaggactcacactgcagagaaaccctataaatgtaaacaatgtggcaaagcctaccgtatttccagttcccttcgaaggcatgaaacaactcatactggagagaaaccctataaatgcacacttgggaaagcctttattgatttctgttcctttcaaaatcacaaaacaactcacactggagagaagccatatgagtgtaaggaatgtgggaaagcattcagtcgtttcagatacctttctcgacataaaaggactcacacaggagagaaaccttatgagtgtaaaacatgtaggaaagccttcggtcattatgataacttaaaggtacatgaaagaattcactctggagagaagccgtatgaatgtaaggaatgtgggaaagcattctcttggctcacttgctttctacgacatgaaagaattcacatgagagagaaatcctatgaatgtccacaatgtggtaaagccttcactcattcccgttttcttcaaggacatgaaaaaactcatactggagagaacccgtatgaatgtaaggaatgtgggaaagcatttgcttctctcagttccttgcatagacataaaaagactcactggaaaaaaactcacactggagagaacccatatgaatgtaaggaatgtgggaaagcatttgcttctctcagttccttgcatagacataaaaagactcactagcattctctctaaatgtatggaatgtgggaaagcatttattaattttatttcatttcagatacttgtacgaaacacattggagatagaccctgtgaatgtaagcacttggtaaagccttaagtagtttcagtttctttccagtacagtcatcccttgatacctgctgggtattggttccagcactccgtgagccatgtccagtcccttttataaaatgacatgtttgtatgtaacttacccacatcctcttgtatagtctcaattatgtctagattacttaaaatacctcatgcattataaaagctatgcaaatagttgttctattgtattgtttagggaatcatgataaggaaaagagtctatgtattttcagtatagatgcagtaattgtcagcctatcaacatagtgtagtcagccagaacattaaagtttctttgtttcaactccc

SEQ ID NO: 131519 - DNA, 1320 bp, Homo sapiens
atggatcaggcctcagtggctttagaggatgtggctgtgaacttcacccgagaagagtgggctttgctgggtccttgtcagaagaatctctacaaagatgtgatgcatgaaaccatcaggaacctggattgtgcccaaggaaaccacaattatgccctcaagaagggcatcactggattcagccaatcccccaacgtgcattcagatccccagctttccagtgctcagcagcttctctcagtacaaagggctccttccacagattcagtagcctttgaggatgtggcggtgaacttcacccacgaagagtgggctttggtgggtccatcacagaagagtctggacagagatgtgatgtgggaaaccattacgaacctggactgtatagggacagttagtggtattgacgctcacctccgtggacaaaacgatacgcaggctatatggctccggctgcatctggttcacctcgatactcacaggcagacgctgaacgacttttatccatttgacggtcgcattatgcgctggaagcagggagaacgctctatctttgcccatattcaaaccaaccactctggcgaagagaaaaggaagactgctatctgcaaaccaagaagcaggcccttactagagacatacaatgcaggaacggggaaacacagcccgaacaaccgggaaaaaaggacgtcgggcaaggaatgcagcctgaggaaagcagaaataacagccggaggggaccaaacagaaaggcaacgaaagcgaaaggaaagaggagaggatgggagcaaccacaaagacgaaaagaagaaaccaacggaaaaaagccaaggcagtacaagccgcagacaagaacccctcaaacaccgagttgtggaaggaaagggctttattcagctgggctgggagcatcggcggactcacgtttccaaaaaccgagctccccgaccctcggcgtccgggtgcagtgacttgggctgcgaacctgtactggttccgccgcacaatctggggagaagcggggctgagggcgcggagctgcccaaagaggggcgccggggccggggccgcattcgcagctcatggacgggacaggacgcccggggttccggtttgccggcccaaccccaccctgctggcaaacggaccgaggaccgagtgcccagggggcgggacctggagccctatccaatcagagctatggggcggggtcgtgagaactgtcaatcaggcgcacggctggcagtagggtgccaggttcaaagagcccgcggcgtcttcacgcccctgcgctcagctctagactcagtcgctcgctga

SEQ ID NO: 131520 - DNA, 339 bp, Homo sapiens
atgagtggggaactagatataattaagacaaacaggacctttcggtcctttaaacttaatcgaaggacggatgcactggtgtctgcagcttttgctgatgcacaagcattccattctttaactcatcgtaatgccacaggccttagaaaaagatggtcacatacaaagagctgggaaaaaggaaggataattatatggggacaaggatttgcttgtgtctttccagatgtgtatgaccatggaatggcagactggagggacccatggatcccaaccatggaccgggttcccccagtacgaggcatgagccagttgaatctgaatgcaaagatggaatga

SEQ ID NO: 131521 - DNA, 353 bp, Homo sapiens
gaactggctcatggctcatactgggggaacccggtccaaggttgggatccatgggtccctccagtctcccattccatggtcgtgcacatcttgagggcatccacacggttcgttcatctcactctgactgggatgaattctccagaatacatcttggggacatttttgccttgaggggaatgtttctcatcttctcttccagttctccactttccaggcacagaactgtgggcctcctgccgccactgacgtgcctcttcccacacccatccagagattctaaaacctgtgactccggaaggctgccggctcccccagcggaatgctcctggctttcgacggaatacctaaaa

SEQ ID NO: 131522 - DNA, 861 bp, Homo sapiens
tcaagtggcgtatgtttgagcaattacttgttgacagttatgttctatcttttcttcattgtctggaagaaatgtggctgggttaagagttgcacaagtgcgcagtcgcagcactggcccttcaagtaatagagcctgatatttaagtaaatggttgtctgacagccacaagtctcctttagcagttagtatgccattcacatcatggatgtccacacagtaagatccctgtattattttaactgcttcagatactaagcctgctactgctgccactacctgactgatataccagagatcaccaaactctcgggctgcagttatggtggcacttctctcatttggggttagtgtctgatttagcagtaacattatatctctccatgtcagatcaaaggattgccctaactcttgtaaaacatcaatatagccatcagggttatctgagaatttacctaggtctattttaatttgctttaagtcactttggaggtcccttcgtggtcgccaaaatgttaccgggtggtccttgctcacagaggtcccaagatggcggtgacccgcttccaagatggtggcaagccttgtgttctctgacctggggctcttggcctcacggattccgaggaatggaatcttgggccatgcggtaagtgttatagctccagataaatgctgaacctcagactccagagtgaaccggaagttgaagaggtaagacaggcagaccaacggactcttccgcagagaaagagagaagaggaggaacatctgaataccaagaggagtttgggagtggtcagagaggagtttggccactgtgcggcccaactccaggggaagattatcttcccactccat

SEQ ID NO: 131523 - DNA, 1719 bp, Homo sapiens
atgtattgcccacaagagactcactttagctttaaggacatacagacgctgaaagtggatggcagcaaatccttccaaacttcaaaaattgaagaggagagaatacatccaacttactttactgggcagacattaaccttacaccaaaactccctcctccgtcttgcacccagcgaacccctccgcattgtgcagaggctggctcaagccttatactcctggagaagcattttctacctcctgataaatgttgaatctcccttgtattataggttctcagggatgaagctgggtgggctgtcctctatacgccccctgcggctggcctggggtgaaggtagcttcctgctgccactactgtccagtggcctgacttctcctgacaccctcacagtcaatgccgcctcacctcctccccctgcacttcctggaatgggctctgctgaacccagcccaactctgggactcacccctgagcgcaaaagcgacgttgggcatgctggtaaaggaccactagaatccagcagcccggactgctttcttggtggtcaagaaaggtgggaaaaggggtgcaagactgctacatcagtaagcataactaatccgataagcagagatgagaaacattcccctcaaggcaaaaatgtccccaagatgtattctggagaattcagcccagtcagagtgtgtgtacctttttccctctcagacttgaaacaaattaaaatagacctaggtgcattctcagataaccctgatgactatattgatgttttacaagaattaggacaatcctttgatctgacatggagagatgcaatgttactgctaaatcagacactaaccccaaatgagagaagtgccaccataactgcagcccgagagcttggcgatctctgctgccgccgtgaagacaaaagggcatgtagtcaaacaacaatctcctccacagcctttaggggtttgagtcaaactctgaagagaaccaattctgagtcgggaactgccaggcaagcttttaaggagccagacagcacgagggttccccagattgcaggccgcggcgacgctgttcccccaacctctgaacaggacagagaaaagtttgcgttcacaataccagctatcaataatgaaaggtcagctctccgatttcattggaaagtacttcctcaaggaatgctgaacagtcctaccatctgtcagtatcatgaaaatcaggctttgctccccagtagaaaagaatttcataattgcaagattattcattttatggatgatattttactagcagccccaacggagccagcacttttaagtttatatgcctttgtcataaagaatgctcagttaggaggtttaatcatagtacctgaaaaagtacgattgtcctctccttggaaatatcttggatacatattaacttcccggtcaataagacctcaaaaggttaaattaaatgctagcaacttatacaccttaaatgattatcaaaaattactgggtgatattatttggctttgccccaccctggacataactactgataagttacaaaacctgttttctatcttaaagggcaatacagccctagactctcccagatgcatgacaagagctcgggaaccgctgaacgtcagtagaagctatagcacaggtggaccaagtgagcggggtgccttggcccatggacgagtgagtccctggttggcaaagtag

SEQ ID NO: 131524 - DNA, 843 bp, Homo sapiens
atgggctctgtcgggagccagtgccttgaggagcccagtgtggcaggcacaccagacccgggcatagtgatgagcgtcaccttcgacagtcaccagctggaggaggcggcggaggcggctcagggccagggcttagggcaggggcgtcccagctttcacggataccaggtgggctgtgtgacccccggtgaagccttgtggcatcggggagccatgggtggtcatggaggactggaggtagtgcctgtcacattggaggagccagtgcccaatgaccgctatcacgccatctactttgcgatgctgctgtctggcgtgggcttcctgctgccatacaacagcttcatcacggacgtggactacctgcatcacaagtacccagggacttccattgtgtttgacatgagcctcacctacatcttggtggcgctggcagccgtgctcctgaacaacgtcctggtggagagactgaccctgcacaccaggatcaccgcaagctacctcttagccttgggccctctcctttttatcagcatctgtgacgtgtggctgcagctcttctctcgggaccaggcctacgccatcaacctggctgctgtgggcaccgtggccttcggctgcacagtgcaaaaccagaatgagcaggtccttgtaggtggtccaggaaaggaggcaggggacaaggccaaagaacagcagcaaagcagggagaggcctattccgtcccccactgttcagttcctatattatacaaggttagatccctttctctatgagcagaagaaccaaaccatctgcagcttcggaggagaaaatgtgctttcaattatgcacctggcctga

SEQ ID NO: 131525 - DNA, 1285 bp, Homo sapiens
atgcgcacgggggccccgcgggactgggcggaaccccggggccagaacccggaatatggcgacataccttattggcgacgttcatggttgttacgatgaactgatcgcattgctgcataaagtagaatttacccctgggaaagataccctctggctgacgggcgatctggtcgcgcgcgggccgggttcgctggatgttctgcgctatgtgaaatccttaggcgacagcgtacgtctggtgctgggcaatcacgatctgcatctgctggcggtatttgccgggatcagccgcaataaaccgaaagatcgcctgacaccgctgctggaagcgccggatgccgacgagctgcttaactggctgcggcgccagcctctgctgcaaatcgacgaagagaaaaagctggtgatggcccacgcagggatcacgccgcagtgggatctgcagaccgccaaagaatcttcatattcatgcagatgcgcactgtgcggcggtgtctatcttgagaaaaagtatgatgtcacttatgcaataaagcccatttgttggacgcgtctcctcataattccgtcctgtctggctctgcaccgtattgaaactgagttaatgggcaaatttgatgaaggtaaactgcccaccgatccacacctgatgctccgactggccattgaaactgttgctcatgactatgatgtcatagttattgacagcgcgcctaacctgggtatcggcacgattaatgtcgtatgtgctgctgatgtgctgattgttcccacgcctgctgagttgtttgactacacctccgcactgcagtttttcgatatgcttcgtgatctgctcaagaacgttgatcttaaagggttcgagcctgatgtacgtattttgcttaccaaatacagcaatagtaatggctctcagtccccgtggatggaggagcaaattcgggatgctggggaaagggtacattcggccttttcgttaaattgggggaagccattagtgtttgaaaaggaccgcccctatagtgtttcggtgttcatagggttgttcctgcccatggcagaaaaaaccggcccccttaaaggtaaccccggcggagaatttctattgttcctaaggcaaattcaattggtttggttaccggctgcaggcatcatgacagaacactactttcctataaccgctacacaggctcttgagattaataatgcgatctctacgataatggagattttcccgactgtttcgttcgcttctcagtggataacagcaagcttctctgtttaa

SEQ ID NO: 131526 - DNA, 461 bp, Homo sapiens
tcagaattcggcacgagcggcacgaggtgtctgcagctctggcagaggactgtgtccactagacacgctgaagggactgggtacgtgttttccttcaggaccagagctgagaggagctgggatcgcggcggcaatggaacgggcctcagaaaggcgcacggccagcgcgctttttgcggggttccgggccttgggacttttcagcaacgacattccacacgtggtgcggttcagcgcgctcaagcgccggttctatgtaacaacctgcgtgggcaagagtttccacacctatgacgtgagtgacttcttttgttagcttcccaggaaaaccaccctccttggcctctaactctgtcctggagcagtccggttctcccttcccatttaccacgggcttcccttctttaacccctccctgtcctattaatatttcgccatccggtcacgtccacgtgctgatt

SEQ ID NO: 131527 - DNA, 2454 bp, Homo sapiens
atgtgttgcactgagggcagtctccggaaacgcgattcgcagcgggcgccggaagcggtgttgtgtctgcagctctggcagaggactgttccactagacacgctgaagggactgggtacgtgttttccttcaggaccagagctgagaggagctgggatcgcggcggcaatggaacgggcctcagaaaggcgcacggccagcgcgctttttgcggggttccgggccttgggacttttcagcaacgacattccacacgtggtgcggttcagcgcgctcaagcgccggttctatgtaacaacctgcgtgggcaagagtttccacacctatgacgttcagaaacttagtctggttgcagtaagtaattctgttccacaggatatctgctgtatggcagctgatggcagattagtctttgctgcttatggaaatgttttctctgcatttgcccgtaataaagaggcaccagccgtggatgttgttgctattggtcttatgtcaggtcaagttatcattcacaacattaaatttaatgaaacattaatgaagtttcgtcaagactggggacccattacttcaatttcatttcgcacagatggtcatccagtaatggcagctggaagcccatgtggccatattggactctgggatctagaagacaaaaaattaatcaaccaaatgagaaatgcacactctacagcaattgccggactgacatttctccatagagagccacttcttgtcacaaatggcgctgacaatgctcttaggatatggatatttgatggtcctacaggtgaaggccgacttttgagattcagaatgggtcatagtgctcctcttaccaatatcagatattatggacagaatggacagcagattctaagtgcaagattaataaataaaaagagagttaaacgtaaaggacttcagaataccatgtcagtgagacttccacccatcacaaagtttgcagcagaggaagctcgtgaaagtgactgggatggtatcattgcttgccatcaaggtaagctatcttgctcaacctggaattatcagaaatctacaataggcgcttactttctcaagccaaaagagttgaagaaagatgacataactgcaacagcagtggatataacttcttgtggaaactttgctgtaattggcctctcatcaggaactgtagatgtatataacatgcagtctggcatacatcgaggaagttttggcaaggatcaagctcacaagggatctgttagaggtgtcgcagtggatggattaaaccagttgacagttacaactggtagtgaaggattactcaaattctggaactttaaaaacaaaattttaatccattctgtgagcctcagttcatctccaaatatcatgttgctacatagggacagtggcattctgggactcgccttggatgacttctccattagtgttctggacatagaaactaggaagattgtcagagagttttctggacaccaaggccaaataaatgacatgatcccactgcggcgtgatccctgcgtgggccatcaccagctttttctcttcgtcgatttgcagcagaggctggcgccgcagccagttaagcagctcgtcggcatccggcgcttccagcagcggtgtcaggcgatctttcggtttattgcggctgatcccggcaaataccgccagcagatgcagatcgtgattgcccagcaccagacgggtaaattctactttatgcagcaatgcgatcagttcatcgtaacaaccatgaacgtcgccaataaggtatgtcgccatattcttttaatgaatgagtgtgggaacggcgagtcggaatacgggaatgtcgatgctgaaaggacgccattttcatcgatcatttcgtacagttggtcgtataccggcatggcctctatctgttatatgaccggcgaaattaaaaaccccggaaaaaccatgccacgagcgctgattggttcctgtctgctggttctggtgctctacaccctgctggcgctggtgatttccggcctgatgcccttcgacaaactcgccaattctgaaacgccgatttccgacgccctgacctggatccccgcactcggcagcaccgctgggatctttgttgccatcacggcgatgatcgtcattcttggttcgctttccagctgcgtgatgtaccagccgcggctggaatacgcgatggcgaaagacaacctgttctttaaatgcttcggccatgtgcatccgaaatacaacacgccggatgtctccatcatcctgcaaggggcgctggggatcttcttcatcttcgtttccgatctcaccagcctgctgggttatttcttaacagccaaagactggaaactggtgttccatcgtaaactgatcggcgtttatcttgggcaatttgcggtggcttctgtcatgtacagtgcgttacgcccagcgtaa

SEQ ID NO: 131528 - DNA, 3544 bp, Homo sapiens
ctcgtggggaaaaggcagggagggggtggtgtccccagccggtttggggggtgcgttgcccggagacggaaagtttgggagcccgagcaggctcggctgcagcctcggggagggggtccagcgggtggcggccctggggatggggaaggagcaggagctgctggaggcggcccgcaccgggcacctcccggcggtggagaagctgctgtccgggaagcggctctcctcaggctttgggggcggcggcggcggtggctctgggggcggcggcggcggcagcggcggcggcggcggcggcctcggctcttccagccaccccctctccagtctgctcagcatgtggagagggccaaatgtgaactgtgttgacagcactggctacacacccctgcaccatgctgctttgaatggccataaggatgtggtcgaggttcttctgaggaacgatgcgctgaccaacgtggctgactcaaaaggctgctaccctctgcatttggcagcctggaaaggagatgcccagatagtgcggttgctcatccatcaagggccttcacacaccagagtcaatgaacagaacaatgacaacgagacagccctgcattgtgcagcgcagtatggccacacagaggtggtgaaggtgctcttagaggagctgacggaccccaccatgcgcaacaacaaattcgagacccctttggacctggcagcactgtacgggcgactggaggtggtgaaaatgctccttaatgcacaccccaacctcctgagctgcaacactaagaagcacacccctctgcacttggcagcaaggaatggccacaaagccgtggtccaggtcctcctcgatgctggcatggacagcaactaccagacggagatgggcagtgctttgcatgaggctgctttgtttggcaagaccgatgtggtgcaaatcctgctggctgcaggaactgacgtcaacataaaagataaccatggactgactgccctagacactgttcgggaactgccttctcaaaagagccagcaaatagcagcattaattgaagatcacatgactggaaaaagaagtacaaaagaagtagataaaacccccccaccccagccacctctcatctccagtatggactccatatcacagaagtctcagggtgacgtggagaaagcagtgactgaactgattatagattttgatgcaaatgctgaagaagagggtccctacgaagctctgtataatgccatctcctgccattcgttggacagcatggccagcgggcgatcatctgaccaagactccacgaacaaggaggctgaggcagcaggagtgaaacctgctggagtgaggcctagggaacgtccaccacctccagcaaagccaccgcccgatgaagaggaagaagaccacatagataagaagtattttcccttgacagcttctgaggttctgtccatgagacctaggattcatgggagtgcagcccgggaagaagacgaacacccttatgaactgttgttaacagcagagacaaagaaagtggtgttggtggatggaaaaacaaaagaccacaggcggagcagcagcagccggagccaggactctgcggaggggcaggacgggcaggtcccagagcagttctcaggcctcctccacggctcctccccggtgtgcgaggtggggcaggaccctttccagctgctctgtaccgctggccagagccatccagacgggtccccccagcagggcgcctgccacaaggccagcatgcagctggaggagacgggtgtgcatgctcctggagcctcccagcccagtgccctggaccagagcaagagagtgggctacctcacaggcctgcccaccaccaacagccgctcgcaccctgaaactttgactcacacagcatctccgcaccctggtggtgctgaggaaggagaccggagtggggccaggagccgagcgcctcccactagcaaacccaaagctgaactcaaactcagccgcagcttgtccaagtctgactctgatctcctgacctgctcacccacagaggacgctaccatggggagtcggagtgagtccttatccaactgcagcattgggaagaaaaggctagagaagtcaccctccttcgcctcggagtgggatgagattgagaaaatcatgagttctattggagaagggattgacttttctcaggaacggcagaagatctcaggttcacggacgctggagcagagtgtcggggagtggctggagtcgattgggctgcagcagtatgagagcaagttgcttctgaatggctttgacgatgtccacttcctggggtctaatgtgatggaagagcaggacctgcgggacatcggcatcagcgacccacagcaccggcggaagctgctccaggcggcacgctccctacccaaggtgaaggctctgggttatgacgggaacagcccccctagcgtgccctcctggctggactccctggggctgcaggactacgtccattccttcttgtcaagtggttacagctccattgacaccgtgaagaacctctgggagctagagctcgtcaatgtcctgaaggtccagctgctcggccatcgcaagcgcatcatcgcctccctcgcagacagaccgtacgaggagccgccccagaagccccccagattctcccagctgaggtgccaagatttgctctcccagacgtcatccccactgagtcagaatgattcctgcactgggcggtcggcagatctgctgctgcctccaggggacacaggcaggaggcgccatgacagtctccatgaccctgcggcaccctcccgagcggagcgcttcaggatccaggaggagcaccgtgaggccaagctgaccctgcggcccccaagcctggcagccccctacgccccagtgcagagttggcaacaccagccagagaaactcatcttcgagtcctgtggttatgaagccaattatctgggctccatgctgatcaaagatctgcgagggacagaatccacgcaagacgcctgtgccaagatgcggaaatctacggagcacatgaagaagatccccaccatcatcctgtccatcacatacaaaggtgtcaagttcatcgatgcctccaacaagaacgtcattgcagagcacgagatccggaacatttcctgtgcggcccaggacccggaggacctctgtacctttgcctacatcaccaaggacctgcagaccagccaccactattgccatgtgttcagcaccgtggatgtgaacctgacctacgagatcatcctgacgctggggcaggccttcgaagtggcctatcagttggccctgcaggcccagaagtccagggcgacgggcgcctctgcagctgagatgattgaaacaaaatcttccaaaccggtgcctaagcctcgggtcggcgtgaggaaatccgcactggaaccacctgatatggaccaagatgcccaatcccatgccagtgtctcctgggttgtggaccccaaaccagactctaagcggagcctcagcaccaactga

SEQ ID NO: 131529 - DNA, 1156 bp, Homo sapiens
atgtggggtattggttcgaggacccccatctataacaaaatccttgtatactcaagtcctgaggtcagctgtgagaaacccaagtatgtgaaaagtcagacctctacacacacaggttttgaatcccacaaacgctatattttttatctgcgtttggttggaaaaaatctgcatgtcagtgccatgggcttggggaagagccaggagagaaggaagaaggctttgaagagccagccccagcagcctgctgacagttttccttctctccccactgtggaaggactgactaccagtggagaggtggcagcaggcttttggctaagtggagaggctctctcttcctgtgtagtttgtggagaggcagcgttgactcaagtctctgcccatagaatggctttcctcaagtcctatgtggcagatgacatcaagggtgaggggaaggagagtctggttgggccctggctgaggagaaaagctcttttttcatttgctgctgagcaccagagccagtccctgattgggggcttgagcttgcttcctgtcatcagttacagaatattagatagtgtgcaactttggggcttggctgtggggaatgccaagaatagttacaagataagcagtggatttaaaaacagagtgtattttgcactgtctgatgagtacattgtgtctccgaagttgagattccacatagtgagccttggaaaacaactgctgctctgcgaccctggcatgtggagagggccaaatgtgaactgtgttgacagcactggctacacacccctgcaccatgctgctttgaatggccataaggatgtggtcgaggttcttctgaggaacgatgcgctgaccaacgtggctgactcaaaaggctgctaccctctgcatttggcagcctggaaaggagatgcccagatagtgcggttgctcatccatcaagggccttcacacaccagagtcaatgaacagaatgctcttgagatcaaagaactcaaaaagtacggcccctttgacccttatatcaatgccaagaacaatgacaacgagacagccctgcattgtgcagcgcagtatggccacacagaggaggtgaaggtgctcttagaggagctgacggaccccaccatgcgcagcaacaaattcgagacccctt

SEQ ID NO: 131530 - DNA, 1179 bp, Homo sapiens
atgtttggtgtaccacaaaacttaacacaacctgaggaatgtgaacacaacatcccatacccagataagcacccattggcttttagcctctctgatgggcacataaagaccatgggctctaaatgtgatggagcacacgtaacatcagtggtactgaccatcaaccagcatgttgtagtgttagttttaaagaacagtgagttcagagtttcctctctgtggtctcagcagcagcagcagcagcggcagcagcagcaaccctctctcagtcatgcatccatccatgactgcatgcagacagacatccatccacctgcccctcactctttcttccttggaaaatttcatataggcctatggcttcatcttaaagctcaatgtggatatctgatcagcaaagcctcttccaccctttgtgcgagttgtaacaaacgtccccttcctccagatgcacaatgctcgcatcaggatcttcagcttggcagcaaactgagctggatttcagcccctgctcagcctgcacaacctcagacagttgccctgctgggctatactaaaattttattcaaagtttctgaccaccattcagattattatcgaaaaaatcataagccatttcctaacaaatgtacccccaagcccccaagtgatataggagttaagaaggaattccttaggcagacagcaaggccatgggagtccttggtattaaagaaaagtttaaaagaaatatttgttccacttaaagttcttaattacaagcaaaagaggttaaaaatgacaaacttaagtaaaagaagaattattagaatacatcatggactcagaattaatagaaaccttcagagcttcagagggccagaaaaaatattagataaacataaaaagcaggaacccagaggcatggatcacagctcctcgccagcaacagaacaaggctggatggagaatgactttgacgagttgacagaattaggcttcagaaggtcggtaaaaacaaatttctctgagctaaaggaggatattcaaacccaccgcaaggaagctaaaaaccttgaaaaaagattagacaaaaggctaactagagtaaccagtgtagagaaaaccttaaatgacctgaaggagctgaaaaccatgacacgagaactacgtgacacacacagaagcttcagtagctga

SEQ ID NO: 131531 - DNA, 257 bp, Homo sapiens
gaagaggcttgcactgttattctgctggaacatggcaccaatccaaaccttaaggatatctaccgcaacactgctctccattatgctgtgtatagtgagagcacctcactggcagaaaaactgcatttccatggtgcaaatattgaagcactggacaaggtattgtcaatatccttcttaagcaaaatattgatgtcttcactaaagacgtgtggacgagatgcagaagattacactatttctcatcatttgacaaa

SEQ ID NO: 131532 - DNA, 1356 bp, Homo sapiens
gcaatatttaaaataaaatcttagacaattatttcaaaataatttgcatttgcattcagggaatggttgagcttccaaatataaaaaattgacccttacctgtgtcaatgttaaaacaaatattttggaaagaaagttgattgatctataccttgtccagtgcttcaatatttgcaccatggaaatgcagtttttctgccagtgaggtgctctcactatacacagcataatggagagcagtgttgcggtagatatccttaaggtttggattggtgccatgttccagcagaataacagtgcaagcctctcctggttagcagaaaatgccagattgatatctgtgacaaagaaaatagaacgcctttgatacaggctgtccattgccaggaagaggcttgtgccgttattctgctggaacatggcgccaatccaaaccttaaggatatctaccgcaacactgctctccattatgccacgtatagtgagagcacctcactggcagaaaaactgctttcccatgatgcagatattgaagcactggacaaggcccgctactggggtgactaccaactaacggggcacccagagaatgagaaaacatggacatccaccagtgaaatttccctaaaggaggattttgccgatttcggaaccaccatcaaacaggattttcgcctgctggggcaaaccagcgtggaccgcttgctgcaactctctcagggccaggcggtgaagggcaatcagctgttgcccgtctcactggtgaaaagaaaaaccaccctggcgcccaatacgcaaaccgcctctccccgcgcgttggccgattcattaatgcagctggcacgacaggtttcccgactggaaagcgggcaggattttgccgatttcggaaccaccatcaaacaggattttcgcctgctggggcaaaccagcgtggaccgcttgctgcaactctctcagggccaggcggtgaagggcaatcagctgttgcccgtctcactggtgaaaagaaaaaccaccctggcgcccaatacgcaaaccgcctctccccgcgcgttggccgattcattaatgcagctggcacgacaggtttcccgactggaaagcgggcaggattttgccgatttcggaaccaccatcaaacaggattttcgcctgctggggcaaaccagcgtggaccgcttgctgcaactctctcagggccaggcggtgaagggcaatcagctgttgcccgtctcactggtgaaaagaaaaaccaccctggcgcccaatacgcaaaccgcctctccccgcgcgttggccgattcattaatgcagctggcacgacaggtttcccgactggaaagcgggcagtga

SEQ ID NO: 131533 - DNA, 2280 bp, Homo sapiens
tcaggacagtgccgcctgcatccctgcagctccagctccagctccagccatggctgaaagatgcacaggtacagcttgggtcactgcttcagagggtgcaagctgcaagccttggtggcttccacatagtgttaagccagcaggtgcacaggcttgggagcctttgtctagactcaagagtatgtaaggaaaaacctcagtgtccagctgggcagaagcttttccaagaggcagagcctcatgggaaacctttactgtggctttgcaggcttcagcccccatggctgctcccatgggctgggctggtgtggagtgcctgtagcctttccatactgagggtgcgagctgttggtgggcttatgaatctggggtctggaggatggtggcctcctgtgtgggagctccaagcccatattttccttctgcactgccatagtggaagtttcccaagaggctctgcctctgcaggaggcttctgcctggcaacagtgggtggtggtatgggcggtggttccttcaccattggcctggtccgtggggcttcgtctgtgggaccagacaatggggtcatgatcggtggaacctgcaggacctggtcagtgggggctgctgagtactgctgggagatgtcaggggaaatgcatgttatcgaggagcctgtggacagctggggtggcccagtcgtgttcaatggcccagtcaaaagtggacaaagcaggtgtttggatggacctgggagatcttgctcagagattctgacaggacaaagaccctggggcctaggagagaagaatggtatccggggccagccccatggccctgctgctgtgtgcagcctcaggatactgctgcctgcatcccagcagccgcagctcctgctccgaccttggctgaaagatgcacaggacactgctgcctgcatccctgcagctccctttccagctccagccatggatgaaagatgcacaggtacagcttgcatcactgcttcagaggatgcaagctccaagccttggtggcttccacacagtgttaagccagcaggtgcacagagcacaaaactagaggcttgggagcctttgtctagactccagagtataactgctctacatttggcctgtgccagtggccatgtgaaagtggtcactctcctggttagcagaaaatgccagattgatatctgtgacaaagaaaatagaatgcttttgatacaggctgtccattgccaggaagaggcttgcgccgttattctgctggaacatggcaccaatccaaaccttaaggatatctaccgcaacactgctctccagtatgctgtgtatagtgagagcacctcactggcagaaaaactgcttttccatggtgcaaatattgaagcactggacaagctgtccactccccatcggaggccgagagcagccagccgtgctccctggtccagctcaccaagccccgcagctctcctcctccacggacgggaaagcctgcgctgcgccaccagagtcactcgcctccgccctgtcctcagaggagtagctcccaggctgctgcctccaggacacaggttcctcttcaggggtggggcgctgccccttcccaagtggctcaatttctggcggaacggcctcggggctgtagcccccccaggagctgtccctgtcagcctcctggcagccgtgggccggccggctcccagggcttttctggtcccaggtcccacgtctggggtaggggctggtggagccggtgagctcttttacgactcgccgtaggcggccgggctgccgggtcccctgcaatcgccttcccctggtgaagacactttgggttttgtggtggttgtggtggttgtggtggttgattgttgttatgagatggagtctcactcttcctgcccagttttgtcaaatgatgagaaatagtgtaatcttctgcatctcgtccacacatgtcttgagcgaagacatcaatattttgcttaagaaggatactgacaatacctggtgagtcatagtatacagcaagcatgagagctgaccgtctcagcctatcaacggcatgtgtacttgctttctttttcaataaaaattccaccattttctctttcttgcaaattatagcgaataaaagtggggtattactgtccttgtccagtgcttcaatgtgtgcaccatgggaaagcagtttttctgccagtgaggtgctctcactatacacagcataatggagagcagtgttgccgtagatatccttaaggtttggattggcgccatgtttcag

SEQ ID NO: 131534 - DNA, 457 bp, Homo sapiens
caaaaaggccattggaaacaaggatgccaagtttgtggaggaacggagaaagcagctccagaattacctgcgcagcgtcatgaacaaagtcatccagatggtccccgagttcgctgccagccccaagaaggagaccctcatccagctgatgcccttcttcgtcgacatcaccccgcccggagagcctgtgaacagccggcccaaagcagcttcccgctttcccaaactgtcccggggtcagccccgggagacccgcaacgtggagccccagagcggtgacctctgacctcgacaaaaccgcagccacgggccctgtgcgtggcaccagctgcgtccaccccagccactgccgctggcccctcacctcagcgtgacaaccacgtcccactggtgatcctgagagcacacgattcccaacagttacacaacaccccgattaaactaatcagtcttcaaa

SEQ ID NO: 131535 - DNA, 630 bp, Homo sapiens
gatgccaagtttgtggaggaacggagaaagcagctccagaattacctgcgcagcgtcatgaacaaagggatgcagatggtccccgagttcgctgccagccccaagaaggagaccctcatccagctgatgcccttcttcgtgtaagtactgctcccatggacatgggccgccagccctgccagcattttttttctcggtcgttttggaaggtcagggagcacagcggctctccgtgatgccctgatcgccatgggacccaggcgaactccaggggctgttccaggtgccaaagtggaggttgggtctcagcgctttggagcttctaaagggatgggaagagagcaggcctgcaaatgagcattgttgacttgaggctcacaaagaaaccttggggctctgtgattttgtactttcacacatttcgatcaagggaagattaattttctgtacagcccacgggtgctccaaaactgaaacaaattgtgtcagtgtttctcaagcttgggtaatgaacccaaggaaagttctcccagactcctaccagtattgacttaaattatttttatatgagttttacttaaaaatgaacattaatattatttaaatgccttcttctctcttgaaaaaagt

SEQ ID NO: 131536 - DNA, 557 bp, Homo sapiens
cctcattctcccctatggaagaccttgtgtagcccttcatcaggcgtgtgttgtggctttgtcacactgttttgtaatgatcgctttgcatgtcttttccagctgactccgccaccatctcctgcctggatgactgcagcagcatccttgctggcctctctgcttcctgcattgcctcctctgaatcttcaggatgccaagtttgtggaggaacggagaaagcagctccagaattacctgcgcacggtcatgaacaaagtcatccagatggtccccgagttcgctgccagccccaagaaggagaccctcatccagctgatgcccttcttcgtgatgggattacaggtcggaatgtacggattgtttcattttggggtaatgatggatcagccacagccaagccttacccgtgctgacgaatctccatgtgatcgtgtcctttctccatgtgctgcccacagaaagcagcgagactgctgtctcagctggaaagctgagcctgagtgatttctggttaaataaaaataaaaaataaaaatctcctgcctaaggaaata

SEQ ID NO: 131537 - DNA, 744 bp, Homo sapiens
atgaggcccactgagaagtcagcatgtcccactagcagcaggtacacgtggcagagcatgtgcacgttagcagtgacatcagcctcatctgagagcttgtcggatgtgcagatttcaggccccatcccagacctgctgcatgagaatctgcatgttcacaggcccccagccgccaccatctcctgcctggatgactgcagcagcatccttgctggcctctctgcttcctgcattgcctcctctgaatcttcaggtgacctccgaagtcacctcctcccaggtatttgttctctcaacaaatgtgtatggagcctcttgggatctccaggcactgtgataggctccggcgataaagggatgaaccagacagataaggtgcctgccttggtggaattaccatctagcaagggaggtgaggaagacgtaccaaagcgaagatgttttgtgtttcctcaggatgccaagtttgtggaggaacggagaaagcagctccagaattacctgcgcagcgtcatgaacaaagtcatccagatggtccccgagttcgctgccagccccaagaaggagaccctcatccagctgatgcccttcttcgtgtcagggagcacagcggctctccgtgatgccctgatcgccatgggacccaggcgaactccaggggctgttccaggtgccaaagtggaggttgggtctcagcgctttggagcttctaaagggatgggaagagagcaggcctgcaaatga

SEQ ID NO: 131538 - DNA, 996 bp, Homo sapiens
atgacatcatactggagtaagtcagttggtagtgatgacagcgggggagccagaagcaggcagggtctgccctcctgggtgccgctgcagctgcccgacctgcagctgcagacctggttgtcccactccatccacagagcaggcaggagccggggacaagttggagacctgccccttccgagttggtggagcaggagctcgctgggtgcagctgtgactgccctcccagggctggaagacagagatccaccaggctctcaattgaaagccctggagggctacaccctaagaacagaagtgaatcggagcctgcctgggagacacttcccagtaggggctgagagacacctcattaaggagagctcttgctggcatctggtgggtgcccctctgggacaaagcttccagaggaaggatcaggcagcaatatttgctgttctgcagcctccactggtgatacccaggcgaacagggtctggagtggacctccagcaaactccaacagatctgaaactgagggacctgactgttagaaggaaaaccaagaaacagaaaggaatagcatcaacatcaacaaaaaggacatccacaccaaaaccaacatcaagaccaaaggtagataaaagaccaaaggtagataaaaccacaaagatggggagaaaccagagcagaaaggctaaaaattccaagaaccagaaagcctcttctcctccaaaggatcacaactcctcgccagtaagggaacaaaactggacggagaatgagtttgatgcattgacagaagtagggttcagaaggtgggtaataacaaacttctccgagcgaaaggagcatgttctgacccattgcaaggaagctaagaaccttgaaaaaaggttagaggcatggctaactagaataagaataactagtgtagagaaaaacataaattacctgagggagctgaaaaaaacagcacgagaacttcatgaagcatacacaagcttcaatagctga

SEQ ID NO: 131539 - DNA, 725 bp, Homo sapiens
  misc_feature (1)...(725): n = a,t,c or g
ttttttccgctggtcattgagccccagnagnatgttgtgccagtganctgtggactcatacacatacatggggagtcagggcttctcatccacagacatgccgttcacaccatgtattttttccaggtcctgtgctgccttcgagtcttaggatgcagggaactgggcgaagggagagatgagaaggctctggcaatccattcagacatggaccccanagttttgtggggcaaccttgtgacaggtcagtgagtgtccaccttgttcatgctgcagggatgggagcaagggatcagacatgtcacagtgcgaggaagctcttgaagattctcctcattcctggagccctcactttctgaagcagacagctgctgtgcttcaagggctcatcagcttggtcccaaatgatgtcttcagtaggtggcgaaatgttaaaactgggagctatgtgaatgaatgcgctcgccggagaactttgcgtccttttccgcctcctcttccccgcgtcttcccggctcgcagccccctcccggcagccggcgaggtgggcagttcgtgggtcaccgaaagctcgcggaggggacgcgcatcacatggcagctcgttcccagccccccgagtgcgccgggaagggggaggggaaggggcgaggggaggccggggggaaagcgagagcggggcggcggcgggagtgggcaggcggggtggcgagggcggcggccgca

SEQ ID NO: 131540 - DNA, 2403 bp, Homo sapiens
accccgcctgcccactcccgccgccgccccgctctcgctttccccccggcttcccctcgccccttcccctcccccttcccggcgcactcggggggctgggaacgagctgccatgtgatgcgcgtcccctccgcgagctttcggtgacccacgaactgcccacctcgccggctgccgggagggggctgcgagccgggaagacgcggggaagaggaggcggaaaaggacgcaaagttctccggcgagcgcgttcattcacatagctcccagttttaacatttcgccacctactgaagacatcatttgggaccaagctgatgagcccttgaagcacagcagataagagtgttgctgttgatcatctttgcctgggaagttgaatgataaagccagaagaaagcatgccttcctgatcattgcagctgtctgcttcagaaagtgagggctccaggaatgaggagaatcttcaagaacttcctcgcactgtgacatgtctgatcccttgctcccatccctgcagcatgaacaaggtggacactcactgacctgtcacaaggttgccccacaaaactttggggtccatgtctgaatggattgccagagccttctcatctctcccttcgcccagttccctgcatcctaagactcgaaggcagcacaggacctggtaaaaatacatggtgtgaacgggaatgtctgtggatgagaagcctgactccccccatgtatgtgtatgagtccacagtccactgcaccaacatcctcctgggcctcaatgaccagcggaaaaaggatattctctgtgacgtgactttgatcgtggagaggaaggagttccgggcccaccgggctgtgctggccgcatgcagtgaatatttttggcaggcgctggttggacagacaaaaaatgatttggtggtcagcttgcctgaggaggtcacagccaggggctttgggccgctgttacagtttgcctacactgccaaggctgttactcagcagagaaaacatccgcgaggtcatccgctgtgctgagttcctgcgcatgcacaacctggaggactcctgcttcagcttcctgcagacccagctcctgaacagtgaggatggcctgtttgtgtgccggaaggatgctgcgtgccagcgcccacacgaggactgcgagaactctgcaggagaggaggaggatgaagaggaggagacgatggattcagagacggccaagatggcttgccccagggaccagatgcttccagagcccatcagctttgaggccgccgccatccccgtagcagagaaggaagaagccctgctgcccgagcctgacgtgcccacagacaccaaggagagctcagaaaaggacgcgttaacgcagtaccccagatacaagaaataccagcttgcatgtaccaagaatgtctataatgcatcatcacacagtacctcaggttttgcaagcacattccgggaagataactctagcaacagcctcaagccggggcttgccagggggcagattaaaagtgagccgcccagtgaagagaatgaggaagagagcatcacgctctgcctgtctggagatgagcctgacgccaaggacagagcgggggatgtcgagatggaccggaaacagcccagccctgcccctacccccacggccccagctggcctctgcctggagagatccaggagcggaattatggacagccccacgtggccagaaggaggtgtccaacttcaccatggggtcgccctcagggggcctgggttggaggctctctgtaaacaggagggagagctggaccggaggagcgtgatcttctcctccagcgcttgtgaccaagtgagcacctcggtgcattcttattctgggggagccagattccttgccacagaacatcaggaaccaggcctgatgggagatggaatgtacaaccaagtgcggccccaaattaaatgtgagcagtcttatggaaccaactccagtgacgaatccggatcgttctcggaagcagacagtgagtcgtgtcctgtgcaggacaggggccaggagacaggaagcacatctgacctcaggctgagcacaaagctccagtcctgctctggacccatgtttaaggggccaactgctactgttgctgccactgagagctggggtactgtcttgcaaaatatcccactaggctgtgctgggactggggaagaggtgacatataccaatcctcctcctcgaggcagagccgctcttgtccctagatctcctctgacggtgtacagctcctccctgcccgagcatcagacctccctcaagcagtgtgcccaggcaggccctggtgtctgcctgctcgtccacaaccattggcagctgttggaaggggctttcagttgccttgcttctcactga

SEQ ID NO: 131541 - DNA, 1092 bp, Homo sapiens
atggggccttactatggaagaataaaatttagacaaaagaatttagacttgaccaggaagatgctgagagcatttcatgagaattcttcaagaattgctgaggttctatggacttcagagaatgtatttgacatggggacaacttgggcccttagtagatgcttcttgatggagccctggtgtctgcctgctcgtccacaaccattggcagctgttggaaggggctttcagttgccttgcttctcactgaactgctttaacaccagtttcctaagagctcagctacacagaaaaggtgggaaacaggtccagggtcacaaaccagtcagcggtaggtttggagactcagtggccgagtcgaagccccttgttgttcaggcagatgccgtgcagagggagctagagagctgcctaagaagggagtacacccctgaaaatttacctttgcttctgttgcagatcaagccaaaatgtgatccatggcaaaagaagcttttgactaaattaaaagaacggagaagaacagatgcattattgcaactccaagcaaagtttttgaagggtgtgaacggcatgtctgtggatgagaagcctgactcccccatgtatgtgtatgagtccacagtccactgcaccaacatcctcctgggcctcaatgaccagcggaaaaaggatattctctgtgacgtgactttgatcgtggagaggaaggagttccgggcccaccgggctgtgctggccgcatgcagtgaatatttttggcaggcgctggttggacagacaaaaaatgatttggtggtcagcttgcctgaggagtcacatttgacccatctacactcccttggcagccaaccgctgtgctcctcaagggggccagcacagccaggcctgagagttcctcctaggagcctgaaacttccgaacacaaactgccactcctccccccaactccccatccaccttaggccaaacccagatctgccgtccagcgactgtccagttgtgcaattccacccccaaatcccaattcctgatgagccacgccattaccagcacattagagccactcacagagcccagcatagtctctaa

SEQ ID NO: 131542 - DNA, 400 bp, Homo sapiens
  misc_feature (1)...(400): n = a,t,c or g
acccttataaagaggtggattgccgctgcagcctccatgggccagcctaggaacagtgaatcttcttgctttcttaactgagaggcttgtagcctggggcaagttctcagccttactcactggctgcctggaaatacacttgagctgtcgtnnnnnnnnnnnnnnnnnnnnnnnnnnnnnnnnnnnntggnnnnnnnnnnnnnnnnnnnnnnnnnnnnnnnnnnnnnnnnnnnnnnnnnnnnnnnnnnnnnccaccagagtaggtgctggtatccacagctgagagacctgaagatggatcacatcacaggactctttgcagacactccccagcctggagcctggtaactccactgagtggctaggtccagaagaaaaatagtcactgcagttcagctct

SEQ ID NO: 131543 - DNA, 714 bp, Homo sapiens
atgtcgctgctacctgaacacctttgtatggaagtctgcattcctcaagatttacagaattcacggaatggatcagagaaacagcccagagctgctgtttgtattctatcagtgagattcactggagaaaaccagaggtcaagcggatgtactcttgaaagtccgatcaacacaaaaccagtgcaccgaacaaaaatacaaccaaagaccctcacagagtccacttcactcccctgctacctccaccagagcaggtcctggtttccatggctgagagacctgaagatggatcacatcacagaactctttgcagacactccccagtaccagcccagagccaggatcacaccagcccacaagcaatggatccaaaccaagacaaaaatctctaaattgccagaaaaagaattcagaaggttgatgattaagccaatcaaggagataccagagaaaggtgaactccaacttaaagaaatcaaaaacatgacacaggatatgaaaggaatattcttcagtgaaatggatagcataagtaaaaaacagtcacaacttctggaaatcgaggacacccttatagaaatgcaaaatgcactggaaagtctcagcaatagaatcaaacaagcagaagaaaaaacttcagagcttgaagacaaggcttttgaattaactcaatccatcaaagacagagaaaaaaagaattcaaaaaaaaaatga

SEQ ID NO: 131544 - DNA, 1251 bp, Homo sapiens
atgactggcgtactcctaacagattctcagaaggaaggcactgagagtggatggagggaagacacagaagctggaatgaagtgggagaaaactggactcattcctggtctctggtggctccgggggaatgggttgcacagtgaattaaaagatgctgttgaaaaaaaattggaggcctttccccttggcacagaggtaggaactgacatatatgcagatgatgaaacagtcagaaaccttcaagaacaattgcagctagccaatcaagaaaaaactcaggctgtggaactctggcagactgtttctcaggagttggacagactacacaagctttaccaggaacatatgactgaggcccagattcatgtatttgaaagtcaaaaacaaaaggatcagctatttgattttcaacaactgaccaaacaacttcatgttactaatgagaacatggaagtgagtgggctttccacgaatccaaaagagattgagtgttttggcctaagcctgcaattattgcagccatttcagaacattgcagccatttcagaacattgcagaagccatttcagaaccattcctaggcttagattcctaagcctaggaatgctgcagctcttagatcctcctacatacacagacttgctagacttcgctcagggttctcctggttatctctacccacatggctcagaggcacctgaaaagcagcaggctccaaagcaagccaaattagagctgagagttgctgtagcaaaagtggaagagttaactaatgtgactgaagatctgcagggacagatgaaaaagaaggagaaggatgtggtgtctgcccatggaagagaggaagcatcagataggcgtttacagcagttacagtctagtataaaacaattagaaataagattatgtgtgacaatccaagaagccaaccaattaagaaccgaaaatacacatctggaaaaacagaccagagagctacaagcaaagtgcaatgaattagaaaatgagagatatgaggctattgtaagagccagaaatagcatgcaactcttagaagaagctaaccttcaaaaaagtcaggctctacttgaggagaagcaaaaagaagaagacatagagaaaatgaaagagacagtttctcggtttgtacaagatgctaccataagaaccaagaaagaagtgttcctgttgatttcctgtagccagcctttccctgccattacagctattcactcaggaagtatttattga

SEQ ID NO: 131545 - DNA, 259 bp, Homo sapiens
agagaaccatggcactggccagttgatcatggtgttcctggaaagtaaaagagataggctggtgactaaattcttttttgctctctgtaagctgaaaatttttgacgtgcagaaaactggatgatggagagtaacatggaaagtttaaccaggtggtgactccaattgcagctgttgtaccagatgtggtttcattacttgagctattccctggtacttggtatgcagttattgatctggcaaatgcctttatttccat

SEQ ID NO: 131546 - DNA, 506 bp, Homo sapiens
aatttttaggatgagtttcctgttttggttctttggtttctggcattggttctctcatctgattaggtttaatgatgctaataactctgtttccattaataaagagggcactgatagatagtccgtggtgtactctgtcaatagagatatataaatattaccattggatactcctaatcaaccacttataagaagcaaagattttggtgactgtgtatatgatgcttttgaacatgattggcaaagtaacaaatgtaaagagattggcttctattgtcatcgaacaaagaatgagctcagggtttgaattcccaggtcaaatgctgcatacatgatctcaaagctgctaatttcaaagtcgcagggctggtgagtctcactatactcccattcaacttacttgacgtgcagaaaactggatgatggagagtaacatggaaagtttaaccaggtggtgactccaattgcagctgttgtaccagatgtggtttcattacttgagctat

SEQ ID NO: 131547 - DNA, 227 bp, Homo sapiens; identical to SEQ ID NO: 118589

SEQ ID NO: 131548 - DNA, 236 bp, Homo sapiens
ctatgggaccctgccaaaggctccaaacagcatcccaatctgccactgatacttcaaacaccattggatctgctgggtcatatggcccaagtggcagagcagcttgcatagcagcctggaccagttgcagagccttcttccaaatgagaaatgtgttgccccaaaatccaaacaggcccactaggcattgtgcctctttcttggtcgtaggaggcgccaaatgcaccaaactcatc

SEQ ID NO: 131549 - DNA, 323 bp, Homo sapiens; identical to SEQ ID NO: 130562

SEQ ID NO: 131550 - DNA, 1557 bp, Homo sapiens
atggcttcccctgaggcagttgccagtcaagataatgatggtttttctcagaagccacccccaacacctctgtttgcctctagatctgtaaatagactgaagtcccagcggacccctagaggtgaggttgaaagtgtgaccgatggggagaagacagatggatcttggagaatgacagtggattactgtaagcttaaccaagtggtgactccaattgcagctgctgtaccagatgtagtttcattgcttgagcaaattaacacatctcctgatatcacactggtccattacattgatgacattatgctgaatggatcaagtgagcaagaagtaacaaacacactggacttattggtgagacatttgtgtgccacaggatgggaaataaatccaactaaaattcagggatcttctacctcagtaaaatttctaggggtccagtggtgtggggactgtcgagatgttccttctaaggtgaaggataagttgctgcatttggcccctcctactaccaagaaagaggcacaacacctaacgggcctatttggatttcggaggaaatacattccttatttgggtgtgttactctgtcccatttatcaagtgacccgaaaggctgccagttttcagtggcgtccagaacaggagaaggctctgcaacaggtccaggctgctatgcaagctgctctgccacttgggccatatgacccagcaggtccaatggtgcttgagatagcagtggcagatacagaggctgtttggggccattgcactcagcctctttccccagccacccctgtcattgcccaatgggcccatgaacaaagtggccatgatggcagggatggaggttatgcatgggatcagcaacatggacttccactcatgaaggctgacctggctatggccaccaatgagtgcccaatttgccagcagcagagaccaacactgagcccgcaatatgacaccattcctcaggagatcagccagctacctggtggcaggttgattatattggacctcttgcatcatggaaagggcagagacatttactctggatatgggtttgcctatcctgcatgcaatgtttctgccaagactaccatccgtggactcacggaatgccttatccaccattatggtattccacacagctttgcctctgaccaaggcattcactttaccactaaagaagtgtggcagtgggttcatgctcatggaattcactggtcttaccatgttccccatcatcctgaagcagccgggttgacagaacagtggaacgaccttttgaaatcacaactacaatgccgactagccaggaatcacgggtccaggaatcaaggggtggaagtggaagtggcaccactcaccatcacccctagtgatccactagcaacatttttgcttcctgtttctatggcattacattctgctggtctagaggtcttagttccagagggagaaacgctgccaccaggagacaaaacaattccattaaactataagttaagattgccacctggacactttgggctcctcctacctctaagttaa

SEQ ID NO: 131551 - DNA, 1120 bp, Homo sapiens
cccttctaaggtgaaggagaagttgctgcatttggcccctcctacaatcaagaaagaggcacaacgcctagtgggccaattaggattctggaggcaacacattcctcatctgggtgcgttactctggctcatttatcaagcgacccaaaaggctgccagttttgagtggggtccagaacaggagaaggctctgcaacaggtccaggttgctgtgcaagctgctctaccacttgggccatacgacccagcagatccaatggtgcttgaggtgtcagtggcagatagggatgctgtttggagcctctggcaggctcccataggtgaatcacagcagaggcctctaggattttggagtaaggccctgccatcttctacagataattactcttcttcagatgtgcaattatatactgattcatgggctgttgccagtagtttggctggatagtcagggacttggaagaagcatgattggaaaattggtgacaaagaaatttggggaagaggtatgtggatggacctctctgagtggtcaaaaactggaaagatatttgtatcccatgtgaatgctcaccaactggtgacctcagcagaggaggattttaataatcaagtggataggatgacccgttctgtggacaccactcagcctctttccccagccacccctgttgtcgcccaatgggcccatgaacaaagtggccatggtggcaggaatgaaggttatgcatggactcagcaacatggacttccactcaccaaagctgacctgactacagccactgctgagtgcccaatttgccagcagcagagaccaacactgagacctcgatatggcaccacttctcagggtgatcagccagctacctgctggcaggttgattacattgaacctcttccatcatggaaaaggcagaggtttctcctcactggaataaacactcactctggatatgggtttgcctatcctccatgcaatgcttctgccaagactaccatccatggactcatagcatgccttatccactgtcatggtattccacacagcattgcctctctttacagagagagaggcactcactttacagataaagaagtgcagcagtgggcgcatgctcat

SEQ ID NO: 131552 - DNA, 1911 bp, Homo sapiens; identical to SEQ ID NO: 119293

SEQ ID NO: 131553 - DNA, 1416 bp, Homo sapiens
gaggaattacggaggttgagctggtccggaatccctaagccagtgcgtccaatgacgtggaagctcctctcaggttaccttcccgccaatgtagaccggagaccagccactctccagagaaaacaaaaagaatattttgcatttattgagcactattacgattctaggaacgacgaagttcaccaggacacatacaggcagatccacatagacatccctcgcatgagccctgaagcgttgatcctgcagcccaaggtgacggagatttttgaaaggatcttgttcatatgggcgatccgccacccagccagtggatacgttcagggtataaatgatctcgtcactcctttctttgtggtcttcatttgtgaatacatagaggcagaggaggtggacacggtggacgtctccggcgtgcccgcagaggtgctgtgcaacatcgaggccgacacctactggtgcatgagcaagctgctggatggcattcaggacaactacacctttgcccaacctgggattcaaatgaaagtgaaaatgttagaagaactcgtgagccggattgatgagcaagtgcaccggcacctggaccaacacgaagtgagatacctgcagtttgccttccgctggatgaacaacctgctgatgagggaggtgcccctgcgttgtaccatccgcctgtgggacacctaccagtctgaaccggacggcttttctcatttccacttgtacgtgtgcgctgcttttctcgtgagatggaggaaggaaatactagaagaaaaagattttcaagagctgctgctcttcctccagaacctgcccacagcccactgggatgatgaggacatcagcctgttgctggccgaggcctaccgcctcaagtttgcttttgccgacgcccccaatcactacaagaaatgagcccaggcccacccgcagctggcctcactgtcccgggtggcgcgccccacctgcctggctggtggtaggcccctgtgagctggtccgggctgctaaaaggccttgtgaggtggccccaccctccaggggagctggtgaagatgggccacagacctggtctagggctgacaaagacagggacagcctttgttttttgagataccaaaaagagccaggggagggccccgggttcggcggccagaggcaggtcaggggtcccctctccctctccctgcaatgtccttgccaaatgactgcctcctgctgcccctagtccggggcagcctaggaggccgaccctctttggagtcctgctgtttgggtgccagggccggaacgaggtagtggccatctcatacctactctgaaatgcaaaacttctattctgttgagtgaaagaataaaatgtagccaaaatctaaaaaaaaagaattccaccacactggcggccgcaaggag

SEQ ID NO: 131554 - DNA, 678 bp, Homo sapiens
tgggccggttggtgaaagcagaacatgcttgcacacggaggtgcgtcacccaggaccgcagggtggagcagctttgtgcttctgggaccaaacgggaaatgagctggaggacccgtggcagcaggaaaatggcgttgaacaggagccagaggacttccgcaggtgtcagtcacggatggctctgtcagggtttgaaagggaccccaagagcagcacagaggaactcggtcagtggtctgagtgcggcacaattgatggcgtcaccagcgtcagagaggcatgtgagagcggccagcaggccccaggtggcagcatctccacccgcctgtgcccacctcgtttccacagcgctggcttcatcacgtccctccctgacacctgcccaggtgcggtggaggtggacacggtggacgtctccggcgtgcccgcagaggtgctgtgcaacatcgaggccgacacctactggtgcatgagcaagctgctggatggcattcaggtgagcgcagaggcggaagactttggggtgagtcagcatcacccctctgtccccaagaagctcagagcctggtgggatgtgttcttccacgtgttggtcagggctgagcctgagcgcagtgttaatagtaagatgagtgacctttcctgccgtatccagggcgtcctgaagtgaaacagcct

SEQ ID NO: 131555 - DNA, 1335 bp, Homo sapiens
atggcggtatctcaaagcgatggctctgagacccacaacggtagctcttgggcacctgcggcagcccaagtgttcatgaaatatggactaggtgctgaggtcagcaccgccccaggcgccagcagcccagttctagctcttgtttttaacgcaggctgcttttgccagcagctgcatttacagtctggactcaggaaagcagaaaacaaactggcctgcaaagccactcctggggccatcatttctcccagaggcttttgccacaagatccctgatctcccaccaggtcctcaagcacttgaatggaagctggcgccaaggtactctaggagggcgtctccacagcaaccccaacaggactttgaggccctgctggcagagtgcctgaggaatggctgcctctttgaagacaccagcttcccggccaccctgagctccatcggcagtggctccctgctgcagaagctgccaccccgcctgcagtggaagaggcccccggagctgcacagcaatccccagttttattttgccaaggccaaaaggctggatctgtgccaggggatagtaggagactgctggttcttggctgctttgcaagctctggccttgcaccaggacatcctgagccgggttgttcccctgaatcagagtttcactgagaagtatgctggcatcttccggttctggttctggcactatgggaactgggttcctgtggtgatcgatgaccgtctgcctgtgaatgaggctggccagctggtctttgtctcctccacctataagaacttgttctggggagcacttctggaaaaggcctatgccaagctctctggttcctatgaagacttgcagtcaggacaggtgtctgaagcccttgtagacttcactggaggggtgacaatgaccatcaacctggcagaagcccatggcaacctctgggacatcctcatcgaagccacctacaacagaaccctcattggctgccagacccactcaggggagaagattctggagaatgggctggtggaaggccatgcctatactctcacaggaatcaggaaggtgacctgcaaacatagacctgaatatctcgtcaagctacggaacccctggggaaaggtggaatggaaaggagactggagtgacaggctaatcataggcgatctgctggtgtttggcgctggacgtgtcagcacaggcccagcaagtggggtcctaagggcagcaacctacaaagcctccagccttgcccggctgtgccggtcacacaccagagctggtaacagtgttagtacattcattaccaccaattcacaggtggctgccagctcctga

SEQ ID NO: 131556 - DNA, 1528 bp, Homo sapiens
atggacagtcaagaagtagagaaataccccaacacttctgtagcttgtgaggaaatccccttttcaggaatccatgttgctggtgggaaatcaggagcattagaacatggaaaggatgaccttgatgaacccattgaaaatcccctcttttgtttctcaagctttagcaatgcacttgcaatattgcttccaaaagtgttccttaagaatattcatatactgcaattcatctacaggagttttcaccttttgacaatggcaaaagcaaagtttgaaggtgctgagtctgtggagccagtgtcaccttcacagcccaaaaggccatcctatgtccccctagaagagctatggacgaggttaacaaaagggaacagcaggcctcagcagagggacagggagaagggaggatggatgaagggagtgcagcaaggccatcaaggagtaggaaagcaggaggaaggttcagagaacatcaaagaaaaagctgggattgttgtctgtgaggtgcctaacaacaagttagataaattcatgggaatcctttcttggaaagacagcaagcattccctcaacaatgagaagataatcctgagaggctgcatcctgagaaataccagctggtgttttggaatggttatttttgcaggtcctgacactaaactaatgcagaatagtggtaagacaaagtttaaaaggacaagcattgatagattgatgaatactctagtactatggattatgctaatttctcaaccagtggtagaatttatcatgagaggacacagttattttataaactgggaccggaagatgtattattctcgaaaagcaatacctgcagtggctcgaacgaccacgctcaatgaggaactggggcagattgagtacattttctccgacaaaacgggtaccctcactcaaaacatcatgacctttaaaagatgttccattaatgggagaatctatggtgaagtacatgatgacctggatcagaagacagaaataactcagttaatacatagatggctagctagactaaaaaagaagaagagagagaagaatcaaacagacacaataaaaaatgataaagggaatatcaccactgacctcgcagaaacacaaactaccatcagagaatactataaacacctctacactaataaactagaaaacctagaagaaatggataaattcctggatgcatacaccttatcaagactaaaccaggaagaagttgaatccttgagtagaccaataacaagctctgaaattgaggcagtaattaatagcctaccaaccaaaaaaagcccaggaccagacagattcacagctgaattgtaccagaaatacaaggaggagctggaaaaagagcctgtggatttctcagtcaaatctcaagcggatagagaatttcagttctttgaccacaatctgatggaatccattaaaatgggtgatcccaaagttcatgaattccttaggttacttgctctctgccacactgtaatgtcagaagagaatagcgcag

SEQ ID NO: 131557 - DNA, 926 bp, Homo sapiens
ttagagagtagaatttgaacatgtctcagtatcactgtccactatgagctgatgcttttttaatgcctgtaaggcagttactgtcaaataaaccctggacgcagaattctgggtctgaactggctctaccactctctcaaagggctttgaacagcccctttcttcctgccgcgagccccggggtgggggaggcggcgggggaggagcgcgaggggacgggacagcgggatccctcccaggagccaagccgccaagcgcctcgttcctctgctgctccccgccctcttcggcggccgcgagagcggacccaccctccggcttgacctgcgacctcccatgagcggtggtgaagtggtctgctccggatggctccgcaagtcccccccggagaaaaagttgaagcgttatgtaagtagagctgcgggcaccactccgcgggcctcggcgtccacacccctccccagtcggctcgccggcggctgcagctggccgcgcgcggggctggttcttaaacgaatgccggtctctttccccttggcccctacccctggcgggctcgggacagggtgccttgcactccctcacgcccaggcatccacttggccggacaactttcttcctccaggttccagacagcctgctttgcgggcctgttcgccccataaaaggacctagacgtccagctaaactcctgctgcatgctttttttcttccttaggaaggatggggtgcgatggagagaggagccttcttcctgctttattcctgcatctgattattgggctgatgtgtgctaaagctcccgcaccgggaaaactgccgaggttttagggctcactagccctttctttggtgggggctccctctcctccgcccctcgagatgggttgcgggaagcgggctgtggaggtgaggagttggtagta

SEQ ID NO: 131558 - DNA, 828 bp, Homo sapiens
atgagggactgtgccatgatgaatggtgcattccagcccagacactatgcttttcccacggtcttcacaaccagcagactgggagactccctctggtgcctacgccaccaggaccatgggtttcaagcacaaatctgggcagccatttgggcagacactgagctagttgcaggagttttttcttcataccccagtggggtcaacagacacctcatacaggagagctctggctggcatctagggggtgccccactgggacgaagcttccagaagaaagagcaggcagcaatctttgctgttaggcaacctctgctcatgataaccaggcaaacaggatctggagtggacctccagcaaactccagcagacctgcagaagagggactttactggtagaaggaaaactaacaaacagaaaggaatagcaccaacatcaacaaaaattacgtccacatggaaacctcatccaaaggattgcaactcctcaccagcaagggaacaaaactggatggagaatgagtttgacaaattgacagaagtaggcttcagaaggtggacaataacaaactcctccaagctaaaggagcgtgttctaacccaatgcaaggaagcaacgaaccttgcaaaaaggttagagaaattgctaactagaataaccagtttagaaaagaacaaaaatgacctgatggagctgaaaaacacagcacaagaacttcgtgaagcatacaccagtatcagcggccgaatcaatcaagcagaacaaaggacatcagagattgaagatcaacttaatgaaataaagcgtgaagacaaaattagagaaaaatga

SEQ ID NO: 131559 - DNA, 447 bp, Homo sapiens
gtaataactgagtatagaagccactagctgcctctaggaacagagaaagtttgcctgaacttcactccgattcggatttgctcgattctttgcctggccttgtagtgttgtgatctgattcttaaaggcgtgattccagctgaaaacaaaatgtaattctatttggtatagcagtgactcactgggcagacactggtccccagatcctgttctactttcttgtctaaagcgtattccaaatcgggtaactagcattttctggtacaggtcctgcagagcctgcctggatgtccagacttcagctggacccagcttagaatctgtcatgtcagccttcaggacttctgcctgccggaggtactgcgcgctctgcaggctcatcgtgccgccgccgccgccgcgtcttcccgcgaagcctccgtgggtctctcaggctcctcggagcgg

SEQ ID NO: 131560 - DNA, 1365 bp, Homo sapiens
  misc_feature (1)...(1365): n = a,t,c or g
cagcacccgcggtgccgcggggccgctccgaggagcctgagagacccacggaggcttcgcgggaagacgcggcggcggcggcggaggatgagcctagcagagcgcgcagaacctccggcaggcagaagtcctgaaggctgacatgaatgatactaagctgggtccagctgaagtctggacatccaggcaggctctgcaggacctgtaccagaaaatgctagttaccgatttggaatacgctttagacaagaaagtagaacaggatctctggaatcacgcctttaagaatcagatcacaacactacaaggccaggcaaagaatcgagcaaatccgaatcggagtgaagttcaggcaaacctttctctgttcctagaggcagctagtggcttctatactcagttattacaagaactgtgtacagtatttaatgtagatttaccatgccgtgtgaagtcttcccaattgggaattatcagcaataaacagacgcataccagcgccatagtgaagccacagtctagctcctgttcctatatctgccagcactgcctcgtccaccttggagacattgctcgatacagaaaccagaccagccaggcagagtcctactataggcatgcagctcagcttgtcccctccaatgaatgtcttaaaccattctaccttatgagaaattggatgttcttgcagatagtcattgtgggagaaaacgtttcatttatgtcccattatgaggaccgaaaacttgaaatcagaggagcatctgaaatcaagtaatattaggtaggatgaaaattacaagggatttctacatgtttttattccttttggagatgtgtattattcatactctgtgaatactaataaaattagaaacttcctgaaacatttgattttggccaagatcgggatggggcatgctaaagttttattatttatgtgacttcttgagaaccttggcttatgtttatactttgtcttgagcatttttatcttgtggtccaaggaagcttttgaaaattttactgaagtaaatttttaaaaattttgttttatatgaggtctctgaatatttatgataaacgtagggacacatgatttatacctcatcctttagaatgaaagtttctgtggtttttttacatacttagtaaatcatgtgagtgcaggtaacatcagcttgcagttctgtatgtcagcgtggatgcaatcaagcctcccaagtgcctgtagaaataggtgtatgatagtatgctagagaagccctcttggtacatgtgaattagtaactattgctacagcaggcttataatgnccagaaaatgccaaggatgcttggatcctccaaagatgccagcttttaa

SEQ ID NO: 131561 - DNA, 1101 bp, Homo sapiens
atgcactgcttttttatcttctctgccgcatggttttgcctgtggagtatcagcctgcatctggttgagcgccctgatatggcggtgctgttatttccgtttggtctgcgtctggggctaatgctgcaatgcccgcgcggatactggcccgtattgctgggcgcggagtggctgctgatttactggctaacgcaggcggtcggtttaacccattttccgttattgatgatcggtagtttactgacgttactgcccgtagcgctgatctcgcgctatcgccatcagcgtgactggcgcaccttgctgttacagggggcggcgttaacggcggcggcgttgttgcagtcgctgccctggcttaggcacggcaaagagtcgtggaatgcgctgttgctgactttaactggcggcctgacgctggccccgatatgtctggtgttctggcactatctcgccaataacacctggctgccgctcggtccgtcactggtttctcagccaatcaactggcgcgggcgacatctggtctggtacttgctgctgtttgttatcagtctctggctccagttgggattgccggacgaactgtcgcgctttacgccattctgtctggcgctgccgattatcgcgctggcctggcactatggttggcaaggggcgctgattgcgacgttgatgaacgccatcgcgctgatcgccatcaaagctggcgcgatctcccgtggacttattgctccggtgattgtgacagtcgacacggagcccagggccagaaagcacgcgctccgccgaaacatgaccaatttccgcacgcaatatttcgaggataatggcctcttcttcactattcggcgcaaaatcaacgtgaccgccttcgcctggcaagcttacccaacgcttatcgacatggaccagatgcgcaaccccaagccccgttccggcaccgtaaaccgcaataggcttaccttcgaccggttctgcgccaccaaactgaatcagatgctcttttttcagcatcgggatcgccatcgatacagcggtaaaatcgttaataatttccagatggctaaaaccgagattctttttcatttcggcaattga

SEQ ID NO: 131562 - DNA, 2775 bp, Homo sapiens
atgcttcttctgcgggagcacacggacacgcgacacgaccacccgcgcacacccacaagagccacaagaagacgaagacacacagaaaagaaacgacgaaagaaaaaaagacccgctacgcacgtgctcatgaccgccacgcttataccggtgagtcggctgctggcaactgaccagccccagctctttcatgagtctgccagcaagccagcgccccatctggtatcctctctgggttgccattgtggcgatgcttcttgctccggcagagccgtggctgatgccatgcagttcaagacggtttttccagtatttgtagctgctgcgatgaaccccgaacacatggcagagagtggccacaggataacgcgccctgagtttcccgattatcgagaactgttcagggagtctgacatcaagagcgcggttgtagattcaatctgtcaatgcaacacccctttcaattatctctttcggtgttttgaacttcagtgtctttctcgacacggacatagcgcatatggtgttatgcagaggcggcattcacctatgcaggagacaagaatcgccagcttaccgttacagcgataccgctggcatgaagattccgtgcgtaaccgctggttcagcgtgatggtggggccgtctgtgcgcgtgaatgaatggttcagcgcgtatgcgatggcgggtatggcttacagccgtgtgtcgactttctccggggattatctccgccagccccttgtatctggctttcacgaagccgaactgacgcttgatgatgcgaaacgggtgctccaccctggcacggatgctggctttcatgtattcgatgttgatggccgttttgttcttgcgcggattctgcttcaaggtttttaccttgccgggacgctcggcgatcaggcagtccacattcaactcggccagctcctcgcgctgaggcgctccttggtagccggcatcgctgaaacaaatgcgactctccatgaggcgattacccggcgaagatggcatgtcgtgggcccggtggtaccaggctcgggtacgccacctgggatcgacccatgggggctaagacgagggcggattgactatgacagagagaccgaaagaagggcactccttgagaacggggcccagcagtgggtccccagacggggtaataaccggtctgcacgcaatatgcgaaaaaagcgcaatgcacagggacaaatagtgtcgagaccgaataacgacgatgtcgcactcctagcaggcatcccccgcaaggcacagcaattgggcacatacattcctgctcaaaccgtggcgataaaaaagggccaccgaagtgaccctttttcagaacttttgcgaattacgcgtaaccgtagctcatcaggcgctgataacgacgattttttaaatcttcagtgcttaacacgtcgagatcggccagatccgccagcagttgcgctttcaacgatgccgccatcgcttccgggttacgaagatcagaaatttcctgagcactggggctttgatgtcgcttccattgagaaagccctggcgcacaacgagcgcaatgaaaaccgtattcgcggtgcttcaacgatttctcaacagacagccaaaaatctctttttatgggatgggcgtagctgggttcgaaaagggctggaagccggattaacgctggggatagaaacggtctggagcaaaaagcgtatcctgacggtttacctgaatatcgccgaatttggcgacggtgtgtttggcgtcgaagctgcggcacaacgttatttccacaaacccgcgagcaaacttacccggtcggaagctgcattactggcagctgtattacctaatccacttcgtttcaaagtctcctcgccatcgggctacgtgcgtagccgtcaggcgtggattttacggcagatgtatcagttaggcgaggatattctgcggcttcagcgacatcgtcgagatacggttatactgccaataaaggttcagctggttcaggaactgggcagtgtgaacggttcatgggaaggattgggaaaaaatccggccagtcccgacgccaaggaacacggcatcgtaatcactcagcagatcgtccagctgtacgtcgcggcccacttcggtattgagtttgaattcaatacccatgccggtgaagatttcacggcgacgcgtcattacctctttttccagcttgaaggccggaataccgaaggtcagcagcccgccaatttctggatgacggtcgaagacaacggcttttacgccgttacgcgtcaggacatccgcacacgccagacctgccgggcctgcgccgataatcgccacttttttaccggtctgtttcacaccagacatatccggacgccagcccatctcgaacgctttatcgttgatatagcgctcaatgttgccgatggtcaccgcgccaaactcatcgttcagagtgcaggaaccttcgcacagacggtcttgcgggcagactcgtccgcaaacttccggcagggtgttggtctggtgcgacagttccgccgcttcaaaaatacgcccctcgttggcgagcttcagccagttcgggatgtagttgtgtaccgggcatttccactcgcagtatgggttgccgcacgacaggcagcggtcagcctgcgctttggcctggccttcggaaaacggctcgtaaatttcaacaaactcaattttgcggatcttcagcggtttctttggcggatcaacgcgctgcaggtcgataaattgataacattctga

SEQ ID NO: 131563 - DNA, 1184 bp, Homo sapiens
atgaataatgacaataccgattacggggcggcgttaacggcggcggcgttgttgcagcgctgccctggctttggcacggcaaagagtcgtggaatgcgctgttgctactttaactggcggcctgacgctggccccgatatgtctggtgttctggcctatctcgccaataacacctggctgccgctcgcgggcattgttcagcggctggcggcagataacgccagcgtgaagcagaggggcagctcatcgaacaactatcgctgggcgtttacgacgcgtgaccatctggctgggtaccgcggtataactcaacggacaagtttagccgacgatccaaaatctggtaagaggtccaacgaggaattggccgtaagaaccgttaattccatgcgtgtatatgtcccaatgtccatgcacagccaaatgggaaggaatcggggatcaagtgggtcacatatgatcggcctggacccacgaagtacagaacaagagaccagaaggataaaaaatgcattagggaggcactacatagtattagctccttctgatgccattctatttcaggaaggagtgtccgttaactcaggctacctcaggaaaaaccgtcctgaaaaaccagacggcagacgggctgtattacgcagtcaggtacttgagctacatggcatcagccacggttcggccggagcaagaagcatcgccacaatggcaacccggagaggctaccagagggacgctggcttgctggcaggctcatgaaagagctggggctgacaatgcacgagttaatgtcgccatgaaccagacccggatcaatcatcttgccgttcgtcggttaaccgagctttccggcggtcagcgccagcgcgcatttctggcaatggtcctggcccagaatacgcccgttgtattacttgatgagccaaccacctatcttgatatcaatcaccaggtggacctgatgcggttgatgggcgaactccggactcaggggaaaacggtggtcgctgtgctgcacgaccttaatcaggctagccggtactgcgatcaactggtggtgccggcgactaccttatgaggggacgcaagcccgccgaatttataaatttgaacgaaccggagcaaatgcggccggagcagttgctattattacagttataccagcggaatcctacacggattga

SEQ ID NO: 131564 - DNA, 396 bp, Homo sapiens
  misc_feature (1)...(396): n = a,t,c or g
taatgagcagcttgagtcttaagtttttgaatacaccgatggaaggtgacaaagattctttgcttggccaaactttagtcagactcctcaaccttctcgtaggtttatctgtgcatttccttggaaaatccagttagaaccctctaccctcaatatctgatcaggttcctcatcctctaccatccaaggtgatgtctgatcaccttgacctattttcagcaagaaacccctnnnnnnnnnnnnnnnnnnnnnnnnnnnnnnnnnnnnnnnnnnnnnnnnnnnnnnnnnnnnnnnnnnnnnnnnnnnnnnnnnnnnnnnnnnnnnnnnnnnnnnnnnnnnnnnnnnnnnnnnnattcagaatccccattgccatggntgctatacctatcctggagg

SEQ ID NO: 131565 - DNA, 381 bp, Homo sapiens
  misc_feature (1)...(381): n = a,t,c or g
ntagcaaccatggcaatgggattctcaatnnnnnnnnnnnnnnnnnnnnnnnnnnnnnnnnnnnnnnnnnnnnnnnnnnnnnnnnnnnnnnnnnnnnnnnnnnnnnnnnnnnnnnnnnnnnnnnnnnnnnnnnnnnnnnnnnnnnnnnnnaggggtttcttgctgaaaataggtcaaggtgatcagacatcaccttggatggtagaggatgaggaacctgatcagatattgagggtagagggttctaactggattttccaaggaaatgcacagataaacctacgagaaggttgaggagtctgactaaagtttggccccgcaaagaatctttgtccccttccatcggtgaattcaaaaacttaagactcaagctgctcatta

SEQ ID NO: 131566 - DNA, 412 bp, Homo sapiens
gaaaaggcctggctctgggatcacggaagccacgtcctctcggcgtcaaaggcccacccgccggctccagggccagttaccaggacaggaaaagagggtcctgaaggccacagaaggcatcgcgaaccccagttggggctggggaggagctgtgtccccactccgcgcctcacttacctcgttgagacacaaaataaacaaccattataacactgagaactggaaactccccataaaagacagcccacctgatcccttcgcctcaagcccccagtatgccctttccactcgccaaccccccctggggctccgcaccctagagaaaagatgtggaacccacagatacaaggaactaactgtatatgggtttgtggtccctgaagactttggtgaaaacagggaaaggttatga

SEQ ID NO: 131567 - DNA, 777 bp, Homo sapiens
ttattcagatggctggttgttcactgggagctcaactagggccattgactgaaatgtctccacctggcttcttcgtgtggcttgagcttcccacaatatagcaatacagcagctgggctttgagcaggagtatcctaagagcaagtgttctgggctgcttacatagccttctctgctagaaaagatccctgatgtctggcagcatgagatgagaaggttgaggagtctgactaaagtttggccaagcaaagaatctttgtcaccttccatcggtgtattcaaaaacttaagactcaagctgctcattactatctttaggctctccacgtttgacatttccgctcttctgctgcagctgccgatggcgtcacttccaccggaaaaggcaagcgcggccgcgcggttggcgcgaaagtcggttcccgttctgggcaatttccgggttctccagcgtttgctttggggtaggggcggcgccgagtcgggggagggggctgtgcgccgggctggcgcccgaccccagccaccgccctgcggccagcgcgtcccccgactcgccgcccggagaccccgaggctccaacgaggtaagtgaggcgcggagtggggacacagctcctccccagccccaactggggttcgcgatgccttctgtggccttcaggaccctcttttcctgtcctggtaactggcccttggctttgtccaagttccagggtttcttagaaatgccgttgacgaattcacgggcagagccagaatgtctgtctttaggcat

SEQ ID NO: 131568 - DNA, 622 bp, Homo sapiens
taaaaaaattttttcttattttataaaatctagccactatactaatgaggatcattttattattcactgctgagattgagaaaatgactttggatttactaatgtaaaagtataatgccatgtcccttgattgtttttgtttttcttttctttttagagcctaaagatagtaatgaggcagcttgagtcttaagttttttaatacaccgatgggaaggtgacaaagattctttgcttggcccaaactttagtcagactcctcaaccttctcgtaggtttatctgtgcatttccttgggaaaatcccagttaggaaccctcttacccctcaatatctgatccagggttcctcatcctcttaccatccaagggtgatgtctggattcaccttggacctattttcagcaagaaacccctttactcctgaagttccttcttagtaattttttatccagtgaccccaagctttttgttccttggctataaattcccacttgcccatgctgtatttagagttgagcccactctctctctcctaattcagaattcccattgccatggttgctatacctatcctgatggtccggaataaaatctgtcttactgtgctttaaaaaaaaaaa

SEQ ID NO: 131569 - DNA, 2664 bp, Homo sapiens
tcaaacatcctcctttagctcggagaactttgttattaccaaccttctgaagcctacttctgtcaactcatcaaactcattctctgtccagttttcttcccttgctggtgaggagttgtgttcctgcaggtctgttggaggttgccggaggtccactccagacgctgtttgcctgggtatcaccagcagaggctgcagaacagcaaatattgctgcctgatccttcctctggaagcttcgtcccagaggggcacccacctctatgaggtgtctgttggcccctactgggaggtgtctcccagtcaggctacacctccatgggctgcactcactgtccaaccagtcccagtgagatgaaccaggtacctgttgcgggaagtcagggaccccgaatggagggaccggtaaaatgactggcaaaagtactgagtcataagcaatattcagggagagaaagaagctctcttgctccaacattgtcatatatcccctgttgtttcctgactttttaatggtcgccattctgactggtgtgagatggtatctcattgtggttttgatttgcatttctctgatggccagtgatgctgagcattttttcatgtgtcttttggctgcataaatgtcttcttttgagaagtgtctgttcatatcctttgcccactttttgatggggttgtttgtttttttcttgtagatttgtttgagttcattgtagattctggatattagccctttgtcagatgagtagattgcaaaaattttctcccattctgtaggttgtctgttcactctgatggtggtttcttttactgtgcagaagctctttagtttaattagatcccatttgtcaattttggcttttgttgccattgcttttggtgttttagacatgaagtccttgcccatgcctatgtcctgaatggtattgcctaggttttcttctagggtttttacgtttttaggtctaacatgtaagtctttaatccatcttgaattaatttttgtataaggtgtaaggaagggatccagtttcagctttccacatggcttgggcagtatggctattttcacaatattgattcctcctatccatgagcatggaatgttcttccatttgtttgtatcctcttttatttcttcgagcagtggtttgtagttctccttgaagaggtccttcacgtcccttgtaagttggattcctaggtcttttattctctttgaagcaattgtgaatgggagttcactcatgatttggctctctgtttgtctgttcttggtgtataggaatgcttgtgatttttgcacattgattttgtatcctgagactttgctgaagttgcctatcagcttaaggagattttgggctgagaggatgggattttctagatatacaatcatgtcatctgcaaacagggacaatttgagttcctcttttcctgattgaataccctttatttccttctcctgcctgattgctctggccagaacttccaacactatgttgaataggagtggtgagagagggcatccctgtcttgtgcctgttttcaaagggaatgcttccagtttttgcccattcagtatgatattggctatgggtttgtcatagatagctcttattattttgagatacgtcccatcaatacctaatttattgagagtttttagcatgaagcgttgttgacttttgtcaaaggccttttctgcatctggtcctggactttttttggttggtaagctattaattattgcctcaatttcagagcctgttattcgtctattcagagattcaacttcttcctgatttagtcttaggagggtgtatgtgttgaggaatttatccatttcttctagattttctagtgtatttgcgtagaagtgtatatagtattctctgatggtagtttgtatttctatgggattggtggtgagatcccctttatcattttttattgtgtgtatttgattcttctctccttccttctttattagtcttgctagcggtctatcaattttgttgatcttttcaaaaaaccagctcctggattcattgattttttgaagggttttttgtgtctctatttccttcagttctgctctgatcttagttatttcttgccttctgctcgcttttgaatgtgtttgatcttgcttctctggttcttttaattgtgatgttagggtgtcaattttagatctttcctgctttctgttgtgggtatttagtgctataaatttccctctacacactgctttgaatgtgtcccagagattctggtatgttgtgtttttgttctcattggtttcaaagaacatctttatttctgccttcatttcgttatgtacccagtagtcattcaggagcaggttgttcagtttccatgtagttgagcggttttgagtgagtttcttaatcctgagttctagtttggttgcactgtggtctgagagacagtttcttataatttctgttcttttacatttgcttaggagtgctttactactaactaagtggtcaattttggaataagtgagatgtggtgctgagaagaatgtatattctgttgatttgggatggagagttctgtagatatctattaggtccacctggtgcagcgctgagttcaattcctggatatccttgttaactttctgtctcat

SEQ ID NO: 131570 - DNA, 1182 bp, Homo sapiens
tcaggcctctcttctgcaggtctgctgcggttgctggacgtccaatccagaccctgttctcctgggtatcaccagtggaggctgtagaacagcaaatattgctgcctgctccttcctctggaagctttgtcccagaggggcaccaacctgatgccagctggagctgtcttgtatgaagtgtccttcgacccctgttgggaggtctctcccagtcggatgcacaaggtcagggacccagctgaggtggcattcggtcccttggcagagctggtgcactgtgctgggagaatccctcttgtcaggattagttgttctcttcagagccagcaggccagaatgatgaaatccgctgaagctgctcccacagctaccccttcccccagatgctctgtcccagggagatggtagttttgtctgtaagcacccgactggggctgttacctttccttcagggatgcccttgggcagtatgaccattttcaaaatattgattcttcctatccatgagcatggaatgttcttctctttgtctgtgtcctcttttgtttcattgagcagtggtttgtagttctccttgaagaggtccttcacatcccctgtaagctggattcctaggtattttattcctatttggctctctgttagtctgttattggtgtataagaatgctcgtgatttttgcacattgattttgtattctgagactttgctgaagttgcttatcagcttaaggagattttgggctgagtcaatggggttttctaaatatacaatcatgtcatctgccaacagggacaatttgacttcctcttttcctaattgaatacacgttatttctttctcctgcctgattgccctggccagaacttccaacactctggtagaattcggctgtgaatccatctggtcctggacttttttggttggtaagctattaattattgcctcaatttcagagcctgttattggtctattcagggattcaagttcttcctggtttagtcttaggagggtgtatgtgtccaggaatttatcaatttcttctagattttctagtttatttgcatggaggtgtttatagtattctctgatggtagcttgtatttctgtgggatcggtggtaatatctcctttatcattttttattccatctatttggtttttctctcttttcttcttcat

SEQ ID NO: 131571 - DNA, 627 bp, Homo sapiens
tcaggcctctcttctgcaggtctgctgcggttgctggacgtccaatccagaccctgttctcctgggtatcaccagtggaggctgtagaacagcaaatattgctgcctgctccttcctctggaagctttgtcccagaggggcaccaacctgatgccagctggagctgtcttgtatgaagtgtccttcgacccctgttgggaggtctctcccagtcggatgcacaaggtcagggacccagctgaggtggcattcggtcccttggcagagctggtgcactgtgctgggagaatccctcttgtcaggattagttgttctcttcagagccagcaggccagaatgatgaaatccgctgaagctgctcccacagctaccccttcccccagatgctctgtcccagggagatggtagttttgtctgtaagcacccgactggggctgttacctttccttcagggatgcccttgggcagtatgaccattttcaaaatattgattcttcctatccatgagcatggaatgttcttctctttgtctgtgtcctcttttgtttcattgagcagtggtttgtagttctccttgaagaggtccttcacatcccctgtaagctggattcctaggtattttattcc

SEQ ID NO: 131572 - DNA, 832 bp, Homo sapiens
tcaggcctctcttctgcaggtctgctgcggttgctggacgtccaatccagaccctgttctcctgggtatcaccagtggaggctgtagaacagcaaatattgctgcctgctccttcctctggaagctttgtcccagaggggcaccaacctgatgccagctggagctgtcttgtatgaagtgtccttcgacccctgttgggaggtctctcccagtcggatgcacaaggtcagggacccagctgaggtggcattcggtcccttggcagagctggtgcactgtgctgggagaatccctcttgtcaggattagttgttctcttcagagccagcaggccagaatgatgaaatccgctgaagctgctcccacagctaccccttcccccagatgctctgtcccagggagatggtagttttgtctgtaagcacccgactggggctgttacctttccttcaggatgccctacccacaccctgcaggcatgagcaagctttgggacccctgctgccccactggcgtgcacccatgtgggggatgaccacaagcccactggagtacctttgctagcagcgtctgttagtgttgtcaccaatgggtgcccgctttccagtcgggaaacctgtcgtgccagctgcattaatgaatcggccaacgcgcggggagaggcggtttgcgtattgggcgccagggtggtttttcttttcaccagtgagacgggcaacagctgattgcccttcaccgcctggccctgagagagttgcagcaagcggtccacgctggtttgccccagcaggcgaaaatcctgtttgatggtggttccgaaatcggcaaaatcc

SEQ ID NO: 131573 - DNA, 477 bp, Homo sapiens
atgggagtgggcacaaagtgtgaagagctttctatggcttgtgaatacccaccagaaagcattattgtagaaaaatcacggaactacaaagtagactggtcagagcaagcaggctacccagaacaggtggtaaccagcccagatccagactttatcttctcaaagtcatccctctgccctctgcccaaggaatttgatgtggacatgcagtttctccaagggcaatattttaaaaatatttttactaaaatatctccaatagtggctacaggtgatagtgaagaatcttttggagaaaagtcaggcccctcttctgcagctctgctggagtttgctgagagtccactccagaccctgtttgcctgtgtatcaccagcagaagctgcagaacagcaaagattgctgcctgctccttcctttggaagctttgtccaagaggggcacccgtcagatgccagccagagctctcctgtatga

SEQ ID NO: 131574 - DNA, 2424 bp, Homo sapiens
tcatacaggagagctccgactggcatctggcaggtgcccgtctgggacaaagcttccagaggaaggagcaggcagcaatctttgctgttctgcaacctctgctggtgatacccagacaaacagggtctggagtggacctccagcaaactccagcagacctgcagcagaggggtctgacggaacggagaccgagacaagggcagaaacactacccattaaagtcgacgaacccactgaacgaaccaaagaactccacgggggaacccctaggttgcaggtagtttttaagaaactttgtctttttctgaaattctgaactgttttgtgttcttggctattagtaggcatgtgaatttctgactccgttttttcttttatctcctcacaatttcttatagttatttcatctccactgatgttattagttaattcctcatctggtttgtgagaaatttccttcttttctctttgactaagttttgagatgttggccaattctttactcatattgtcagtggaatgagaatctatattgtgtatagtctcactttctagatggttttgtctccttttttcaactttagttgtttctattacttgagaatgagcaactatggataaaggctcatttgaataaattattttttggtctctgtcaatgtaattcctctcagtgtcacaattctttgccatcttttccacaatatgtgtatctgtttgattcattaaaaaagttggtgctctgggaatataatcctgtggctttttgaatagctccacatgattagtcaactttgaagcctcatgtgtcaaaagtgttctcatacaagccagggaattttgctcaggattgccatttgagtgatcaaaagaaggtccaaatatgcattgttcataatttgcaacatgttcagaaataactgcattatctgaataagaaaaattaacagcttcctgttctggaagtgtggttaggctgactgcttttaactcattttcctgtgaaagatgatcttcagaaagtaaaaactgttggaaacccatttcttttttatttgttaaattctccttaaaattatagtgttttttgccacctgtagaacacaacacctttttagatgttatagccttctcagaggtagagcaatcatcatcatcatcattatcagaattttcctttacaaaggataggaaagaattttcccatttgttaaatctctcatcttttgggaccaagttactgttttcatgagatttataaagtacatggtgttgttcctggagagtgtgaggctgcttatctgtagtaacaactggtaacttgatttctttatgtaataaaagctctgggaaagaaacagcttcagtttggtcaacagattctaattccaagcattgaacttcttgactatctgataaatccaggttctggatgtgtttctctttggaaactgaacaagcctcagtactgctatctaatccatttctcaggcttgacagagttaagctggaaggttcacacaattcttctggaaggtcattatgagtttctggaatatgctgctgataggtaaccaatctgtttattctcctggaaggagagacagctagtatctttcttggattacagtctacatcatctacttgggtccttttatgttgtgtttttcttcttcctataccttttggtacgtttgtgttgggatctttgacgttatggagattgccctttctgagtcctgtagagtatatctggtcaagagttgattgtttatgcttggatttaccaaattttgtgtttttgggatctttttggtaatattcatatacatcttctttatttataaataaactcgctttgcttcctttattgacttttacatgttccagcttctgtctgttggaattttcattataaacatgccaaatgtgacttttagaactgaactttggtttactagttactttatgtgcagtaaagcagcggtccccaacctttttggcaccagggaccagtttcatggaagataatttttcccaggatggcggttgggggtatggtttcaggatgaaactgttccatctcaggtcatcaggcattagagtcttataaggagtgtgcaaccttgatccctcacatgtgcagttaacagtagggtttgcactcctatgagaatctgatgctgctgcttctgcggtgcagcctggttcataacaggccacggatgggtactggtccgtggtccagggattggggacctctttctcaagcagaaggccttctgcacctttctcaccatagccaccacagctgtcaatgtgctgggtctgacatgaaaccacatgtgagaatcttaggttttcttttaagtagacacctcctatctgctcttggaacacatcacttgtatcttcatccaccat

SEQ ID NO: 131575 - DNA, 1014 bp, Homo sapiens
atgagcagactctatgagcagagaatggccctcagctggcagcaagcaagaaagcagggatctcagtcgtacagctgcaaggaacagtatggaaagatagaccaacaaccacaaccatgttctgtccaggaaactttgcattcagtcaaaagtgttacaaagttcagctggaagttttcttctccctgtggtcttttcccagttcctctggcatccctccccaaggatccgcgtgagacagaaatggctttcctggggactgagagagcccacagggctctttttgctgcttcttctaccccgtactttgttcggctctctaaattcttctcagctccaggcaaaagccaagatactcatttatgtagacatcagacctggggacttatgattgaaatgggaaatgcagaatgttggaatcatattcatttcatgtcaactacatgtgaagagaaacagaagtcctttaaaggggtcaacagacacctcatgcaggagagctccggctggcatctggcaggtgcccctctgggacgaagcttccagaggaaggaacaggcagcagtctttgctgttctgcagcctctgctggtgatacccaggcaaacagggtctggagtggacctccaggaaactccagcagacctgcagcagagggtcctgactgttagaaggacgactaacaaacaaaaaggaatagcatcaacatcaacaaaaaggacatccacacagaaaccccatccgaaggacaccaacatcaaagaccaaagatggattaaagacttaaacgtaagacctaaaaccataaaagccctagaagaaaatctaggtgataccattcaggacataggcatgggcaaagacttcatgactaaaacaccaaaagcaatggcaacaaaagccaaaattgacaaacgggatctaattaaactaaagagctcctgcacagcaaaagaaaatatcatcagaatcaacaggcaacctacagaatgggagaaaatttttgcaatctag

SEQ ID NO: 131576 - DNA, 1005 bp, Homo sapiens
tcataccccagtggtgcctggaatgccagccagacagaaccgttcactcccctggaaagggggctgaaaccagggagccaagtggtctagctcagcagatcccacccccatggagcccagcaagctaagatcccctgcattgaaattctcgctgccagcacagcagtctgaagtcaacctgggacactcgagcatggtggggggaggggcatttgccattactgaggtttgagtaggcagttttcccctcacagtgtaaacaaaaccacctggagtttgaactgggtggagcccactgcagctcagcaaagccactgtagccaggctgcctctctggattcctcctctctgggcagggcatctaggagagctctggctggcatctggagagtacccctctgggctgaagcttccagaagaaggaacaggcagcaatcttcgctgttctgcagcctccgctggtgatacccaggcaaacagggtctggagtggacctgcagcaaacttcagcagacctgcagcagaggggcctgccttccacgctctgagaggccccagtgtgcattgttcccctctatgtgtccatgagttctcatcgtttagctcacttataagtgagaacatgcagtatttggttttctgctctggcgttagatttctaaggataatggtcatcagctctatccatatcctctgcttggtccctaaaaggacacgggttctggggaggctctctttaacttgctttaggttcttaagaggtcccaaggagcccagaattaccataccacacagctcagcccctccactcgggcatgtgatagctattcccctaccctgaagcttcatgaagccctcaccagaagcagatgctcccatgactggaagcttcctgaagtccccgtcagaagcagatactggtgccacacttcctgtacagtcagttgttcccattccactctctattctcccaatccttgaagtaggtggagtcttgttcaccat

SEQ ID NO: 131577 - DNA, 1527 bp, Homo sapiens
atgggaaaggactccataaagatgcctaatgataaggcaaaaagaagggagagaaccaaaagagaatcatatcctagaaaccaagataagaagcagtctcaagaaatttttgtgaaggaaactgaagctcagagaactcaagtaacatgcctaaggccacagagcagctctcatttctccaaaaatgtgtttgagccacttggaaaatatgcctttaagccattcaagaactcaaggagctcagagatcatcctggaagctgtggctcttttgctcaatagttatgttgctatttctttgctccttcagttggctaatctttatttttctccaattagaggaccattaccctcaaaatggcaaatggcatcttctgaacctccttgcgtgaataaggtgtctgactggaagctggagatacttcagaatggcttatatttaatttatggccaagtggctcccaatgcaaactacaatgatgtagctccttttgaggtgcggctgtataaaaacaaagacatgatacaaactctaacaaacaaatctaaaatccaaaatgtaggagggacttatgaattgcatgttggggacaccatagacttgatattcaactctgagcatcaggttctaaaaaataatacatactgggatatggtggtgttagaagataaagaacaatctgagaactattggaatagaggtacaagtggcataaaatggaatgtacgctatctggaaatttctcttggttttatcttcctcaggatgcagggtgctttaaaaagccttatcaaaggagtcattccgaaccctcacgtagagctttgtgagaccttactgttggatttttgtgtggatgtcatttttgttgatgttgatgctattcctttccctttgttagttttccttctaacaggaccttcttctgcaggtctgctaaagtttgctgaaggtccactccagaccctgtttgcctgggtatcaccagcagaggctgcagaacagcaaagattgctgcctgttcttccttctggaagctttgttccagtggggcaccaaatggcagagtttttcaaagtgaggctcgtggatgttgtattagattcaccaaagatgcttggaaaaaaaaaggtatttgttgtagcaaataattgctgtcttagttcatttatgctcctggtaccaatttctgtcttagttcatttgtgctgctgtgacagaatattacagactgtgtaccttataaagaacggaaatttatttctcatagtcttgggatctggaaaacccaagattaaggtgctggcatctgttgtgggtcttcttgctacatcctcacttgcagaagagagtacactcacccctttccaggtggttcagcacagagagagaggcttcatatgttttggagaaagtaagcgaaaagaacaagggtctctcctggtaacccagataattattccagattttatccaagacaaccaaggtggtacctctacgagtctggaaaaagcacagcattattga

SEQ ID NO: 131578 - DNA, 1143 bp, Homo sapiens
tcagctattgatacctgtgtatgcttctcgaagttcttgtgctgtgtttttcacctccatcaggtcatttatgttcttctctgaactggttattctaattagcaattcatctaaccttttttcaaggttcttagcttccttgcattgggttagaacatgctcctttagctcggaggagtttgttattacccaccttctgaagcctacttctgtcaattcatcaaactcactctccgtccagttttgttcccttgctggcaagaagttgtgatcctttgtaggagaataggcattctggtttttggagttttcagcctttttgcactggtttctccccatcttcgtggatttatctacctttgatctttgaagtcggtgatcttcggaggacgtctctgagaggacatcctttttgttgatgttgatattattcctttccctctgtttcaggtctactggagtttgttggaggtccactccagaccctgtttgcctgggtatcaccagcagaggctgcataacagcaaagattgctgcctgttccttcctctggaagctttgtccaaaaggggcacctgccaggtgccagccagagctctcctgtgtgaggtgatagatgcatggtcggcccctactgggaggtgtctcccagtcaggatacacgggggtcagggacccacttgaggaggcagtctgtcccgtatcagagttggaacgctgtactggaagatccgctgctctcttcagagcgaccttcccccaggtgctctgtcccaggaaggtggggattttatctgcaagtccctgacgggctgctgcctttttttcagagatgcgcaagacctctgcgtaggagggtttgggtgactcagactgctgatcgaggaaaatgggtgctccgaatgcctgatgatctgcctggtcatggagcagagagggccttgctgcaccatgatctatgtttagctctctttctgccgactcctctgctgactgcaagctccctgagggcaaggtccaaccagcatctagcacaggactcacagcacgagcctctaaagatttgtacttctgctgttgtttttcaatttcagcaagagcctcctgatctagcagccaagactccccctgacctttggccat

SEQ ID NO: 131579 - DNA, 867 bp, Homo sapiens
atgagggaccgtgctgtaagggatggtgctgtccagcccagatactatgcttttcccacggtcttcataacctgcagaccaggagattcccttaggtgcctacaccaccagggccctaggtttcaagcacaaaactggtcagccatttgggcagacatcaagctagctgcaggagttttttcccataccccagtggtgcctggaatgcaggagagctccagctggcatctggtgggtgcccctctgggacaaagcttccagaggaaggagcaggcagcaatctttgctgttctgcagcctccactggtgatacccaggcaaacagggtctggaatggacctccagcaaactccagcagacctgcaggagaggaggctgactgttagaaggaaaactaacaaacataaagcaataacattaacatcaacaaaaaggatgtccacgcaaaaaccccatccgaaggtcaccaatatcaaagatcaaagatgtgaagctggtgtcagggagaggtgggagaggaggtgcagatccaaacggagctcagacctgcattcaggaaaccccggttcactgtcgaaagggaaggacagaaatgcccgggaaattcacaccttcagaagaggcatttcttctccaactgtacccctgggaagtttatacattgattggttcagagataaacatgtgactcaatttgggccaatgagagtcaagcataggaattttgtttacgctcatgaggaagagaaacactctatttctgtgggacgtggagctaggcggagtgagtctggagctaccaggggtgaccacagagaaaggctgtctgagaataaagccaacagagtgaagcagaatgcagaggtg

SEQ ID NO: 131580 - DNA, 1002 bp, Homo sapiens
atggcgtcccgggccggcaccgcggcctcggctccctgctctgcggctcttgtctccagggcggcgttgggttctgaatgttccagttccacagcagccagacgcgggatgcccagggacggcctgacggcagcgctggctgcgggcgctggcgtggccgaggccatggtggtcgtatgttccatggacaccatcaaggtgaagttcatccacggccagaccttcccagacctccagtgcagaggagtctcccaccagctggtaccgaggggacaaccccagcaagcccatggacccgctggtcgctggggtcttcggagccattgtgggcgcagccagtgtcttgggaaacgctcctctggatgggatcgagaccggatgcggggcctggagcagcacaaacgcggaacacaccggcctatggctgcagatcctgaggaaggaggggctcaaggacctctagaacggcactgtcccccgcctgggccgctggaccgcgtctccctggatgtgaccagggataagggtaacagtatttatcctctaccaggaggtggagaagctgcacaacagtgtggaggatggactaagcccagagggaggagagccccagctggcatcaggccagtgccccctctgggacgaagcttccagaagaaggagcaggcagcaatctttgctgttctgcagcctctgctggtgacacccaggcaaacagggtctggagtggacctccagcaaactgcagcagacctgcagaagaggggcctgactgttagaagaaaaactcacaaacagaaagcaacaacatcaaaatcaacaaaaaggacccccacgcaaaaacccaagccaaaggtcatcagcctcaaagatcaaaggcctgccttacgagagcttctgaaggaagcactaaatatggaaaggaaaaaactggtaccagccactgcaaaaacacaccaaaatgtaaagaccagcgacactatgaggaactgcatcaactaa

SEQ ID NO: 131581 - DNA, 1581 bp, Homo sapiens
atggccaaaaaggaacagcttctgtctgcagctcccagcaagaccaatgcagaaggccaggagattccctcaggtgtctacaccaccagggccttaggtttcaagcacaaaactgggcagccatttgggcagacaccgagctacccacaggagtttattttgtacaccaatgacacgtggaatgccagcaagacagaaccgttcactcccctggaaaggggattgaagccagggagccaagagagctctggctggcatctggtgggcacccctctgggaagaagcttccagaggaaggagcaggcagcaatctttgctgttctgcagcctccactggtgatacccaggcaaacaggatctggagtggacctccagcaaactccaacagacctgcagaagagggtcctgactgttagaaggaaaactaacagcatcaacatcaacaaaaaggatgaccatgcaaaaaccacatccaaaggtcaccaacagcaaagaccaaaggtagataaatccacaaagatgaggaaaaaccagtgcaaaaaggccacaaattccaaaaaccagaatgtgtcttctcctccaaaggatcacaactcctcaacagcaaaggaacaaaactggatggagaatgagtttgacaaattgacagaagtaggattcagaagtagccaattcgatcaagtggaagaaaggatatcagatattgaagataaacttaatgaaataaagcatgaagacaaaattagagaaaaaagaatgaaaaagaaggaacaaagcctccaagaaatatgggaatatgtgaaaagaccaaacctacgtttgattggtgtacctgaaagtgacggggagaatggaaccaagttggaaaatacacttcaggatactatacaggagaacttccccaatctagcaagacaggccaacattcaaattcaggaaatacagagaacaccacaaagatactcctcgagaagagcaaccccaagacacataattggtagattcaccaaggttgaaatgaaggaaaaacggttaagggcagtcagagagaaaagtagggttacccacaaagggaagctcatcagactaacagcagatctctctgcagaaaccctacaaggcagaagagagtgggggtcaatattaaacattcttaaagaaatgaattttcaacccagaatttcatatccagccaaactgagcttcataagtgaaggagaaataaaatgctttacagacaagcaaatgttgagggatttcgccaataccaggcctgccttacaggagctcctgaaggaagcactaaatatagaaaggaaaaaccggtaccggccactgcaaaagcaaatcaaaaaccactctgggttccaagcacagattttgaatcaggtgtgtgtgaaatacaaacagggctttagtcgggaagaaaaagatgaagctcgagccttaacaagcaaaatgaacatgttaataaaagccacgcacagtctcaagtccgtactgtacgacatctatttaattgttggacctcatcaactagatcccatcaatggactacttcttaaatccatccactcctag

SEQ ID NO: 131582 - DNA, 1326 bp, Homo sapiens
atgaacattaaagatacttctgcaaaacccaagagagaaaagcgaggaatccaagaacaacccatagagaatccaactgccgaaacgtatgcacgccccaaaaaacgaggaacaactgacaaggattttgacaatgctatcaccagaaacactgctaattttgaagaggacagagacaggatgaaaagaagaaaagctgtccaacttctggtattacaaaagcaggaaacgaggtcccactcccatggagcccagcaagctaagaaccactggcttgaaattctcactgagggcacagcagtctggagttggactgggatgattgagtttggtgggaagcggggcgatggccattactgtggctttagggtcggcagacgcctcatacaggagagctctggctggcatcaggcccgtgcccctctgggacaaagcttccagaggaaggagcaggcagcaatctttgctgttctgcagtctccactggtgatacccaggagaacagggtctggagtagatcttcagcaaactgcagcacacctgcagaagaggggcttgactgttagaagaaaaacaaacaaacagaaagcagtaacatcaacatcaacaaaaaggatgcccacgcaaaaactccatccaaaggaacgcagttcctcaccagcaacggaacaaagctggatggagaatgattttgacgagctgagagaagaaggcttcagacgatcaaattactctgagctacgggaggacattcaaaccaaaggcaaagaagttgaaaactttcaaaaaaatttagaagaatgtataactagaataaccaatacagagaagtgcttaaaggagctgatggagctgaaaaccaaggctcgagaactacagagaccttatgcatgtaaagaatgcggcaaagccttcagtttgagctcagaccttgttagacatcagagaaaacatagtggtgaaaaaccctatgaatgttgtgaatgtggaaaagccttcaggggcagttcagagctcatcaggcatcggagaatccacactggagagaagccttatgaatgtggagaatataaaagttatgaatgtattgcatgtggtaaggcttttggtaggagttctacccttattgaaaatcaaagaattcacactggagagaaaccttatgaatgtaatgaatgtggaaaatccttcaatcagagctcagccctcacccagcaccagagaattcacactggagagaagccttatgaatgtagtgaatgtagaaaaacatttaggcataggtcaggccttatgcagcatcagagaacacacaccagagtttaa

SEQ ID NO: 131583 - DNA, 2562 bp, Homo sapiens
atggctggcaagccggagtacgataaaactatctccacgtcgattgtgctcaatgcgctgaacgcgctcggcgtcagcgccgaagcgtccggacgtaacgatctggtggtgaaaaccgtcgaaggcgaccgcaaagtctcaggctcggcctatcgcgaaaccaaagatcgcggcttccaccacggcaccttgctactcaatgccgacctcagccgcctggcaaactatctcaatccggataaaaagaaactggcggcgaaaggcattacgtcggtacgttcccgcgtgaccaacctcaccgagctgttgccggggatcacccatgagcaggtttgcgaggccataaccgaggcctttttcgcccattatggcgagcgcgtggaagcggaaatcatctccccgaacaaaacgccagacttgccaaacttcgccgaaacctttgcccgccagagtagctgggaatggaacttcggtcaggctccggcattctcgcatctgctggatgaacgctttacctggggcggcgtggaactgcatttcgacgttgaaaaaggccatatcacccgcgcccaggtgtttaccgacagcctcaaccccgcgccgctggaagccctcgccggacgactgcaaggctgccttttctctctctacaatagcgatctcaatactgtcatcgacaacgtgctgcgtatttttccgttgctgttgtcgtggatctccttctggttgctgtacagcattgttcctaccatccgcgtacctaaccgcgacgcgattgtcggcgcgtttgtcgccgcactcctgttcgaagcaggaaagaaaggtttcgcgctttatatcaccatgttcccgtcatatcagctcatttatggtgtgctggcggtgatccccattctctttgtttgggtctactggacatgcgtcaccgtggagggagaagtgacgggcgaaattggcgcgggacttttggtgttattgggtgtcgaaaaggatgacgacgaacagaaagcaaaccgtctgtgcgagcgtgtgctcggctaccgcatctttagcgatgccgaaggcaagatgaatctcaacgtgcaacaggcgggcggcagtgtgctggtggtttcccagtttaccctcgccgcagataccgaacgggggatgcgcccaagtttctccaaaggagtaattgacgacatcggctttaatacggaaatcagccagacgcgcttccaccaggcgagccatttgttcaagcgcaaaggtatctaccggctccacttcgctcggcggcggtgtcagcaaatccagagaaggcagcggcgtcgtcggtttatgcaacggacggctgtcgccattacgcatcaacagcggatgaagcagggtatcctgcggttgtggcgcaactggctgttgtggctgctgatactgctgctgcggcgcaaccggttgttgcggctgctgatattgctgctgtggcgcaaccggttgttgcggctgctgatattgtggctgcggcgcaaccggctgttgtggctgctgatactgcggctgcggcggaactggttgttgcggctgctgatattgctgctgcggtgcaaccggttgttgcggctgctgtacaggttcaacaattggcgtaaacaacggttcgtgtggaccatcatccagcaacgctttcattggcgaaaattcaaaatcatccagcgagaacggattcgccccagccggttgttcgccggaataacgttgttgttgagtttgcgcaaactgacgagccagttcagcctctgccgcagcatctgcatcttctgcgtttacgggcacatcatgttgatactgttcgccatagcgttgctgctgtgtctgggcgaactgacgtgccagttcatcctgctgcatcgcatcgatttcatcatcgttgtactgatcgccagaatcccgcggcagtacgctgaagcggcggaaaaggcaaaagggcattgcggaccaactccatcccgtaatcccgccgggggcgcaaaagagtgtcgcataggcactaacccgctgatcgtcgccattccgtccacgccgatcaccatggtcgatatgtcgatgtcgatgttctcttacggcatgttagaagttaaccgtctggcaggtcgtcagctcccggtcgatggtggctttgatgatgagggcaatttgaccaaagaacctggcgttatcgagaagaatcgccgcattttgccgatgggctactggaaaggttctggcatgtcgattgtgctggatatgatcgctactctcctttccgacggcgcatccgttgccgaagtcacccaggacaacagcgacgaatacggcatttcacaaatttttattgccattgaagtggacaagcttatcgacggtcccacccgcgatgccaagctgcaacgcatcatggattacgttactagtgccgagcgtgctgacgaaaatcaggccattcgcttacccggccatgaatttactaccctgctggccgaaaaccgccgtaacggcatcactgttgatgacagcgtgtgggccaaaatccaggcgttatga

SEQ ID NO: 131584 - DNA, 1401 bp, Homo sapiens
atgaaatttattcctggtgaagagggtgtgaacactgttgaaatgacaacaaagtgtttggaatattccgtaagcttaattggtaaagtagcagtagaacttgggggaagactgactacaatttttaaagagattctaagcagcaaagatgtgcagggattccctcacgcaggtggactgcactgggttagatgccgactgggagtcagtggatcccaggtgtacatctttgcgccagtgagcaccaaggaagcaggctctgggatgaagtttcgtgagcagagagtttattgggaagtgccctggagaatagcacctgtggaggaaaacaggcttgggcagaaggagaaaatgagttgcaatgcgtgcctgccagcttccgctgatctcaccagggctttgacattggaatggcccatcaaagtcgccctgtgttgggcccagatggcctggcctttattctcttttcctgcttcattggtcactggatgtgggctgcccggaaggatgcacctgcactatggttatgaatttctggaggatgaatccaggttcctgaggcatctccgaaagaaaggcagcagccctagtcaggggcttataaataaaactcccatttccctgggacagaacacctgggggaaagggcggctgtggtccaccttcagcaaacttaaatattcccgcctgctggctctgaagagagcagtgaatctcccagcacagggcttgagctctgctaaaggacagactgccccctcaagtgggtccctgacccccattcctcctaacggggagacatttccaagcagggatcgacagacacttcacacaggagagctctggctgtcatctggtgagtggctatctgggacaaagctttcagaggaaggaacaggcatcaatctttgctgttctgcagcctctgctggtgatacccaggcaaacagggtctggagtggaactccaacaaactccagcagacctgaagtgtcatctggggccatggacggagaggggtgggggctaccagtggacccactgactcctggacatcaggatgctctgccatggcaaaggtgttatcatccatgttcttcgtcttcagttcctcctcggcaggcctgcgcctcaccggcttcatgcagctcttcagctgcctggcctcagcctccacgggaccctggcactcgggctgtggctccagctgcggcagctgctgctgctggggcagcccttcggcatcagtgggtgtgggagcgggtgcgatccggagcaggactgtgtagttgcggccgtggttgttggcccagaaagtgccctcaggggtctcatagcgcaccacgaagtcgaggcgcgccccatcgcccgcgccctcagcaaagggcagctggaaggcaa

SEQ ID NO: 131585 - DNA, 1173 bp, Homo sapiens
tcacatagtcccacattttttagaggctttgtttgtttgtttgttttttattctttttcctctaatcttgtcttcacactttatttcattctgttgatcttcaatctctgatatcctttcttccacttgattgattcgactattgatacctgtgtatgcttcacgaagttcttgtgctgtgtttttcagctccatcaggtcatttatgttctcctctaaactggctattctttgatctttgatgctgatgacctttggatggggtttttgcgtgggcatcctttttgttgatgttattgctttctgtttgttagttttccttctaacagtcaggcccctcttctccaggtctgctggagtttgctggaggtccactccagaccttgttcacctgggtatcaccagcgaaggctgcagaacagcaaagactgctgcctgctccttcctctggaagctttgtcccagagcggcactcatcagatgccagctggagctctgctctatgaaatgtctgtcaatccctgctgggaggaacaccaaactgatcaactatttacacacgaaagcaccttcatcagaagcaaaactcagaagaaagtacctgacaaattattggattccagcacagtgactcccttattcaagataactgaaaacattggttgtgttatgaccggaatgacagctgacagcagatcccaggtacagagggcacgctatgaggcagctaactggaaatacaagtatggctatgaaattcctgtggacatgctgtgtaaaagaattgccgatatttctcaggtctacacacggaatgctgaaatgaggcctcttggttgttgtatgattttaattggtatagatgaagagcaaggccctcaggtatgtaagtgtgatcctgcaggttactattgtgggtgtaaagccactgcagtgggagttaaacaaactgagtcaaccagcttcctagaaaaaaaagtgaagaagaaatttgactggacatttgaacagactttggaaactgcaattacatgcctgtctactgttctatcaattgatttcaaaccttcagaaatagaagttggagtagtgacagttgaaaatcctaaattcaggattcttacagaagcagagattgatgctcatcttgttgctctagcagagagagactaa

SEQ ID NO: 131586 - DNA, 4227 bp, Homo sapiens
atggacccagtccttatggatcatagtccaggaaagaggaaacaccggataggagagctcaaggttaccactgactatttcctaacagtacacatgggctccaaaaatcatgttttcacccaaaccagctcttccctggaaaaactatctttctcaccaactgagctgaaggggatgggagtagccccagacaaaaaggtggcaaactcacactgttcttccccaaattccagtgctgctgataagtctgatgacattctggttgccattttttctgtgaacaaaagtgcctgcctgccagctctggagagagcagcagatctcccagcacagaggactggtcaaagaactaccgaagaaaacattcctttggggccaccagtgaatgaaaatgtgagtctagctatctcaggcagatacctctcagcaggggttgacagacacctcatacaggagatctctggctggcatttgctgggtgcccctctgggacgaagcttccagaggaaggaaaaggaagcaatctttgctgttctgcagcctccgctggtgatacccaggcaaacagggtctggagtggaccaccagcaaactccagcagacctgcagcagagaggccttactgttagaaggaaaactaaccaacagaaaggaatagcatcaacatcaacaaaaaggatgtccacacaaaaaccccatctgaaggtcaccaacatcaaagcacgggaacaaaactggacagagaatgagtttgacaaattgacagaagcaggcttcagaaggtgggtaataacaaactcctctaagctaaagcagcttgttctaacccaatacaaggaagctaagaaccttgaaaaaaggttagacgaattgctaactagaataaccagtttggagaaggacataaatgacctgatggagctgaaaaacacagcacgagaacgttgtgaagcatacacaagtatcgatagccgaatcaatcaagcaaaagaaaggacatcagacactgcagatcaacttaatgaaataaagtgtgaaggcaaggttagagaaaaaagaatgaaaaggaacgaacaaagcctccaagaaatacgcgaatatgtgaaaagaccaaacctacatttgattggtgtatgtgaaagtgacggggacaatggaaccaagttggaaaacactcttcgggatattatccaggagaatgtccccaacaaaatcagcagggaggtgaagcttatagagctgtaaaatggactgaagcaaactggacacctgactagagaccaggacatcctggcctagtttcaggttgtgcggcactttcctctgacttgtagctacctgcacactccatttattcgtgtctgcgataatacagacagcttcagctattggctcatccaggactggatgctggtcaacagtgctgaggttaagaaatcctgctctagggtgaacagccactgtggaatgggagaacacagttggcttatactgctttaagagtgtagcacaaagccagggccttaagtcagcaggtgatgaatcctgccagtactgggtccttcccttcaaggcagcgggttcctttgtgcccaggctgtgtcttttttcaaggttcttagcttccttgcattgggttagaacatgcttctttagctcagaggagtttgttattacccaccttctgaagcctacttctgtcaattcatcaaactcaattctccatccagttttgttcccttgctggtgaggagctgtgatcgttggtgaccttcggatggggtctctgagtggacgtcctttttgttgatgttgatgtggctgttttctgcttgttaattttccttctaacaggcctgtctgctgcaggtctgctgtggtttgttggaggtccactacagaccctgtttgcctgggtatcaccagcggaggctgtagaacagcaaagattgctgcctgttccttcctctggaagcttcgtcccagaggggcacccaccagattccagccagagctctcctgtatgaggttctgtcggcccctactgggaggtgtctcccagtcaggatacacaggggtcagggatccacttgaggaggcagtctgacccttagcagagctcaaacgtgcccgctttccagtcgggaaacctgtcgtgccagctgcattaatgaatcggccaacgcgcggggagaggcggtttgcgtattgggcgccagggtggtttttcttttcaccagtgagacgggcaacagctgattgcccttcaccgcctggccctgagagagttgcagcaagcggtccacgctggtattgccccagcaggcgaaaatcctgtttgatggtggttccgaaatcggcaaaatccattaattgcgttgcgctcactgcccgctttccagtcgggaaacctgtcgtgccagctgcattaatgaatcggccaacgcgcggggagaggcggtttgcgtattgggcgccagggtggtttttcttttcaccagtgagacgggcaacagctgattgcccttcaccgcctggccctgagagagttgcagcaagcggtacacgctggtttgccccagcaggcgaaaatgctgtttgatggtggttgcgaaatcggcaaaatctagacactaaatctgctggtgccttgatcctgaacttcccatcctccaaatttctgttacttataagccactcagtgtatggtattttgttactgcagtccagatgaactaagacaggtgtccccatcccctgggctgtagacgtgtaacccgttaggaactgagctccctcccggacgggtcggctggcggtacgggggctgcccctcacctctctcccagatggggcagctgccgggcggagacgctcctcacttcccatacggggtggaaaatcagcagggaggtgaagcttatagagctgtaaaatggactggagcaaactggacacctgactagagaccaggacatcctggcctagtttcatgttgtccgtcactttcctctgacttgtagctacctgcacactccatttatccgtgtctgcgataatacagacagcttcagctattggctcatccaggactggatgcttgggatttgcagcctcttgaccccgaaccccatctaccaacaatgacagtccacaggaacttgcagtgttccgtaagtgttccttaagacaaatgctgctctgatcggcaggagagaggccacacggcgtgtcaatgtcaaaattatatttatgtagcatctgctgccagccacggaccttctcttggcagaggcagcttctcttcctaggaacctcaggtgatttaccaccgtgacccagatctagcatggctgaagcgcaggcttcgtcgtcactgtctcccagggcgctatctgagctttcatttcggggaatgtctccttcagtcctgaagttggccctcttgttgtcatccccacaagggatattcgtaaaaagcacgaggccaggggcccgctggacacacctgtgggctgggccccagtaaagctgaacctgggttgccattcttgaggaccagggcttaaattccccaaaacccaaatcctcatttctcagtggccgttgaacaaggtaatttttaccgaggattttggacaggaagttagaagaagggctttttcccagctgtgcccaaagaggattatacggatgtgttttggccagcatgttcactgactgggaggtacgtttctctgagaaggctttgatgggagggtgatccacaggcatgacagttgggacccaggccaggtggtaggttaacaccgcagtcagtaaggcagcaaaaaactggtttttatttatctgttctatcagaagtgtaaactccttgagaaagcgctggcagagctggtttttttccaaagtgccggacatcatagtaagccatacaggttcagctatccttggaacagaatataagttccagatagttcctcttgggatttgcaggctcttgaccccgaacccatctaccaacaatgacagtccacaggaacttgcagtggttccgtagtgttccctgaggtgggaggatcccttctgttttggagatcggagctgccctgagtccaacatccaactggccttccgcctggggtggcagagccagactctgcttgcagatttgccaacaagcactgtggtggaattccaatgtggtggaattcgccactggaccat

SEQ ID NO: 131587 - DNA, 1085 bp, Homo sapiens
ttatcttagtagtgtttgtatttcctgaatttgaatgttggcctgtcttgctagattggggaagttctcctggatgatatcctgaagagtgttttccagctcggttacattctcctcatcactttcaggtacaccaatcaatcgtaggtttggtcttttcacatagtcccatatttcttggaggctttgtcctttccttatcattcttttttctgtaatcttgtcttcaagctttatttcattaagttgatcttcaatctctgatatcctttcttccgcttgatcaattcgactattgatacttgtgtatgcttcatgaagttctcgtgctgtgtttttcagcaccatcaggtcatttatcttcttctctaaactggttattctagttagcccttcctgtaaccttttatcaaggttcttagcttccttccattgggttagaacatgctcctttagctcaaaggagtttgttattattacccaccttctgcctacttctgtcaattcgtcatactcttctctgttcagttttgtgcactttggataggttttttgcatgggcgtgctttttgttaatgttgatgttattgctttctgtttgttagttttccttctaacagtcaggctcctcttctgcaggtctgctggagtttgctggaggtccactccagaccctgtttgcctggttatcaccagcggaggctgcagaacagcaaagattgctgtctgttccttcctctatggaatttctaggcggctttgtttacactgtgagggtgaaaccatctactcaggcgtcagcaatggcagacgcccttccccccaccaagctggagcatcccaggtcgagctcagactgctgtggtagcagcgagaatttcaagccagtggatcttagcttgctgggttccgtgggggtaggacccaccgagccagaccacttggatccctggcttcagccccctttccaggggagtgaacggttctgtcttgctggcgttccaggtgccactggggccctggtgcatgatattccactcgctgtgtccatgtgttctcattgttcaactcccacttatgagtga

SEQ ID NO: 131588 - DNA, 3512 bp, Homo sapiens
atgaaggcagaaataaagatgttctttgaaaccaacgagaacaaagacaccacataccagaatctctgggacgcattcaaagcagtgtgtagagggaaatttatagcactaaatgcctacaagagaaagcaggaaagatccaaaattgacaccctaacatcacaattaaaagaactagaaaagcaagagcaaacacattcaaaagctagcagaaggcaagaaataactaaaatcagagcagaactgaaggaaatagagacacaaaaaacccttcaaaaaatcaatgaatccaggagctggttttttgaaaggatcaacaaaattgatagaccgctagcaagactaataaagaaaaaaagagagaagaatcaaatagacacaataaaaaatgataaaggggatatcaccactgatcccacagaaatacaaactaccatcagagaatactacaaacacctctacgcaaataaactagaaaatctagaagaaatggatacattcctcgacacatacactctcccaagactaaaccaggaagaagttgaatctctgaatagaccaataacaggctctgaaattgtggcaataatcaatagtttaccaaccaaaaagagtccaggaccagatggattcacagccgaattctaccagaggtacaaggaggaactggtaccattccttctgaaactattccaatcaatagaaaaagagggaatcctccctaactcattttatgaggccagcgtcattctgataccaaagccgggcagagacacaaccaaaaaagagaattttagaccaatatccttgatgaacattgatgcaaaaatcctcaataaaatactggcaaaccgaatccagcagcacatcaaaaagcttatccaccatgatcaagtgggcttcatccctgggatgcaaggctggttcaatatacgcaaatcaataaatgtaatccagcatataaacagagccaaagacaaaaaccacatgattatctcaatagatgcagaaaaagcctttgacaaaattcaacaacccttcatgctaaaaactctcaataaattaggtattggtgggacgtatttcaaaataataagagctatctatgacaaacccacagccaatatcatactgaatgggcaaaaactggaagcattccctttgaaaactggcacaagacagggatgccctctctcaccactcctattcaacatagtgttggaagttctggccagggcaatcaggcaggagaaggaaataaagggcattcaattaggaaaagaggaagtcaaattgtccctgtttgcagacgacatgattgtttatctagaaaaccccatcgtctcagcccaaaatctccttaagctgataagcaacttcagcaaagtctcaggatacaaaatcaatgtacaaaaatcacaagcattcttatacaccaacaacagacaaacagagagccaaatcatgagtgaactcccattcacaattgcttcaaagagaataaaatacctaggaatccaacttacaagggatgtgaaggaactcttcaaggagaactacaaaccactgctcaaggaaataaaagaggacacaaacaaatggaagaacattccatgctcatgggtaggaagaatcaatatcgtgaaaatggccatactgcccaaggtaatttacagattcaatgccatccccatcaagctaccaatgactttcttcacagaattggaaaaaactactttaaagttcatatggaaccaaaaaagagcccgcatcgccaagtcaatcctaagccaaaagaacaaagctggaggcatcacactacctgacttcaaactatactacaaggctacagtaaccaaaacagcatggtactggtaccaaaacagagatatagatcaatggaacagaacagagccctcagaaataatgccgcatatctgcaactatctgatctttgacaaacctgagaaaaacaagcaatggggaaaggattccctatttaataaatggtgctgggaaaactggctagccatatgtagaaagctgaaactggatcccttccttacaccttatacaaaaatcaattcaagatggattaaagatttaaacgttagacctaaaaccataaaaaccctagaagaaaacctaggcattaccattcaggacataggcgtgggcaaggacttcatgtccaaaacaccaaaagcaatggcaacaaaagccaaaattgacaaatgggatctaattaaactcaagagcttctgcacagcaaaagaaactaccatcagagtgaacaggcaacctacaacatgggagaaaattttcgcaacctactcatctgacaaagggctaatatccagaatctacaatgaactcaaacaaatttacaagaaaaaaacaaagaaccccatcaaaaagtgggcgaaggacatgaacagacatttctcaaaagaagacatttatgcagccaaaaaacacatgaagaaatgctcatcatcactggccatcagagaaatgcaaatcaaaaccactatgagatatcatctcacaccagttagaatggcaatcattaaaaagtcaggaaacaacaggaaacatgagtctgtgatgaaagatataagtgaatccaaattcaagtttaattttggaaaccatatgagcacctgggggaaggggaggtttttggcagagcttcagcaggctgaaacatccctgcctgatggctctgaagagaacagagatctcccagcacagcatttgagctctgataagggacagactgcctccttaagtgggtccctgatcccggtgtatcgtgaatgtgagacacctcccagtaggggccgacagacacctcatacaggagagctctggctggcatctggtgggtgcccctgtgggacaaagcttccagaggaaggaacaggcagcaatctttgctattctgcagccttcgctggtgatacccaggcaaacagggtctggagtggacctccagcaaactccaacacgcctgcagaagaggggcctgactgaagcaaaccatatttggtttctacatcataaagtttataatccttaatgtctggagatataggggaaggtagattttcccagttaccaagaacattggctaaactggcaaaaactggttctgtacaaaatgccaagcaatccctggattcttctaaaggatgctggacagtaagaagtcgagggtgtcgaagccgagttaactgttggactcctcgttttagagaatcaatgatttgatccttttcaaatttttgatacttgtcaatcagttttttatcaaagacaaaaactgccacttcctgctttgttgacttttttgtgccattaaaaatcttccaagctagcccattgccaccactggcaatgtgtcgaccaacatcaaattctctagtgacaggatttcccattacagcactagtgacatcagctgttacttttgtaacagtactcttcaatttattaagcatggactccat

SEQ ID NO: 131589 - DNA, 2153 bp, Homo sapiens
atgccggcaccgcggcgtgtcggcacgtgcttagcggcaagccgtcgaaactgtcacgggatccgtggtgctcgcgttgggctagatttcgttctcgtcgtggttcgtagtgagatgatcccagagcgtgtggatgatggtccacacgaaccgttgtttacgccaattgttgaacctgtacagcagccgcaacaaccggttgcaccgcagcagcaatatcagcagccgcaacaaccagttccgccgcagccgcagtatcagcagccacaacagccggttgcgccgcagccacaatatcagcagccgcaacaaccggttgcgccacagcagcaatatcagcagccgcaacaaccggttgcgccgcagcagcagtatcagcagccacaacagccagttgcgccacaaccgcaggataccctgcttcatccgctgttgatgcgtaatggcgacagccgtccgttgcataaaccgacgacgccgctgccttctctggatttgctgacaccgccgccgagcgaagtggagccggtagatacctttgcgcttgaacaaatggctcgcctggtggaagcgcgtctggctgatttccgtattaaagccgatgtcgtcaattactctccggggccggttatcactcgctttgaattgaacctggcaccgggcgtaaaagcggcgcgcatttctaacttgtcacgggacattgcccgttcactttcgacggtggcggtgcgtgtcgttgaagttattcctggcaaaccctatgtagttaggctcgaccttcaaagatgggaagggcggggtccagttacctggattaaacacacgatgtggacccggactggcttatctcgccgcgtggacctactgggtggtgcatattccctatctggcacaaaaaccccaggcaattctgattgcgctcggttgggcgatgaaaggcgacggttcgctaatctaagaatattcagtcgtaccgttactggggttaacgctggtgctgtttatcttctttatgtgggttgcatcacgcggtatgaaatcgctgaaaatcgtcggttctgtggcagggattgctatgtctgttatgtcactcctgtatttggcgatggcgaggaaggagcaggcagcaatttttgctgttctgcagcctccgctggtgatataggtaaacagggtctggagacgcaaatggatccgcattttttacggccaatgtgtatcttaaccccccgaatttcaagtcaggatgatgatatgcccgttgcccacgttgccttgcccgttccgcttcctcgtacctttgactatctgctgccagaaggcatgacggttaaagatgggtgtcgcgtgcgcgtgccgtttgccaaacagcaggagcgcatcgggattgtggtatcagttagcgatgccagcgaactgccgctcaatgagctaaaagcggtagtcgaagtgctggatagtgagccggtgtttactcactccgtctggcgattgctgctatgggcggcagattactatcatcatccgattggcgatgtgctgtttcatgccttgccgattttactacgccaggggcggcctgcggcgaacgcgccgatgtggtactggtttgccactgaacaaggccaggcggtggatctgaacagcttgaaacgctcccccaagcaacaacaggcgctggcggcgttacggcaaggcaaaatctggcgcgaccaggtcgccacgctcgaatttaatgatgccgcgttgcaggcgctacgcaaaaaaggtctgtgtgatttagcaagtgaaacaccagagtttagcgactggcgaacgaactatgccgtttctggtgagcggttgcgattgaataccgaacaggccaccgccgttggcgcaattcatagcgcggcagatactttttctgcctggctgctggcgggcgttaccggttccggtaaaacggaggtttatctcagcgtactggaaaacgtgctcgctcagggcaaacaggcgctggtgatggtgccggaaatcggcctgacaccgcaaactatcgcccgttttcgtgaacgttttaatgcccccgtggaagttctgcattccggcctgaacgacagcgagcgtctttcggcgtggctgaaagcgaaaaatggtgaggcggcgattgt

SEQ ID NO: 131590 - DNA, 2475 bp, Homo sapiens
ctataaattactttgggcagtatggccattttcacggtattgattcttcctatccatccatggaatgtttttccatttatttgtgtcctctcttatttccttgaacagcggtttgtagttattcttgaagaggtccttcacatcccttgtaagtttgattcctaggtattttattctctttgtagcaattgtgaatgggagttcactcatgatttggttctctatttgtgttttattggtgtatgggaatgcttgtgatttttgcacattgattttgtatcctgagactttggtgaagttgcttatcagctgaaggagatttttggctgagatgatggggttttctaaatgtacaatcatgtcatcttcaagcaaagacaatttgacttcctggcttcctatttgaatacgctttgtttctcttgcctgattgccctggccagaacttccaatactttggtctttgatgttggtgacttttggatggggtttctgtgtggatgtggcttttgttgatgttgatgctattcctttctgtttgttagtttttcttctaacagtcaggcccctctgctgcaggcctgctggaatgtgctggaggtccactccagaccttgtttgcctgggtatcaccagcagaggctgcagaacagcaaatattgctgcctgatccttcctctggaagcttcgtcccagaggggcacccacctgttgcgatggtcgcactggactctcttgggaacagttggcatcttttgcccactggattcctttttctatccctgctctcctttttatgttgctttcactgcaagttctctgaacaatattttgaagctgtgacctgttgtttcctgactttttaatgattgccattctaactggtgtgagatggtatctcattgtggttttgatttgcatttctctgatggctagtgatgatgagcattttttcatgtgctttttggctgcataaatgtcttcttttgagaagtatctgttcatgtcctttgtccactttttgatggggttgtttgtttttttcttgtaaatttgtttgagttcattgtagattctggatattagccctttgtcagatgagtaggttgcaaaaattttctcccattttgtaggttgcctgttcactctgattgtagtttcttttgctgtacagaagctctttagtttaattagatcccatttgtcaattttgtcttttgttgccattgcttttggtgttttagacatgaagtccttgcccatgcctatgttctgaatggtattgcctaggttttcttctagggtttttatggttttaggtctaacgtttaagtctttaatccatcttgaattgatttttgtataaggtgtaaggaagggatccagtttcagctttctacatatggctagccagttttcccagcaccatttattaaatagggaatcctttccccattgcttgtttttctcaggtttgtcaaagatcagatagttgtagatatgcggcgttatttctgagggctctgttctgttccattgatctatatctctgttttggtaccagtaccatgctgttttggttactgtagccttgtagtatagtttgaagtcaggtagtgtgatgcctccagctttgttcttttggcttaggattgacttggcgatgcgggctcttttttcattccatatgaactttaaagtagttttttccaattctgtgaagaaaggcattggtagcttgatggggatggcattgaatctgtaaaataccttgggcagtatggccattttcacgatattgattcttcctacccatgagcatggaatgttcttccatttgtttgtatcctcttttatttccttgagcagtggtttgtagttctccttgaagaggtccttcacatcccttgtaagttggattcctaggtattttattctctttgaagcaattgtgaatgggagttcactcatgatttggctctctgtttgtctgttgttggtgtataagaatgcttgtgatttttgtacattgattttgtatcctgagactttgctgaagttgcttatcagcttaaggagattttgggctgagacaatggggttttctagatatacaatcatgtcatctgcaaacagggacaatttgacttcctcttttcctaattgaataccctttatttccttctcctgcctaattgccctggccagaacttccaacacccaaaaggttattgtgacgatgaacagagacaacacatgctcaagtgtctgccattgtgcccaagatgtaggaggacttcgaaagagtttaccatatcgtttcagtgtctttccattgggagcatcaattgggttaagctcctttctagctgtcaggggtatggagagggagcaactggtctcattgtcttcctgtgtattgagaagtgaacttccgccacttactccctttatcagccccaaaaccgcatgcat

SEQ ID NO: 131591 - DNA, 701 bp, Homo sapiens
gggccgcggtggggcccgcgcgtacatcgggctccggacccagtccgcattccgtcgtccggcccgctgctgccgccgcgcttctacccgcgctacgtgctaccgctcgccttcggcaagtacttcgcgtccgtgtcagcgcacgtcagcatctggaaggtgcccgtgtcctatgcacacaccgtcaaggccaccatgcccatctgggtggtcctcctgtcccggatcattatgaaggagaagcagagcaccaaggtatacttgtcactcatccccatcatcagcggtgtcctgctggccaccgtcaccgagttgtcttttgacatgtggggactcgtcagcgccctcgccgccacgctgtgcttctcgcttcagaacattttctccaaaaaggtcttgcgagattcacggatccaccatctccggctgctcaacatcctgggctgccacgccgtcttctttatgatccccacctgggttctggtggacctctcggctttcctggtcagcagcgacttgacctacgtctaccagtggccctggacgctcctgctcctggctgtcagcggcttctgtaactttgcccagaatgttatcgccttcagcatcctcaacctcgctagccccctgagctactcggtcgccaatgccaccaaaagaatcatggtcatcacggtgtccctgatcatgctgcgcaaccc

SEQ ID NO: 131592 - DNA, 630 bp, Homo sapiens
atgcgcccaaacccgaagcggcgggcccggccgccgcccccgaggccgggcgcggaacctaccgaccaggagcttcgaaatgtcatcgacaagctcgcccagttcgtggctcgcaatgggcccgagtttgagaagatgactatggagaagcagaaggacaaccccaaattctcgtttcttttcggaggcgaattctacagttactacaagtgcaagctggcgctggagcagcagcagcgccgtcccatcgagcgcttcctttctcggattccagtccgggctctgccacaaacctctttctttcgggtcgtttattctttgaagtggagcagctcggtccacacgatccctgttccgctgttcccacggccctgcacagagcggctgctgggtgccactgtaatggagaacaacgaggtcttgcgagattcacggatccaccatctccggctgctcaacatcctgggctgccacgccgtcttctttatgatccccacctgggttctggtggacctctcggctttcctggtcagcagcgacttgggtgacaggatccgtattccaaacctcagcatcatgcaatactctcatgtaacaaatatgcacatgtactctctgtatctacaataa

SEQ ID NO: 131593 - DNA, 1147 bp, Homo sapiens
ccagagttccggtggagaagcccagcctgaggctggggagcaggtgggcgtccctgttgattcctccatggcaaatgtgaatccttgggcttcccagtagccccaggtggaacgtactcttggacactgtataaaacggttgcgtgtctgaatgccgtcgttttgccccgcggccccatcgtacatgcgcatccccgcaggcgccaccgtctccactttccgcagcagcgtccctgacgctgcgcgacccgttgccaaggcgactggaaccgcggcccgagatctgcgcgagaagtacgagcgaaagcagctgctgctgtttgtgactctagaggatcccacctgccattgggctaaccaaaaaggaatgaattggctcagcttgatgaaatgtgatttgcgagccagcgaatgtgaagaaatcgcctctctcctcatcagtggcgggagtctgagaaaactgaccttatccagcaatccgctgaggagcgacgggatgaacatactgtgtgatgccttgcttcatcccaactgcactcttatatcactggtgatgtcatgcagaagtgaaaacatatttagggaaatggacgtacagttgatactcaggtatgtcaggctccgattacgagccaaagccttgaacggcccgcggaccccaaccccgagtgagcaggacgcagaggctgggccagcgagccgcagggacaccgaagccgagcgtctgcgcttccggcagttccagtaccacgtggcgagcgggccgcacctcgcggtgggccagctgtggacgctgtgccgccagtggctgaggcccgaggcgcgctccaaggagcagatgctggaggtgctggtgctggagcagttcctgggcgcgctgcccagcaagatgcggacctgggtgcagtcacagggcccccgaagctgcagggaggccgccagcctggtggaggacctcacacagatgtgccagcaggaaggactggctgcccacccttcccatgacacagctatcagaggcataccaaggttggctgcctcatgggagacagcaagtgccatggaggccacagctgatgccagacaaaagagaacacacacagagaaggaggcatggctgcttgaagctccccacgagctggcctga

SEQ ID NO: 131594 - DNA, 1577 bp, Homo sapiens
atgcgcatccccgcagccgccaccgtctccactttccgcagcagcgtccctgacgctgcgcgacccgttgccaaggcgactggaaccgcggcccgaggtaactggagggcacggcgggggcggggcgctcatcccaggcggcttctgattggcctcggccgcctcgtgcgtcacagccccgcccctgcccgggagtcccgcagcggtgacttgtcaccgacgcccggcgtgatccagcggaccaatggcggccgcccgcggcgcgcagcgtgcggggatggggtcccgcccgcggcgttgggcgcgctcgccagcccaggggtcgccatgaccgagcggcccaggcccgagcgaagcccgcgcgcggcccatcttcctcctgaacagccgcccccgacccatcccccacccaatcaccccaccatcctccccccaaccagccgtccacagccgtcgtcgctgcccctcccctgtattcccagtgcgctgcccttgcacacttccccagctcgtttattatggaactcctccgtgtggcatcctaagctcccaacgccctccccactacctcagcccaggaccctggaggatgctgaggggctacagcccccctccctagagtctccagggcccctgattgctgattctgtccgcctgccacaccggctctgtccggagccactgggactcgggatccagtccacacacacccctcagaggggcactgtggccagagaaatgcttccacggcccaaagcccctgcctcccccagacgcccccagaccccaaccccgagtgagcaggacgcagaccctgggccagcaagccccagggacaccgaagcccagcgtctgcgcttccggcagttccagtaccacgtggcgagcgggccgcacctggcgctgggccagctctggacgctgtgccgccagtggctgaggcccgaggcgcgctccaaggagcagatgctggagctgctggtgctggagcagttcctgggcgcgctgcccagcaagatgcggacctgggtgcagtcacagggcccccgaagctgcagggaggccgccagcctggtggaggacctcacacagatgtgccagcaggaagttctggtatctctggactcggtcgaaccccaggactggagtttcggtgaggaggaagatgggaagagtccaaggtcccagaaagaaccatcgcagtgtctatctccctctcatttagtcattcaacacacattgactgacgagctgcgggaacaagaatgcctgccccgtggtgtggccagcactgcccaatgaagttcctacagggatgtaaagattctctacccatgcaaccacctacgtgtggctaggagcacctgaaataggaactgaattttaaatttaaattccatttaaatggaagcagccaggtgggctacataataatggatgacaccaccaccagcagcaggtctacccatggtgttatctttgctgtcttcctgactttcctaccaggtccaagctgggggtggaggccaggaagagggcaagggagactggagactctgaaaagagagggaaagtgg

SEQ ID NO: 131595 - DNA, 1529 bp, Homo sapiens
atgccacacttcacttttgcacaatgtattccaaacacacatcaggtaggcaattcaattgcaattggccttgcaacagggcattggcaccagcacaggcacaagcatcaaggggcatcaccaagtcacagtatccaagccagcacaggttcaaccctggtgtcagtatcaaatagcaacacaaagtcgtattccagcatatcatcatcatcatacaaaacccaaccatatttcattgtaccatcaaaaattattcgcagcacttggtacagcacttgctacaaaaagggcaacatcattgcccaacttaaaacccacagcaaacattatccaaaatcggcacaacaacaccaccagagtgcatccttaaccaccatactgcagcactctaaaggtggcacagctggctccaagccccacttgggctacacgggccctgccaaatatcaagcccgtgacggccggacccaaagcactacaaatggccccctcgacaacctggacacgaacaagctagaaagactccaggggggttaccccccgggacaccgtgacccagggaaaaacacaacaggcagctggcggttgccagggaagagcccccgctttgactgtccaggggatgtggtggtcagggccagcttctccatcttccacctgtacaacatcaccctgtttgatttcactgctccaccagctggcttggagtcttcaagcgtttccacctggggctactgggaagcccaaggattcacatttgccatggaggagatcaacagggacgcccacctgctccccagcctcaggctgggcttctccatccggaactctgggaggagcccatccccagctacacgtctgggcccagcgctctcggagctgctttggagaaacatgcttggcgttgtctatgccaatggccaggctcctgggactctacaggtttctccagcatccggcatcagcggcaaagcccttctgcccatccccgcaatagaatttggggctcgggctgcagatctcagtgcccatgccagacctcagcccaggaccctggaggatgctgaggggctacagcccccctccctagagtctccaggagtctccagtctcccttgccctcttcctggtctccacccccagcttggacctggtaggaaagtcaggaagacagcaaagataacaccatgggtagacctgctgctggtggtggtgtcatccattattatgtagcccacctggctgcttccatttaaatggaatttaaatttaaaattcagttcctatttcaggtgctcctagccacacgtaggtggttgcatgggtagagaatctttacatccctgtaggaacttcattgggcagtgctggccacaccacggggcaggcattcttgttcccgcagctcgtcagtcaatgtgtgttgaatgactgaggctgggtgatgtcagaaaattgtaggtgccccggctctgcagtctgaagttgaaggccttagcatgcctcgtgccgaattcagcagacgtcag

SEQ ID NO: 131596 - DNA, 552 bp, Homo sapiens
atgaatactgccaatgttgagaagccttatgtacagaaatatcaaacagcctttgttctggtaatgaaacatcggcagtgccagctagcctcacacttggtgcaaaattatcgcagttccaactatgggcctgggaacaaaatccaagacccaggaaccacctgcccctcattcaatacaataacacaaggctctaaaaagccctaccctgattttgtggcaaggctccgagatgctgctcaaaactcaattaccgatgaaaatgcccgtaaggtcatagtggagttgatggcatatggaaatgccaatcctgagtgtcaatcagccactaagccattaaaagggaaggttcccacaggatcagatgtaatctcagaccagaaggctgtgggtgtacaggcagccaagaggagaaacagaactgacaccggcctaggccgatctgcaagaaaaagcgggaaaggagtgacccggatgcttccgaagcacgcgagcatgattttggatggaggtgggccggcgacttcgcctagctgctgccggttcctgtaa

SEQ ID NO: 131597 - DNA, 513 bp, Homo sapiens
atgttcagtgatgtgtccatagacttctctcaggaggagtgggactgcctggaccctgttcagagggacttatacagagatgtgatgttggagaactacggcaatctggtttcaatgggactttacactcctaagcctcaagtgatctccttattggaacaagggaaagagccctggatggttggcagagagcttacaagaggcctgtgttcagacaaggcgctaaaggagccctaccctgattttgcggcaagcctccaagatgctgctcaaaagtcaattaccaatgagaatgcccgtaaggtcatagtggagttgatggcatacgaaaatgccaatcctgagtgtcaatcagccattaaaccattaaaaggaaaggtcccagtgggatcagatgtaatctcaagaggttttcagggacaacaacccccactgtcacaagtgcttcagggaatgggccagttaccacaatacagcaactgtccccggccacaagcggcagtgcagcagtag

SEQ ID NO: 131598 - DNA, 828 bp, Homo sapiens
gcatataagtagactaaagtcccagcggccccctagaggtgagtttgagagtgtgccccatgaggagacttggtggattgatggggtacaagaacaggtccgaagaaatagggctgccaatcctccagttaacatagatgcagatcaactattaggaataggtcaaaattggagtactattagtcaacaagcattaatgcaaaatgaggccattgagcaagttagagctatctgccttagagcctgggaaaaaatccaagacccaggaagtacctgcccctcatttaatacagtaagacaaggttcaaaagagccctatcctgattttgtggcaaggctccaagatgttgctcaaaagtcaattgccgatgaaaaagcccgtaaggtcatagtggagttgatggcatatgaaaacaccaatcctgagtgtcaatcagccattaagccattaaaaggaaaggttcctgcaggatcagatgtaatctcagaatatgtaaaagcctgtgatggaatcggaggagctatgcataaagctatgcttatggctcaagcaataacaggagttgttttaggaggacaagttagaacatttggaggaaaatgttataattgtggtcaaattggtcatttaaaaaagaattgcccagtcttaaataaacagaatataactattcaagctactacaacaacagttagcctgcagaatacatatcttctgttcccttcaaccatgtctatatggaagacacacctggatcaggtgcagtgcctacctcctacaagcaagtctggaggcccatcccctaaggttcctgatactgtggctca

SEQ ID NO: 131599 - DNA, 423 bp, Homo sapiens; identical to SEQ ID NO: 120909

SEQ ID NO: 131600 - DNA, 1950 bp, Homo sapiens
atggtagctcatgcttatcatcccagcgacccaggaggccaagaaaagaaaaaccaactttctgaggaggaattcaagctggctgaagaaatttgcataagtaacaaggagccgaatgttaatagtcaagacaatggggaaaatgtctctagggcatgtcaaagaccttcttggcagcccctcctatcacaggcccagaggtcttggagagaaaaatggtttcctgggccagacccagggcccaactgctctgtgcaacctcgggacttggttccatgcatcccagtggatccagcaccagccacggctaaaaggagccctcaaggagaacttctgctatggcagtgtggaaggaaaatgtggagttgtagcccctgcacagggtccccactggggcattgcctagtggagctggtgaaggtacgctcgagcgtggtcattgaggacaagtcaatgagagattcccaagtacgtctacagtcagccttgcgaaaattttgcccatggtttctagaacagggaactttatatctaaaagactgggaaaaaattggcaaagaattaaaacaagcaagtagggagggtaaaatcatcccacttacagtatggaatgactgggtcattattaaagtagctttagaaccgtttcaaacagaagaagatagtgtttcagtttctgatgcccctgaaagctgtttaatagattgtaaagaagaggcagagataaaatcccggaaaggaacggaaagtttacattgtgagtatgtagcagagccggtaatggctcagtcaatgcaaaatgttgactataatcaattacaggaggtgatatatcctgaaacgttaaaattagaagaaaaaggtccagaattagcagggccatcagagtctaaaccacgagggccaactcctcttccagcagttcagatgcctgtaacattacaacctcaaatgcaggttaggcaagtacaaaccccaagagaatatcaaatagagaaagatagagtctctgtcacggcaatgccaatccaaatacagtatccacaatatcagccggtagaaaataagacccaactgccagtagcctatcaatactggctgccagccgaacttaagtgtcggccacccccggaaaatcagtatggacagccaggaatgttcccagccccacaggacagggcgccataccctcagccacccactatgagacttaatcctacagcaccacctagtgagcagggtagtgtattacataaaattattgatgaggcaagaaaacaaagagatattgaggcatggcaattcccagtaatattagaaccaataccacctggagaaggggcccaagagggagagcctcccctagctgaggccagatatgagtctttttctataaaaatgctaaaagatatgaaagagggagtaaaacaggcctcggaaaaaatccaagacccaggaaccgcctgcccctcattcaatacaataagacaaggctctaaagagccctaccctgattttgtggcaaggctccaagatgttgctcaaaagtcaattaccgatgagaatgcttgtaaggtcatagtggagttgatggcatatgaaaacgccaatcctgagtgtcaatcagccattaagccattaaaaggtggaacgagagacttgagaaaacaaagagacacagagacaaagtacagagaaagaaaagtgggcccaggggaccagcgctcagcatacggaggacccgtgccagcactggtctccgagttccctcagtatttattgatcattacctctaccatctcggagagggggatgtggcaggacaacagggtaatagtggagagagggtcagcagcaaaacatgtgaacaaatgtctctgcatcataaacaagataacaggggcagagaaagaacagaactacagctcctgtggcatcacctggagatga

SEQ ID NO: 131601 - DNA, 399 bp, Homo sapiens
ccactaaaagtcaatatttatcctgactctaaatatgccttccatattctgcaccaccatgagagaggtttcctcactacacaagggtcctctatcattaatgcctctttaataaaaacgcttctcaaagctgctttacttccaaaggaagctagagtcattcactgcaaaggccatcaaagggcatcagatcccatcgctcaggacaatgctcatactgataagatagctaaaaaagcagctagcattccaacttatacccctcactttcagtttttctccttctcatctggccactcccacctattcccccgccgaaacttccacttatcaatctcttcccacacaaggcaaatggttcttagacaaagaaacatatttccttccagcctcacaggc

SEQ ID NO: 131602 - DNA, 2385 bp, Homo sapiens; identical to SEQ ID NO: 114923

SEQ ID NO: 131603 - DNA, 2544 bp, Homo sapiens
atggcccctgaacagggcagagtatccattcttcagacactcttcatagaataccatggttattctatatttgtcgttaagggtgatctgccagattgcgaagctgaccaactcctgcagatgattagggtccaacagatgcatcgaccaaaacttattggagaagaattagcacaactaaaagagcaaagagtccataaaacagacctggaacgagtgttagaagcaaatgatggctcaggaatgttagacgaagatgaggaggatttgcagagggctctggcactaagtcgccaagaaattgacatggaagatgaggaagcagatctccgcagggctattcagctaagtatgcaaggtagttccagaaacatatctcaagatatgacacagacatcaggtacaaatcttacttcagaagagcttcggaagagacgagaagcctactttgaaaaacagcagcaaaagcagcaacagcagcagcagcagcagcagcagggggacctatcaggacagagttcacatccatgtgaaaggccagccaccagttcaggagcacttgggagtgatctagcgttgttgctcacacaaagcctgtttggtagtctcttcacatggacgcgtgtgacatttggtgctgaagacccgggacaggaggactccttcaggagacgggtcccctgtccttgccctcactccgtgaggagatccacctacgacctcgggtcctcagaccaaccagcccaaggaacatctcatgaatttcaaatcgggctgctcctcaccaggctgagccaggtcccaattcttcctcagcctccggtcccccaccctataatccttttatcaccccctcctcacaccgtgtctggcttacagtttctttctgtgactagccctcccctacctgcccaacaatttcttcttaaagaggtggctggagctgaaggcatagccaaggttatccccacctgcccagttcccttattaggccaagacattttaaccaaattatctgcttccctgattattcctggactacagccacatctcattgccacccttcttcccaacccaaagcctccttcgcctcttcctctcgtatcccccaaccttaacccacaagtatgggacacctccactccctccctggcaaccgatcaaacacccattactatcccattaaaacctaatcacccttacctggctcaatgccactattccatcccacaactggctttaagaggactgaagcctgttatcactcgcctgctacagcatgggcttctaaaacctataaactcttcttacaattctcccattttacctgttcaaaaaccggacaagtcttacaggttacctcaggatctggatcttatcaaccaaattgttttgcctatccaccctgtggctagcccccacattattcctgataccacacctgacccccatgactgtatctctctaatccacctggcattcactccatttccccatacttccttctttcctattcctcaccctgatcacacttggtttattgatggcagttccacctggcctaatcgccattcaccagcaaaggtgggctatgctatagtagtatcttccacatctatccttgaagctaccgctctgcccccctccactacctctcagcaagctgaactcattgccttaactcgagccctcgctcttgcaaaaggactacatgtcaatatttatactgactctaaatatgccttccatatcctgcaccacaatgctgttatatgggcagaaagaggtttcctcagtacgcaaaggtcctccatcattattgcctccttaataaaaactcttctcaaggccgctttacttccaaaggaagctggagtcattcactgcaagggccatcaaaaggcatcagatcccatcgctcagggcaatgcttatgctgataagtccgataacggactggcctttactagtcaaatcacccaagcagtttctcaggctcttggtattcagtggaaccttcataccccttaccgtcctcaatcttcaggaaaggactggacagtatttttacctcttgcccttcacagaattagagcccgtcctcgagaagctacagggtacagtccatttgaacttttatatggacgcactttcttgctcagccccaacctcgttccagacaccagccctctaggcgactatcttccagtcctctggcaggctagacaggaaatccaccaggctgctaatcttctcttgtctactccagattcccaactatatgaagacaccctagctggacgatcagttcttattaagaacctgacccctcaaactctacaacctcgatggactggaccctacttagtcatctatagtaccccaactgccgtccgcctgcaggatcctccccactgggttcaccgttccagaataaagctgtgcccatcggacaaccagcctaatctctcttcttcctcctggaagtcacaagtactccccactacttcccttaaagtcactctcatttctgaagaacagtaa

SEQ ID NO: 131604 - DNA, 355 bp, Homo sapiens
ctatactcagtctttgttgagtctcccacagttaccattgttcctggcctggacttcaatctggcctcccacgttattccagataccacacctgacccgcatgactgtatctctctgatccacctaacattcaccccatttccccatattttcttctttcctgttcctcaccctgatcacatttggtttattgatggcagttccaccaggcctaatcactactcaccagcaaaggaagctggagtcattcactgcaagggccatcaaaaggcatcagatcccattgctctaggcaatgcttatgctgataatgtggctaaagaagcatctagtgttccaacttctgtccctcaca

SEQ ID NO: 131605 - DNA, 471 bp, Homo sapiens
  misc_feature (1)...(471): n = a,t,c or g
ttctcacgtnnnnnnnnnnnnnnnnnnnnnnnnnnnnnnnnnnnnnnnnnnnnnnnnnnnnnnnnnnnnnnnnnnnnnnnnnnnnnnnnnnnngggacatgcatgaaatttggtgccgtgactcagatcgggggacctcctttgggagatcaatcccctgtcctcctgatctttactccatgagaaagatccacctacaacctcaagtcctcagactgaccagcccaagaaacatctcaccaatttcaaatccggaccctactgaaaatcagactgttcaactcacctggcagccactcccagagcccctggaactctggcccaaggctctctgactgactccttcccagatcttctcagcttagcagctgaagactgatgctgcccaatcaccttggaagcctacaggaccatcacagatgctttgggtaactcttacagtggagggtaagtctgtcccccacgcgtccg

SEQ ID NO: 131606 - DNA, 450 bp, Homo sapiens
  misc_feature (1)...(450): n = a,t,c or g
atggatagatatngactgntcttgggcctctccctttttccctttctccttgctgcctacattgccaagggaagcgactatgtggtcaccatgaggaagcaagaaggaggaaaaatgtcagcattccaagaaaggaagctggaatcattcactgcaaaggccatcaaaaggatagatcccattgctcagggcaatgcttatgctgataagacaaaattcctcgatttggccttcccacctctcagactgtcctttacttgtcaaatcacccaagcagtttctcaggctcttggtattcaatggaaccttcatacccttaccatcctcaatcttcagaaaagaattcgggcctgtcctcaggatgctactggatacagcccatttgagctcctgtatggatgctcatttttattaggccccagtctcattccagacaccagcccaacttga

SEQ ID NO: 131607 - DNA, 337 bp, Homo sapiens
gcagcttacaaagctgttaattatgacaagctgaaagaaactacccaaggtaaagatgaaaacccagcccagtacatggcccacttagcagtgacccttagacgctttactgccctagacccagaagggccagagggccgccttattcttaatatgcattttatcacccagtccactcccaacattaggaaaaaacttcaaaaattaaattccggccctcaaaccccacaacaggatctaattaacctcgccttccagctgaagactgacattgcccgatcacctcggaagcctacaggaccatcacagatgctctgggtaactctcacaatggaag

SEQ ID NO: 131608 - DNA, 801 bp, Homo sapiens
atgacctcgggtcctcagaccagccagcccaaggaacatctcaccaatttcaaatcggatgaacaggaaagagtttcttctctagcccaatctcacactgacaaccaccggcttcatgagccaggcctccaggaaggcattagagcagttccccgagaagatccccaatggaactatcaggcagattcccccagaggccccctggaccatcatagacgccgagcttcaggtaactcacagtggaggcaagccaaactcattgccttaactcgggccctcactcttgcaaagggactacgcatcaatatttatactgactctaaatatgccttccgtatcctgcaccaccatgctgttatatgggctgaaagaggtttcctccctacgcaagggtcctccatcattaatgccactttaataaaaactcttctcaaggccgctttacttccaaaggaagctggagtcattcactgcaagggccatcaaaaggcatcagatcccatcactcagggcaacgcttatgctgataagggaactaaaaagtggaagaaggaggcagaagagggagaaccagagagatggcagcctgagaaggacttgcctgagaaggactcggccgacattgctggctttgaagatggagaaatgagactgagccaaggaatgcaggtggcctctggtgctgcaaaagacaaggaaatggattctcccacagaccctccagaaggaatgcagacctgccaacactatgattttagtccagtgagacccattttggaatgctggcctccagaaccctaa

SEQ ID NO: 131609 - DNA, 1059 bp, Homo sapiens
ggccggcgtccgacggggacccttccctgctgtagatgccaccagggaggagtgtctcgtccgtccgtgctgagtgctgtggtatcgtggatgcagtagccatcatgccactctgaaggggtacagcctggaaatgacagagctgaaagaggggaaggacttgggctcctgggagtcaatcactcaattaaccgtaccaggaggcaccgttccccaggtttcttgctggggaggttttgcaggcttgagctcctccctgatcaagaaaagcaacctgaacagttaaaagttaaggtctcttcagagaggaaagcagaggtcaccccagcaggagatagtaccatttcttttgtggaaaggaaacagggaaagggacaatatgacagggaggagtcatcagtggagggaaataaagctggagagttaagtaggaagagattgtggaataccaggaaggccatgggcagtgccagctccagaaaggaagggactgtgacctatttgttttggtattatggagcccctcagagtgccagggccatacagctgaagactgacactgcccaatcacctcggaagcctacaggaccatcacagatgctttgggtaactcttacagtggaagggtcctccatcattaatgcctctttaataaaaactcttctcaaggctgctttacttccaaaggaagctggagtcattcactgcaagggccatcaaaaggcatcagatcccatcgctcagggcaacgcttatgctgataaggatccatcttgttgcagctctgagactgctgggtcccaccccttcaagattcctagccaatcaggctccacttctctccctttaaccagtcctttcactgcattcggttcttgcggtcctttcttaagcggctcgcagggtcccgagcccctcagctccccgggcctcggtggcccagggcccagctcagccgactgggcagtcgatgtaggtcctgagaagagcggcggcggcggcggcggcggcggcgaaggaaaagcgacactgaagcgaaggctcgcggtttcggcctaa

SEQ ID NO: 131610 - DNA, 1479 bp, Homo sapiens
ttatccccacctgcccagttcccttattaggccaagacattttaaccaaattatctgcttccctgattattcctggactacagccacatctcattgccacccttcttcccaacccaaagcctccttcgcctcttcctctcgtatcccccaaccttaacccacaagtatgggacacctccactccctccctggcaaccgatcaaacacccattactatcccattaaaacctaatcacccttacctggctcaatgccactattccatcccacaactggctttaagaggactgaagcctgttatcactcgcctgctacagcatgggcttctaaaacctataaactcttcttacaattctcccattttacctgttcaaaaaccggacaagtcttacaggttacctcaggatctggatcttatcaaccaaattgttttgcctatccaccctgtggctagcccccacattattcctgataccacacctgacccccatgactgtatctctctaatccacctggcattcactccatttccccatacttccttctttcctattcctcaccctgatcacacttggtttattgatggcagttccacctggcctaatcgccattcaccagcaaaggtgggctatgctatagtagtatcttccacatctatccttgaagctaccgctctgcccccctccactacctctcagcaagctgaactcattgccttaactcgagccctcgctcttgcaaaaggactacatgtcaatatttatactgactctaaatatgccttccatatcctgcaccacaatgctgttatatgggcagaaagaggtttcctcagtacgcaaaggtcctccatcattattgcctccttaataaaaactcttctcaaggccgctttacttccaaaggaagctggagtcattcactgcaagggccatcaaaaaggcatcagatcccatcgctcaggacaatgcttatgctgataagttagctaaaaaagcagctagcgttccaacttctgtccctcacgggatttctcaggccccccctcccctccctacgcatcaagctcggtactggcaaattgactttactcacatgcctcgagtcaggaaactaaaatacctcttggtctgggtagacaccttcactggatgggtagaggcctttcccacagggtctaagaaggccactgcggtcatttcttcccttttgtcagacataattcctcagtttagccttcccacctctatacactccgatagcagactggcctttattagtcaaatcacccaagcagtttctcaggctcttggtattcagtggaaccttcatatctcttaccgtcctcaatcttcaggaaaggtagaacagactaatggtcttttaaaaacacacctcaccaagctcagcctccaacttaaaaaggactggacagtacttttacctcttgcccttctcagaattagagcctgtccttga

SEQ ID NO: 131611 - DNA, 597 bp, Homo sapiens
atgcatgaaatttggtgccatgagtcggatcgggggacctcccttgggagggcaatcccctgtcctcctgttctttgctccatgagaaagatccacctacgacctcaggtcctcagaccgaccagcccaaggaacatctcaccaattttaaatcgggctgctcctcgccaggcccagctaggtcccaattcttcctcagcctccgctcctccaccctataatccttttatcacctcccctcctcacacctggtctgccttacagtttcgtttcgtgactagccctcccccacctgcccagcaattgactcttaaaaaggtggctggagctaaaggcacagtcaaggaacatttctgccatgatttgccagccagctccatgcagtcaaactacccagtgcacgactctggacacctcactactggaccatccctcttcaagcccacacttaatatagaatacagcacaggacatgctccataccatgtaagaagtgcctgtttcccctttgccttctgccacgattgtcagtttcctgaggcctccccagaagcagaagctgctgctatactttctgtacagcctgcagaaccgtga

SEQ ID NO: 131612 - DNA, 1155 bp, Homo sapiens
atggctgctggttggaggccacagtgccaccttctcaaggctcagaaactgggaagccttccttccttctgcattcaaacccttaaaatgcacaacccaccccccgtggctgactcagcacaatgggaaaaggaaaaacggagagacaaaggagacacgttttatccgtggacccaaaactccggcgccggaaaagtagaacggactaaaggtcttttaaaaacacacctcaccaagctcagctaccaacttaaaaaggactggacaatacttttacgactttcctttctcagaagtcagacctgtcctcagaatgctacaagcatgtgcctgatgactgaatcctgcccacccaaatgtcaagagcctaccagagatggcttattctcctccactctcctcagtgcatgtgggcgcgactgtgcgtgcgcagccgagggtggtggcggccggcaccccacgccaagggtggtggtggccggcaccccaccctcggccgccgcctccgcgtgtcaggccccgccctgccaggtcgcgctgccctccttctacccagtccttaaaacccggaggagcgggatggcgcgctttgactctggagtgggagtgggagcgagcgcttctgcgactccagttgtcagtctgtctgccgaggcgctgccggcgacctcttcagatggattattacaggtagcgggtggcgtggtaggtactttaaaggaaatcaagcgccaccgcctcgatgcccgcagcgttgtccccagattgcaggaaccgttacgcgccttgcggggaggggaagggtttggcgctgggttacagcgaggtggaaacacgccccttctcttctcccagggagagtgggttggggatgggaagggcgtcttcgccatttctcagagagaacatttctgccatgatttgccagccagctccatgcagtcaaactacccagtgcacgactctggacacctcactactggaccatccctcttcaagcccacacttaatatagaatacagcacaggacatgctccataccatgtaagaagtgcctgtttcccctttgccttctgccacgattgtcagtttcctgaggcctccccagaagcagaagctgctgctatactttctgtacagcctgcagaaccgtga

SEQ ID NO: 131613 - DNA, 1033 bp, Homo sapiens
ctgtgcagtccttttagggtccaaggactcagaggcaaccagcgcctttggctcatttgtcaaaggagggtaaatttttgaaaagcagaagtcacttgtagcattccgaggacaggcctgaattctgagaagggaaagtggtaaaagtattgtccaggcctttttaagttggtggctgagcttggtgaggtgtgtttttaaaagacctttagtccgttctacttttctggatttgaaattggtgagatgtttcttgggctggttggtctgaggacctgaggtcgtaggtggatctttctcatggagcaaagagcaggaggacaggggattgatctcccaagggaggtccccccaatccgagtcatggtaccaaatttcatacgcgtccgtgtgaagagaccaccaaacaggctttgtgtgaggaacacggctgtttatttcacctgggtgcaggcgggctgagtccgaaaagagagtcagcaaagggagatggggtggggccgttttataggattagggaaggtaatggaaaattacagtcaaagggggtttgttctctggtgtctggaatgagactggggcctaataaaaaggagcgtctatacaggagcttaaatgggatgtaccttgtagcattctgaggacaggcctgatttctgagaagggaaagtggtaaaagtattgtccagtcctttttaagctggtggctgagcttggtgaggtgtgtttttaaaagaccctttagtccgttctacttttcttgaagaaggaggaccgtaagggatataaatggtttcactgaatactaagagcctgaaaaactgcttggctgatttgactaataaaggctcgtctgttatcagactgtattgaggtgggaaggctaaactgaggaattatgtctgacagaatggaagaaatgactgcggtggccttctcagaccctgcaggaaaggcctctacctattttgagggcctctaaaagtattaaagcagcggcagccactgcacctcgtgccgaattcgtgcaggc

SEQ ID NO: 131614 - DNA, 426 bp, Homo sapiens
atgagccaagcttgtaattgcgggaagcttctagtcttctgtgagtgtcagcttgcctcttgttcccaccttcaacccctgccaccccaagagttttggtttggatcaggactaggtttctataaactgcaacgtgagctgctaggtgatcacaggccgcgcagccaccgccgccgcctctccttagtcgccgccttgacgaccgcgtccacctcgcaggtgcgccagaactaccaccaggactcagaggcggccatcaaccgccagatcaacctggagctctacgcctcctacgtttacctgtccatgtcttactactttgaccacgatgatgtggctttgaagaactttgccaaatactttcttcaccaatctcatgaggagagggaacatgctgaggaactgatgaagctgcagaaccaatga

SEQ ID NO: 131615 - DNA, 856 bp, Homo sapiens
tcattcgctccggtccttgggttcccggtatttccactggatgtaatcaaagatgtctttttcactatccactggcaggggttctcctgcaactccagtgactcccaagggacggatggtgtactcattgattgtgaaacccttttctagggcatgagccctcatattcttattgaaaatatcactcccagtgaaatagagaacaccacagtaatactgatctttgggtatcaacctgatatcaattcttctgtgtggatattctttttcatcatttttactgggaagctggcaaacacccatgaactttgtctcaccctttgacagggtatctgtgataaaatgaaccttttgtaactgctccacaacctgatgtaacagttttggcttttccagtttacgtaattttccagttgctaaaaactcatcaatcttttcagcaatttttgttcctactccaggcaatttcttagcttcagctccactctttattttgtgtgggtattttgctataacagatgctgcttttccaaatagaggatgatagttcatataacaaacagagatatcaattgtcagattgcttatgcccgtatagagggggatatgatagtctgcgcagcatatgcacacgaactgccaaaatatggtgtgaaggttggcctgacaaattatgctgcaacatattgtactggcctgctgctggcccacaggcttctcaataggtttggcatggacaagatctgctatttggatgcaggccttgccagaactaccactggcaataaagtttttggtgacctggatggaggcttgtctatccctcaaagtaccaaatgattccctggttatgatt

SEQ ID NO: 131616 - DNA, 1172 bp, Homo sapiens
  misc_feature (1)...(1172): n = a,t,c or g
cgggccccctttgcattgcactcgcgctgcaggaattcggcacgaggcgccgctgggcctgcaggtctctgtcgagcagcggacgccggtctctgttccgcaggatggggagtgttaaagctgttaagaataaggcctactttaagagataccaagtgaaatttagaagacgacgagagggtaaaacgtgattattatgctcggaaacgcgttggtgatacaagataaaaataaatacaacacacccaaataccaggatgatagttctgtgtgacaaacagagatattcatttgtcagatgctttatgcccccgtatagagggggatatgatagtctgcgcagcgtattgcacaccgaacttgccaaaaatatgggtgtgaagggttggcctgacaaattatggctgcagcatatttgtactggcctgctgctgggcccgcaggcttcttccataggttttggcatggacaagatctatgaaggccaagttggagttgactggtgatgaatacaatgtggaaagcattgatggtcagccagggtgccttccacctgcttatttgggatgcaggcccttgcccngaacctacccactggccattaaagttttttggtgcccctgaagggaagctgtggatgggaggcttgtctatcccttcacagtacccaaaccgattcccttggttatgattctgaaaagcaaaggaattttaatgcagaaagtacatcggaaggcacattcatggggccagaattgttgcagatttacatggcgctactttattggaagaagatggaagatgcttacaagaaaacagttctcatcaatacataaaagaacagcgtaacttccagacatgatgggaggagatgtattaagaaagctcatgctgctatacgagagaatccagttctatggaaaagaaggcccaaggaaagaagtttaaaaagaagaggtggaaccgtcccaaaatgtccccttgctcaggaagaaggatcgggtagctcaaaagaaggcaagcttcctccagagctccaggagcgggctgctggagagcttaaccccagccattttcccatgattttttcagatatcgctaactaaacttatgaacagcaactaaaaaaaaaaaaaaaaagtcgacgcggccgcaatttagtagtagtaggc

SEQ ID NO: 131617 - DNA, 4969 bp, Homo sapiens
acggaggacatcagcagtgtctcgaggccttcttttcatgtctttcgttcagccactcctgcagcctccagtccacctcctcacagcacgcgtgcgtgtccctgggtacttgcagatagatggagtaaagattaaggaacacaatggcaagttaatgaactgttttaagaccaaaatgacttactacagctttatgaaatgtgtaggcctccctgcacaactgaccattggtttcagtggcccaagcagggaaactggcagtgaccctcgagcagcaaggaggggagaggaccctcagtccaaggacagaggagatggactgtctgaacaaaccgaggctcagagaagtggagtgcattgcccgaggtcacagttagtgggagagctggccgggcagtcccctcgcactatccctgcggctctccgtgtctgcctttacctcctatgcatcacgtcctataatcacacttcaaaggatgagtcctctaaggatgaagaggaagaaatcaaactggagataaatatgctaaagaaatactctcatcacagaaacattgcaacatattatggtgctttcatcaaaaagagccctccaggacatgatgaccaactctggcttgttatggagttctgtggggctgggtccattacagaccttgtgaagaacaccaaagggaacacactcaaagaagactggatcgcttacatctccagagaaatcctgaggggactggcacatcttcacattcatcatgtgattcaccgggatatcaagggccagaatgtgttgctgactgagaatgcagaggtgaaacttgaccaccaccaccatccaattgggtgggatgcagaagtcactgaaaaatcagcagaagttccaagtgctttaggttctctgaaagcactgaaggttgtggttcattcaaaaggccctctgctggtcactgttggagaagctggggaggcagccagatccaggcctcacagaagcttccagactgttgactttggtgtgagtgctcagctggacaggactgtggggcggagaaatacgttcataggcactccctactggatggctcctgaggtcatcgcctgtgatgagaacccagatgccacctatgattacagaagtgatctttggtcttgtggcattacagccattgagatggcagaaggtgctccccctctctgtgacatgcatccaatgagagcactgtttctcattcccagaaaccctcctccccggctgaagtcaaaaaaatggtcgaagaagttttttagttttatagaagggtgcctggtgaagaattacatgcagcggccctctacagagcagcttttgaaacatccttttataagggatcagccaaatgaaaggcaagttagaatccagcttaaggatcatatagatcgtaccaggaagaagagaggcgagaaagatgaaactgagtatgagtacagtgggagtgaggaagaagaggaggaagtgcctgaacaggaaggagagccaagttccattgtgaacgtgcctggtgagtctactcttcgccgagatttcctgagactgcagcaggagaacaaggaacgttccgaggctcttcggagacaacagttactacaggagcaacagctccgggagcaggaagaatataaaaggcaactgctggcagagagacagaagcggattgagcagcagaaagaacagaggcgacggctagaagagaagctgctggaggatgtgttccagcaaagtaagaaagaagatgacaaggattcccgggaagtttgtggacagaaatataggatgactggaaaacagtcagtctccaaaaataaagaaagaatacctgatttcttcaactgtgttgaaaggagtgttatgcaacaaaggagagagcgggaagctagaaggcagcaggaacgtgaacagcgaaggagagaacaagaagaaaagaggcgtctagaggagttggagagaaggcgcaaagaagaagaggagaggagacgggcagaagaagaaaagaggagagttgaaagagaacaggagtatatcaggcgacagctagaagaggagcagcggcacttggaagtccttcagcagcagctgctccaggagcaggccatgttactggagtgccgatggcgggagatggaggagcaccggcaggcagagaggctccagaggcagttgcaacaagaacaagcatatctcctgtctctacagcatgaccataggaggccgcacccgcagcactcgcagcagccgccaccaccgcagcaggaaaggagcaagccaagcttccatgctcccgagcccaaagcccactacgagcctgctgaccgagcgcgagaggtggaagatagatttaggaaaactaaccacagctcccctgaagcccagtctaagcagacaggcagagtattggagccaccagtgccttcccgatcagagtctttttccaatggcaactccgagtctgtgcatcccgccctgcagagaccagcggagccacaggacccatgtccaccttcccgcagtgaggtgctcagtcagagctctgactctaagtcagaggcgcctgaccctacccaaaaggcttggtctagatcagacagtgacgaggtgcctccaagggttcctgtgagaacaacatctcgctcccctgttctgtcccgtcgagattccccactgcagggcagtgggcagcagaatagccaggcaggacagagaaactccaccagcagtattgagcccaggcttctgtgggagagagtggagaagctggtgcccagacctggcagtggcagctcctcagggtccagcaactcaggatcccagcccgggtctcaccctgggtctcagagtggctccggggaacgcttcagagtgagatcatcatccaagtctgaaggctctccatctcagcgcctggaaaatgcagtgaaaaaacctgaagataaaaaggaagttttcagacccctcaagcctgctgatctgaccgcactggccaaagagcttcgagcagtggaagatgtacggccacctcacaaagtaacggactactcctcatccagtgaggagtcggggacgacggatgaggaggacgacgatgtggagcaggaaggggctgacgagtccacctcaggaccagaggacaccagagcagcgtcatctctgaatttgagcaatggtgaaacggaatctgtgaaaaccatgattgtccatgatgatgtagaaagtgagccggccatgaccccatccaaggagggcactctaatcgtccgccagagtacagttgaccaaaagcgtgccagccatcatgagagcaatggctttgccggtcgcattcacctcttgccagatctcttacagcaaagccattcctcctccacttcctccacctcctcctccccatcctccagccagccgacacccaccatgtccccacagacaccccaggacaagctcactgctaatgagactcagtccgctagtagcacactccagaaacacaaatcttcctcctcctttacaccttttatagaccccagattactacagatttctccatctagcggaacaacagtgacatctgtggtgggattttcctgtgatgggatgagaccagaagccataaggcaagatcctacccggaaaggctcagtggtcaatgtgaatcctaccaacactaggccacagagtgacaccccggagattcgtaaatacaagaagaggtttaactctgagattctgtgtgctgccttatggggagtgaatttgctagtgggtacagagagtggcctgatgctgctggacagaagtggccaagggaaggtctatcctcttatcaaccgaagacgatttcaacaaatggacgtacttgagggcttgaatgtcttggtgacaatatctggcaaaaaggataagttacgtgtctactatttgtcctggttaagaaataaaatacttcacaatgatccagaagttgagaagaagcagggatggacaaccgtaggggatttggaaggatgtgtacattataaagttgtaaaatatgaaagaatcaaatttctggtgattgctttgaagagttctgtggaagtctatgcgtgggcaccaaagccatatcacaaatttatggcctttaagtcatttggagaattggtacataagccattactggtggatctcactgttgaggaaggccagaggttgaaagtgatctatggatcctgtgctggattccatgctgttgatgtggattcaggatcagtctatgacatttatctaccaacacatatccagtgtagcatcaaaccccatgcaatcatcatcctccccaatacagatggaatggagcttctggtgtgctatgaagatgagggggtttatgtaaacacatatggaaggatcaccaaggatgtagttctacagtggggagagatgcctacatcagtagcatatattcgatccaatcagacaatgggctggggagagaaggccatagagatccgatctgtggaaactggtcacttggatggtgtgttcatgcacaaaagggctcaaagactaaaattcttgtgtgaacgcaatgacaaggtgttctttgcctctgttcggtctggtggcagcagtcagctccagaattccttgtctctgaatgactctgtcttgtgggtgtctgacagtggcgacgatgaacatgccgttggttttattggcagtgggcacaaggaggcttttcataagatgaaacatgccacagtgaacacactcgtgtacatatcaagagaagaaggaaaggcacaggtggagaacagtaaaaggcctggtaggcatgatcgccgtcgggcaaatctggggccatgctctcagtgttggcacctcgccttagtctccagggctgcccgtgctgcatcatcatcaattaggcatattaataaaccacttcgtgtttcatcctag

SEQ ID NO: 131618 - DNA, 284 bp, Homo sapiens
cttagaggactcatcctttgaagtgtgattataggacgtgatgcataggaggtaaaggcagacacggagagccgcagggatagtgcgaggggactgcccggccagctctcccactaactgtgacctcgggcaatgcactccacttctctgagcctcggtttgttcagacagtccatctcctctgtccttggactgagggtcctctcccctccttgctgctcgagggtcactgccagtttccctgcttgggccactgaaaccaatggtcagttgtgcagggaggc

SEQ ID NO: 131619 - DNA, 4266 bp, Homo sapiens
caagtctataagggtcgacatgttaaaacgggtcagttggcagccatcaaagttatggatgtcactgaggatgaagaggaagaaatcaaactggagataaatatgctaaagaaatactctcatcacagaaacattgcaacatattatggtgctttcatcaaaaagagccctccaggacatgatgaccaactctggcttgttatggagttctgtggggctgggtccattacagaccttgtgaagaacaccaaagggaacacactcaaagaagactggatcgcttacatctccagagaaatcctgaggggactggcacatcttcacattcatcatgtgattcaccgggatatcaagggccagaatgtgttgctgactgagaatgcagaggtgaaacttgttgactttggtgtgagtgctcagctggacaggactgtggggcggagaaatacgttcataggcactccctactggatggctcctgaggtcatcgcctgtgatgagaacccagatgccacctatgattacagaagtgatctttggtcttgtggcattacagccattgagatggcagaaggtgctccccctctctgtgacatgcatccaatgagagcactgtttctcattcccagaaaccctcctccccggctgaagtcaaaaaaatggtcgaagaagttttttagttttatagaagggtgcctggtgaagaattacatgcagcggccctctacagagcagcttttgaaacatccttttataagggatcagccaaatgaaaggcaagttagaatccagcttaaggatcatatagatcgtaccaggaagaagagaggcgagaaagatgaaactgagtatgagtacagtgggagtgaggaagaagaggaggaagtgcctgaacaggaaggagagccaagttccattgtgaacgtgcctggtgagtctactcttcgccgagatttcctgagactgcagcaggagaacaaggaacgttccgaggctcttcggagacaacagttactacaggagcaacagctccgggagcaggaagaatataaaaggcaactgctggcagagagacagaagcggattgagcagcagaaagaacagaggcgacggctagaagagcaacaaaggagagagcgggaagctagaaggcagcaggaacgtgaacagcgaaggagagaacaagaagaaaagaggcgtctagaggagttggagagaaggcgcaaagaagaagaggagaggagacgggcagaagaagaaaagaggagagttgaaagagaacaggagtatatcaggcgacagctagaagaggagcagcggcacttggaagtccttcagcagcagctgctccaggagcaggccatgttactgcatgaccataggaggccgcacccgcagcactcgcagcagccgccaccaccgcagcaggaaaggagcaagccaagcttccatgctcccgagcccaaagcccactacgagcctgctgaccgagcgcgagaggtggaagatagatttaggaaaactaaccacagctcccctgaagcccagtctaagcagacaggcagagtattggagccaccagtgccttcccgatcagagtctttttccaatggcaactccgagtctgtgcatcccgccctgcagagaccagcggagccacaggttcctgtgagaacaacatctcgctcccctgttctgtcccgtcgagattccccactgcagggcagtgggcagcagaatagccaggcaggacagagaaactccaccagcagtattgagcccaggcttctgtgggagagagtggagaagctggtgcccagacctggcagtggcagctcctcagggtccagcaactcaggatcccagcccgggtctcaccctgggtctcagagtggctccggggaacgcttcagagtgagatcatcatccaagtctgaaggctctccatctcagcgcctggaaaatgcagtgaaaaaacctgaagataaaaaggaagttttcagacccctcaagcctgctggcgaagtggatctgaccgcactggccaaagagcttcgagcagtggaagatgtacggccacctcacaaagtaacggactactcctcatccagtgaggagtcggggacgacggatgaggaggacgacgatgtggagcaggaaggggctgacgagtccacctcaggaccagaggacaccagagcagcgtcatctctgaatttgagcaatggtgaaacggaatctgtgaaaaccatgattgtccatgatgatgtagaaagtgagccggccatgaccccatccaaggagggcactctaatcgtccgccagactcagtccgctagtagcacactccagaaacacaaatcttcctcctcctttacaccttttatagaccccagattactacagatttctccatctagcggaacaacagtgacatctgtggtgggattttcctgtgatgggatgagaccagaagccataaggcaagatcctacccggaaaggctcagtggtcaatgtgaatcctaccaacactaggccacagagtgacaccccggagattcgtaaatacaagaagaggtttaactctgagattctgtgtgctgccttatggggagtgaatttgctagtgggtacagagagtggcctgatgctgctggacagaagtggccaagggaaggtctatcctcttatcaaccgaagacgatttcaacaaatggacgtacttgagggcttgaatgtcttggtgacaatatctggcaaaaaggataagttacgtgtctactatttgtcctggttaagaaataaaatacttcacaatgatccagaagttgagaagaagcagggatggacaaccgtaggggatttggaaggatgtgtacattataaagttgtaaaatatgaaagaatcaaatttctggtgattgctttgaagagttctgtggaagtctatgcgtgggcaccaaagccatatcacaaatttatggcctttaagtcatttggagaattggtacataagccattactggtggatctcactgttgaggaaggccagaggttgaaagtgatctatggatcctgtgctggattccatgctgttgatgtggattcaggatcagtctatgacatttatctaccaacacatatccagtgtagcatcaaaccccatgcaatcatcatcctccccaatacagatggaatggagcttctggtgtgctatgaagatgagggggtttatgtaaacacatatggaaggatcaccaaggatgtagttctacagtggggagagatgcctacatcagtagcatatattcgatccaatcagacaatgggctggggagagaaggccatagagatccgatctgtggaaactggtcacttggatggtgtgttcatgcacaaaagggctcaaagactaaaattcttgtgtgaacgcaatgacaaggtgttctttgcctctgttcggtctggtggcagcagtcaggtttatttcatgaccttaggcaggacttctcttctgagctggtagaagcagtgtgatccagggattactggcctccagagtcttcaagatcctgagaacttggaattccttgtaactggagctcggagctgcaccgagggcaaccaggacagctgtgtgtgcagacctcatgtgttgggttctctcccctccttcctgttcctcttatataccagtttatccccattctttttttttttcttactccaaaataaatcaaggctgcaatgcagctggtgctgttcagattctaccatcaggtgctataagtgtttgggattgagcatcatactggaaagcaaacacctttcctccagctccagaattccttgtctctgaatgactctgtcttgtgggtgtctgacagtggcgacgatgaacatgccgttggttttattggcagtgggcacaaggaggtgagaagtggtggtaaaaggagcggagtgctgaagcagagagcagatttaatatagtaacattaacagtgtatttaattgacatttcttttttgtaatgtgacgatatgtggacaaagaagaagatgcaggtttaagaagttaatatttataaaatgtgaaagacacagttactaggataacttttttgtgggtggggcttgggagatggggtggggtgggttaaggggtcccattttgtttctttggatttggggtgggggtcctggccaagaactcagtcatttttctgtgtaccaggttgcctaaatcatgtgcagatggttct

SEQ ID NO: 131620 - DNA, 3775 bp, Homo sapiens
ggatgaagaggaagaaatcaaactggagataaatatgctaaagaaatactctcatcacagaaacattgcaacatattatggtgctttcatcaaaaagagccctccaggacatgatgaccaactctggcttgttatggagttctgtggggctgggtccattacagaccttgtgaagaacaccaaagggaacacactcaaagaagactggatcgcttacatctccagagaaatcctgaggggactggcacatcttcacattcatcatgtgattcaccgggatatcaagggccagaatgtgttgctgactgagaatgcagaggtgaaacttgttgactttggtgtgagtgctcagctggacaggactgtggggcggagaaatacgttcataggcactccctactggatggctcctgaggtcatcgcctgtgatgagaacccagatgccacctatgattacagaagtgatctttggtcttgtggcattacagccattgagatggcagaaggtgctccccccctctgtgacatgcatccaatgagagcactgtttctcattcccagaaaccctcctccccggctgaagtcaaaaaaatggtcgaagaagttttttagttttatagaagggtgcctggtgaagaattacatgcagcggccctctacagagcagcttttgaaacatccttttataagggatcagccaaatgaaaggcaagttagaatccagcttaaggatcatatagatcgtaccaggaagaagagaggcgagaaagatgaaactgagtatgagtacagtgggagtgaggaagaagaggaggaagtgcctgaacaggaaggagagccaagttccattgtgaacgtgcctggtgagtctactcttcgccgagatttcctgagactgcagcaggagaacaaggaacgttccgaggctcttcggagacaacagttactacaggagcaacagctccgggagcaggaagaatataaaaggcaactgctggcagagagacagaagcggattgagcagcagaaagaacagaggcgacggctagaagagcaacaaaggagagagcgggaagctagaaggcagcaggaacgtgaacagcgaaggagagaacaagaagaaaagaggcgtctagaggagttggagagaaggcgcaaagaagaagaggagaggagacgggcagaagaagaaaagaggagagttgaaagagaacaggagtatatcaggcgacagctagaagaggagcagcggcacttggaagtccttcagcagcagctgctccaggagcaggccatgttactggagtgccgatggcgggagatggaggagcaccggcaggcagagaggctccagaggcagttgcaacaagaacaagcatatctcctgtctctacagcatgaccataggaggccgcacccgcagcactcgcagcagccgccaccaccgcagcaggaaaggagcaagccaagcttccatgctcccgagcccaaagcccactacgagcctgctgaccgagcgcgagaggtagaagatagatttaggaaaactaaccacagctcccctgaagcccagtctaagcagacaggcagagtattggagccaccagtgccttcccgatcagagtctttttccaatggcaactccgagtctgtgcatcccgccctgcagagaccagcggagccacaggtacagtggtcccacctggcatctctcaagaacaatgtttcccctgtctcgcgatcccattccttcagtgacccttctcccaaatttgcacaccaccatcttcgttctcaggacccatgtccaccttcccgcagtgaggtgctcagtcagagctctgactctaagtcagaggcgcctgaccctacccaaaaggcttggtctagatcagacagtgacgaggtgcctccaagggtacctgtgagaacaacatctcgctcccctgttctgtcccgtcgagattccccactgcagggcagtgggcagcagaatagccaggcaggacagagaaactccaccagcagtattgagcccaggcttctgtgggagagagtggagaagctggtgcccagacctggcagtggcagctcctcagggtccagcaactcaggatcccagcccgggtctcaccctgggtctcagagtggctccggggaacgcttcagagtgagaagttcatccaagtctgaaggctctccatctcagcgcctggaaaatgcagtgaaaaaacctgaagataaaaaggaagttttcagacccctcaagcctgctgatctgaccgcactggccaaagagcttcgagcagtggaagatgtacggccacctcacaaagtaacggactactcctcatccagtgaggagtcggggacgacggatgaggaggacgacgatgtggagcaggaaggggctgacgagtccacctcaggaccagaggacaccagagcagcgtcatctctgaatttgagcaatggtgaaacggaatctgtgaaaaccatgattgtccatgatgatgtagaaagtgagccggccatgaccccatccaaggagggcactctaatcgtccgccagactcagtccgctagtagcacactccagaaacacaaatcttcctcctcctttacaccttttatagaccccagattactacagatttctccatctagcggaacaacagtgacatctgtggtgggattttcctgtgatgggatgagaccagaagccataaggcaagatcctacccggaaaggctcagtggtcaatgtgaatcctaccaacactaggccacagagtgacaccccggagattcgtaaatacaagaagaggtttaactctgagattctgtgtgctgccttatggggtgtgaatttgctagtgggtacagagagtggcctgatgctgctggacagaagtggccaagggaaggtctatcctcttatcaaccgaagacgatttcaacaaatggacgtacttgagggcttgaatgtcttggtgacaatatctggtaaaaaggataagttacgtgtctactatttgtcctggttaagaaataaaatacttcacaatgatccagaagttgagaagaagcagggatggacaaccgtaggggatttggaaggatgtgtacattataaagttgtaaaatatgaaagaatcaaatttctggtgattgctttgaagagttctgtggaagtctatgcgtgggcaccaaagccatatcacaaatttatggcctttaagtcatttggagaattggtacataagccattactggtggatctcactgttgaggaaggccagaggttgaaagtgatctatggatcctgtgctggattccatgctgttgatgtggattcaggatcagtctatgacatttatctaccaacacatatccagtgtagcatcaaaccccatgcaatcatcatcctccccaatacagatggaatggagcttctggtgtgctatgaagatgagggggtttatgtaaacacatatggaaggatcaccaaggatgtagttctacagtggggagagatgcctacatcagtagcatatattcgatccaatcagacaatgggctggggagagaaggccatagagatccgatctgtggaaactggtcacttggatggtgtgttcatgcacaaaagggctcaaagactaaaattcttgtgtgaacgcaatgacaaggtattctttgcctctgttcggtctggtggcagcagtcaggtttatttcatgaccttaggcaggacttctcttctgagctggtag

SEQ ID NO: 131621 - DNA, 3864 bp, Homo sapiens
aattcgaggatccgggtaccatggcacagagcgacagagacatttattgttatttgttttttggtggcaaaaagggaaaatggcgaacgactcccctgcaaaaagtctggtggacatcgacctctcctccctgcgggatcctgctgggatttttgagctggtggaagtggttggaaatggcacctatggacaagtctataagggtcgacatgttaaaacgggtcagttggcagccatcaaagttatggatgtcactgaggatgaagaggaagaaatcaaactggagataaatatgctaaagaaatactctcatcacagaaacattgcaacatattatggtgctttcatcaaaaagagccctccaggacatgatgaccaactctggcttgttatggagttctgtggggctgggtccattacagaccttgtgaagaacaccaaagggaacacactcaaagaagactggatcgcttacatctccagagaaatcctgaggggactggcacatcttcacattcatcatgtgattcaccgggatatcaagggccagaatgtgttgctgactgagaatgcagaggtgaaacttgttgactttggtgtgagtgctcagctggacaggactgtggggcggagaaatacgttcataggcactccctactggatggctcctgaggtcatcgcctgtgatgagaacccagatgccacctatgattacagaagtgatctttggtcttgtggcattacagccattgagatggcagaaggtgctccccctctctgtgacatgcatccaatgagagcactgtttctcattcccagaaaccctcctccccggctgaagtcaaaaaaatggtcgaagaagttttttagttttatagaagggtgcctggtgaagaattacatgcagcggccctctacagagcagcttttgaaacatccttttataagggatcagccaaatgaaaggcaagttagaatccagcttaaggatcatatagatcgtaccaggaagaagagaggcgagaaagatgaaactgagtatgagtacagtgggagtgaggaagaagaggaggaagtgcctgaacaggaaggagagccaagttccattgtgaacgtgcctggtgagtctactcttcgccgagatttcctgagactgcagcaggagaacaaggaacgttccgaggctcttcggagacaacagttactacaggagcaacagctccgggagcaggaagaatataaaaggcaactgctggcagagagacagaagcggattgagcagcagaaagaacagaggcgacggctagaagagcaacaaaggagagagcgggaggctagaaggcagcaggaacgtgaacagcgaaggagagaacaagaagaaaagaggcgtctagaggagttggagagaaggcgcaaagaagaagaggagaggagacgggcagaagaagaaaagaggagagttgaaagagaacaggagtatatcaggcgacagctagaagaggagcagcggcacttggaagtccttcagcagcagctgctccaggagcaggccatgttactgcatgaccataggaggccgcacccgcagcactcgcagcagccgccaccaccgcagcaggaaaggagcaagccaagcttccatgctcccgagcccaaagcccactacgagcctgctgaccgagcgcgagaggttcctgtgagaacaacatctcgctcccctgttctgtcccgtcgagattccccactgcagggcagtgggcagcagaatagccaggcaggacagagaaactccaccagtattgagcccaggcttctgtgggagagagtggagaagctggtgcccagacctggcagtggcagctcctcagggtccagcaactcaggatcccagcccgggtctcaccctgggtctcagagtggctccggggaacgcttcagagtgagatcatcatccaagtctgaaggctctccatctcagcgcctggaaaatgcagtgaaaaaacctgaagataaaaaggaagttttcagacccctcaagcctgctggcgaagtggatctgaccgcactggccaaagagcttcgagcagtggaagatgtacggccacctcacaaagtaacggactactcctcatccagtgaggagtcggggacgacggatgaggaggacgacgatgtggagcaggaaggggctgacgagtccacctcaggaccagaggacaccagagcagcgtcatctctgaatttgagcaatggtgaaacggaatctgtgaaaaccatgattgtccatgatgatgtagaaagtgagccggccatgaccccatccaaggagggcactctaatcgtccgccagactcagtccgctagtagcacactccagaaacacaaatcttcctcctcctttacaccttttatagaccccagattactacagatttctccatctagcggaacaacagtgacatctgtggtgggattttcctgtgatgggatgagaccagaagccataaggcaagatcctacccggaaaggctcagtggtcaatgtgaatcctaccaacactaggccacagagtgacaccccggagattcgtaaatacaagaagaggtttaactctgagattctgtgtgctgccttatggggagtgaatttgctagtgggtacagagagtggcctgatgctgctggacagaagtggccaagggaaggtctatcctcttatcaaccgaagacgatttcaacaaatggacgtacttgagggcttgaatgtcttggtgacaatatctggcaaaaaggataagttacgtgtctactatttgtcctggttaagaaataaaatacttcacaatgatccagaagttgagaagaagcagggatggacaaccgtaggggatttggaaggatgtgtacattataaagttgtaaaatatgaaagaatcaaatttctggtgattgctttgaagagttctgtggaagtctatgcgtgggcaccaaagccatatcacaaatttatggcctttaagtcatttggagaattggtacataagccattactggtggatctcactgttgaggaaggccagaggttgaaagtgatctatggatcctgtgctggattccatgctgttgatgtggattcaggatcagtctatgacatttatctaccaacacatgtaagaaagaacccacactctatgatccagtgtagcatcaaaccccatgcaatcatcatcctccccaatacagatggaatggagcttctggtgtgctatgaagatgagggggtttatgtaaacacatatggaaggatcaccaaggatgtagttctacagtggggagagatgcctacatcagtagcatatattcgatccaatcagacaatgggctggggagagaaggccatagagatccgatctgtggaaactggtcacttggatggtgtgttcatgcacaaaagggctcaaagactaaaattcttgtgtgaacgcaatgacaaggtgttctttgcctctgttcggtctggtggcagcagtcaggtttatttcatgaccttaggcaggacttctcttctgagctggtagaagcagtgtgatccagggattactggcctccagagtcttcaagatcctgagaacttggaattccttgtaactggagctcggagctgcaccgagggcaaccaggacagctgtgtgtgcagacctcatgtgttgggttctctcccctccttcctgttcctcttatataccagtttatccccattctttttttttttcttactccaaaataaatcaaggctgcaatgcagctggtgctgttcagattccaaaaaaaaaaaaaaaccatggtacccggatcctcgaattcc

SEQ ID NO: 131622 - DNA, 859 bp, Homo sapiens
acggaggacatcagcagtgtctcgaggccttcttttcatgtctttcgttcagccactcctgcagcctccagtccacctcctcacagcacgcgtgcgtgtccctgggtacttgcagatagatggagtaaagattaaggaacacaatggcaagttaatgaactgttttaagaccaaaatgacttactacagctttatgaaatgtgtaggcctccctgcacaactgaccattggtttcagtggcccaagcagggaaactggcagtgaccctcgagcagcaaggaggggagaggaccctcagtccaaggacagaggagatggactgtcttgttatggagttctgtggggctgggtccattacagaccttgtgaagaacaccaaagggaacacactcaaagaagactggatcgcttacatctccagagaaatcctgaggggaaaggatgtcaggaaggcactgagcaaaaggctgttacagctgaccttgagaggtcagccaatccattagctgcatggggcccagagagggtgaagttctttcatgagatcatgcagcaagttagtgtcaagtctagaattagaacttgggtgtctttgaccctgacagcgggagatgagcagtggccattaggtgtgatggtggttgtaggagcagccacaggcactctgaaattgaaggagaagagaagaggcaggggaagtgtagctggttggcttgtcagctccctgaggctctcaccttgtcacaccaaagggcaaaatgtatggagcgtgcatgggacagtagaaagaatggaggattcagggccagacaaacccatcaagccttactctcagaggaactgctctgtgtgcaggtag

SEQ ID NO: 131623 - DNA, 2623 bp, Homo sapiens
tttcgtgcccggcctgcgagagcctcagtgggagccggctcagccctcggccaccatgtcggcgccgtcggaggaggaggagtacgcgcggctggtgatggaggcgcagccggagtggctgcgcgccgaggtgaagcggctgtcccacgagctggccgagaccacgcgtgagaagatccaggcggccgagtacgggctggcggtgctcgaggagaagcaccagctcaagctgcagttcgaggagctcgaggtggactatgaggctatccgcagcgagatggagcagctcaaggaggcctttggacaagcacacacaaaccacaagaaggtggctgctgacggagagagccgggaggagagcctgatccaggagtcggcctccaaggagcagtactacgtgcggaaggtgctagagctgcagacggagctgaagcagttgcgcaatgtcctcaccaacacgcagtcggagaatgagcgcctggcctctgtggcccaggagctgaaggagatcaaccagaatgtggagatccagcgtggccgcctgcgggatgacatcaaggagtacaaattccgggaagctcgtctgctgcaggactactcggaactggaggaggagaacatcagcctgcagaagcaagtgtctgtgctcagacagaaccaggtggagtttgagggcctcaagcatgagatcaagcgtctggaggaggagaccgagtacctcaacagccagctggaggatgccatccgcctcaaggagatctcagagcggcagctggaggaggcgctggagaccctgaagacggagcgcgaacagaagaacagcctgcgcaaggagctgtcacactacatgagcatcaatgactccttctacaccagccacctgcatgtctcgctggatggcctcaagttcagtgacgatgctgccgagcccaacaacgatgccgaggccctggtcaatggctttgagcacggcggcctggccaagctgccactggacaacaagacctccacgcccaagaaggagggcctcgcaccgccctcccccagcctcgtctccgacctactcagtgagctcaacatctctgagatccagaagctgaagcagcagctgatgcagatggagcgggaaaaggcgggcctgctggcaacgctgcaggacacacagaagcagctggagcacacgcggggctccctgtcagaacagcaggagaaggtgacccgcctcacagagaatctgagtgccctgcggcgcctgcaggccagcaaggagcggcagacagccctggacaacgagaaggaccgtgacagccatgaggatggggactactacgaggtggacatcaacgggcctgagatcttggcctgcaagtaccatgtggctgtggctgaggctggcgagctccgcgagcagctcaaggcactgcgcagcacgcacgaggctcgtgaggcccagcacgccgaggagaagggccgctatgaggctgagggccaggcactcacggagaaggtctccctgctagagaaggccagccgccaggaccgcgagctgctggcccggctggagaaggagctaaagaaggtgagcgacgtcgccggcgagacacagggcagcctgagtgtggcccaggatgagctggtgaccttcagtgaggagctggccaatctctaccaccacgtgtgcatgtgcaacaatgagacacccaaccgtgtcatgctggactactaccgcgagggccagggcggggccggccgcaccagtcccgggggccgcaccagccccgaggcgcgtggccggcgctcacccatcctcctacccaaggggctgctggctcctgaggcgggccgagcagatggtgggacgggggacagcagcccctcgcctggctcctcactgccatcacccctgagtgacccacgccgggagcccatgaacatctacaacctgatcgctatcatccgtgaccagatcaagcacctgcaggcagccgtggaccgcaccacggagctgtcacgccagcgcattgcctctcaggagctgggccccgccgtggacaaggacaaggaagcgcttatggaggagatcctcaagctgaagtcgctgctcagcaccaagcgggagcagatcaccacgctgcgcactgtgctcaaggccaacaagcagacggccgaggtggcccttgccaacctgaagagcaagtatgagaatgagaaggccatggttaccgagaccatgatgaagctgcgcaatgagctcaaggccctcaaggaggacgcagccaccttctcctcgctgcgtgctatgtttgccaccaggtgtgacgagtacattacacagctggatgagatgcagcggcagctggcggctgctgaggacgagaagaagacgctgaactcgctgctgcgcatggccatccagcagaagctggcgctgacccagcggctggagctgctcgagctggaccatgagcagacccggcgtggccgtgccaaagccgccccgaagaccaagccagccacaccgagcgtaagtcacacctgtgcctgtgccagcgacagggccgagggcaccgggctggccaaccaggtgttctgcagcgagaagcacagcatttactgtgattag

SEQ ID NO: 131624 - DNA, 1660 bp, Homo sapiens
ctgaactcgctgaggaattcggcacgaggggctgcgcctgggcatggaagaggggaagatggacgagaatgaatgggggtaccacggagagggcaataagagcctggtggtggcccacgcgcagcgctgcgtcgtgctgcggtttctgaagtttcctccaaataggaagaagacctcggaagagatatttcaacacctgcagaacatagtggactttgggaaaaatgtcatgaaggagtttttgggggagaactatgttcattatggggaggtcgttcagctacctttagagtttgtgaaacagctttgtttaaagatacaatctgaaagaccagagtctcgctgtgacaaggacctggatactctcagtggttacgctatgtgccttcctaatttaaccagactccaaacctaccgctttgcagagcaccggccgattctgtgtgtagagattaaggtgacctgtcgaggggcagatggtgtgggtaaaggggaaagggtggaggagagaagggccacagccatcccctactgtgctcagcaggacacccttctcttcgtgttccctggacagagcctctataggcaggcctttggacaagcacacacaaaccacaagaaggtggctgctgacggagagagccgggaggagagcctgatccaggagtcggcctccaaggagcagtactacgtgcggaaggtgctagagctgcagacggagctgaagcagttgcgcaatgtcctcaccaacacgcagtcggagaatgagcgcctggcctctgtggcccaggagctgaaggagaagatagaaacagaggggaaacttcctaacactttctatgaagccagcattgtcctattaccaaaaccagacaaagacattaacagaaaagaaaaggacaaaccagtatttctaatgaacaaagatgcaaaagtcctcaacaaaatattagcaaatcaaatccaaaaatgtgtaaaaagaattatgctctatgaccaaggggaatttatcccaggtctgggacatggagagcacaagatgatcttggaacaatttgcatcagacatcaaggaagtaataacaataataacaaattacgatgttttgaagacatggagccagcttggaggagctcccacgggccaaatctgctaccatttgagcatcaaagcaagtattcccatgaaatgtacgatgagtacaccctattctacagaagcaaaagctgaggctcagagacgccaagaggtttgctggggtctcgcgactaagcggtcccaacacccagacaccctggctacccggggactgccggtcactaccgggcgccgaaaagccgccggctccttccgccagctacacatccggcgccgaggccggaagcttctcttccggctcccaagaccgcgttccggaaatgagtcgctctaccagtacctaagatggccgccggcccatccaccgtcgcgatcggtcggctggttcccagcgaggcgggcggcccccagctcgcgtccccgagtcctagcccgcgaggcgccagggctgcgcctgggcatggaagaggggaagatggacgagaatgaatgggggtaccacggagagggcaataagagcctggtggtggcccacgcgcagaatttgaaggctttcacctga

SEQ ID NO: 131625 - DNA, 3657 bp, Homo sapiens; identical to SEQ ID NO: 120146

SEQ ID NO: 131626 - DNA, 3570 bp, Homo sapiens; identical to SEQ ID NO: 116242

SEQ ID NO: 131627 - DNA, 3666 bp, Homo sapiens; identical to SEQ ID NO: 116259

SEQ ID NO: 131628 - DNA, 3441 bp, Homo sapiens; identical to SEQ ID NO: 118068

SEQ ID NO: 131629 - DNA, 3354 bp, Homo sapiens; identical to SEQ ID NO: 116243

SEQ ID NO: 131630 - DNA, 3300 bp, Homo sapiens; identical to SEQ ID NO: 118070

SEQ ID NO: 131631 - DNA, 4989 bp, Homo sapiens; identical to SEQ ID NO: 120155

SEQ ID NO: 131632 - DNA, 3543 bp, Homo sapiens; identical to SEQ ID NO: 118071

SEQ ID NO: 131633 - DNA, 3693 bp, Homo sapiens; identical to SEQ ID NO: 118073

SEQ ID NO: 131634 - DNA, 3357 bp, Homo sapiens; identical to SEQ ID NO: 120163

SEQ ID NO: 131635 - DNA, 3045 bp, Homo sapiens; identical to SEQ ID NO: 120951

SEQ ID NO: 131636 - DNA, 3384 bp, Homo sapiens; identical to SEQ ID NO: 120168

SEQ ID NO: 131637 - DNA, 3264 bp, Homo sapiens
atgggagactttaacaccccactgtcaacattagacagatcaatgagacagaaagtcaacaaggatacccaggaattgaactcagctctgcaccaagcagacctaatagacatctacagaactctccaccccaaatcaacagaatatacatttttttcagcaccacaccacacctattccaaaactgaccacatagttggaagtaaagctctcctcagcaaatgtaaaagaacagaaattataacaaactgtctctcagaccacagtgcaatcaaactagaactcaggattaagaatctcactcaaaaccgctcaactacatggaaactgaacaaccagctcctgaatgattactgggcgcataacgaaatgaaggcagaaataaagatgttctttgaaaccaacgagaacaaagacacaacataccagaatctctgggacacattcaaagcagtgtgtagagggaaatttatagcactaaatgcccacaagagaaagcaggaaagatccaaaattgacaccctaacatcacaattaaaagaactagaaaagcaagagcaaacacattcaaaagctagcagaaggcaagaaataactaaaatcagagcagaactgaaggaaatagagacacaaaaaatccttcaaaaaattaatgaatccaggagctggttttttgaaaggatcaacaaaattgatagaccgctagcaagactaataaagaaaaaaagagagaagaatcaaatagacgcaataaaaaatgataaaggggatatcaccaccgatcccacagaaatacaaaataccatcagagaatactataaacacctctacacaaataaattagaaaatctagaagaaatggataaattcctggacacatacactctcccaagattaaaccaggaagaagttgaatctctgaatagaccaataacaggacctgaaattgtggcaataatcaatagcttaccaaccaaaaagagtccaggaccagatggattcacagccaaattctaccagaggtacaaggaggaactggtaccattccttctgaaattattccaatcaatagaaaaagagggaatcctccctaactctttttatgaggccagcatcattctgataccaaagccaggcagagacacaacaaaaaaagagaattttagaccaatatccttgatgaacattgatgcaaaaatcctcaataaaatactggcaaaacgaatccagcagcacatcaaaaagcttatccaccatgatcaagtgggcttcatccctgggatgcaaggctggttcaatatacacaaatcaataaatgtaatccagcatataaacagacccaaagacaaaaaccacatgattatctcaatagatgcagaaaaagcctttgacaaaattcaacaacccttcatgctaaaaactctcaataaattaggtattgatgggacgtatttcaaaataataagtgctatctatgacaaacccacagccaatatcatactgaatgggcaaaaagtggaagcattccctttgaaaactggcacaagacagggatgccctctctcaccactcctattcaacatagtgttggaagttctggccagggcaattaggcaggagaaggaaataaagggtattcaattaggaaaagaggaagttaaattgtccctgtttgcagacgacatgattgtatatctagaaaaccccatcgtctcagcccaaaatctccttaagctgataagcaacttcagcaaagtctcaggatacaaaatcaatgtacaaaaatcacaagcattcttatacaccaacaacagacaaacagagagccaaatcatgagtgaactcccattcacaattgcttcaaagagaataaaatacctaggaatccaacttacaagggatgtgaaggacctcttcaaggagaactacaaaccactgctcaaggaaataaaagaggatacaaacaaatggaagaacattccatgctcatgggtaggaagaatcaatatcgtgaaaatggccatactgcccaaggtaatttacagattcaatgccatccccatcaagctaccaatgactttcttcacagaattggaaaaaactactttaaagttcatatggaacgccctcatcaccaagtcaatcctaagccaaaagaacaaagctggaggcatcacactacctgacttcaaactatactacaaggctacagtaaccaaaacagcatggtactggtaccaaaacagagatatagatcaatggaacagaacagagccctcagaaataacgccgcatatctacaactatctgatctttgacaaacctgagaaaaacaagcaatggggaaaggattccctattgaataaatggtgctgggaaaactggctagccatatgtagaaagctgaaactggatcccttccttacaccttatacaaaaatcaattcaagatggattaaagacttaaacgttagacctaaaaccataaaaaccctagaagaaaacctaggcattaccattcaggacataggcatgggcaaggacttcatgtctaaaacaccaaaagcaatggcaacaaaagccaaaattgacaaatgggatctaattaaactaaagagcttctgcacagcaaaacaaactaccatcagagtgaacaggcaacctacaaaatgggagaaaattttcgcaacctactcatctgacaaagggctaatatccagaatctacaatgaactcaaacaaatttataagaaaaaaacaaacaaccccatcaaaaagtgggcgaaggacatgaacagacacttctcaaaagaagacatttatgcagccaaaaaacacatgaaaaaatgctcatcatcactggccatcagagaaatgcaaatcaaaaccacaatgagataccatctcacaccagttagaatggcaatcattaaaaagtcaggaaacaacagaacttgggaatataacatactttgttctcttgtgcctctcctgtgttccctcttgtggctgcacctgactgaccatcacctaaaagaggacagaacaaaacacttgacagctagtgataaccttgaaaaaacagaactcagcagatggaaggagagagccctactgtatgagcatcgtgtgctgagacctgctattgactcccagcacagctgtgcccccagaagaatccagggtcatctggtatgcggaagtgatctcactggtttcatggatgatgtggctgtcatcctgattgatgtctcccctttctga

SEQ ID NO: 131638 - DNA, 3783 bp, Homo sapiens; identical to SEQ ID NO: 120170

SEQ ID NO: 131639 - DNA, 3168 bp, Homo sapiens
atgggagactttaacaccccactgtcaacattagacagatcaacgagacagaaagtcaacaaggatacccaggaattgaactcagctctgcaccaagcagacctaatagacatctacagaactctccaccccaaatcaacagaatatacatttttttcagcaccacaacacacctattccaaaattgaccacatacttggaagtaaagctctcctcagcaaatgtaaaagaacagaaattataacaaactatctctcagaccacagtgcaataaaattagaactcaggattaagaatctcactcaaaaccgctcaactacatggaaactgaacaacttgctcctgaatgactactgggtacataacgaaatgaaggcagaaataaagatgttctttgaaaccaatgagaacaaagacacaacataccagaatctctgggacacattcaaagcagtgtgcagagggaaatttatagcactaaatgcccacaagagaaagcaggaaagatctaaaattgacaccctaacatcacaattaaaagaactagaaaagcaagagcaaacacattcaaaagctagcagaaggcaagaaataactaaaatcagagcagaactgaaggaaatagagacacaaaaaacccttcaaaaaattaatgaatccaggagctggttctttgaaaggatcaacaaaattgatagaccactagcaagactaatgaagaaaaaaagagagaagaatcaaatagatgcaataaaaaatgataaaggggatatcaccaccaatcccacagaaatacaaactaccatcagagaatactataaacacctctacgcaaataaactagaacatctagaagaaatggataaattcctcaacacatacactctcccaagacaaaaccaggaagaagttgaatctctgaatagaccaataacaggatctgaaattgtggcaataatcaatagcttactgaccaaaaagagtccaggaccagatggattcacagccgaattctaccagaggtacaaggaggaactggtaccattccttctgaaactattccaatcaatagaaaaagagggaatcctccctaactcattttatgaggccagcatcatcctgataccaaagccaggcacagacacaaccaaaaaagagaattttagacaaatatccttgatgaacattgatgtaaaaatcctcaataaaatactggcaaacagaatccagcagcacatcaaaaagcttatccaccatgatcaagtgggcttcatccctgggatgcaaggctggttcaatatacgcaaatcaataaatgtaatccagcatataaacagagccaaagacaaaaaccacatgattatctcaatagatgcagaaaaagcctttgacaaaattcaacaacccttcatgctaaaaactctcaataaattaggtattgatggtacgtatttcaaaataataagagctatctatgacaaacccacagccaatatcatactgaatgggcaaaaactggaagcattccctttgaaaactggcacaagacagggatgccctctctcaccgctcctattcaacatagtgttggaagttctggccagggcaatcaggcaggagaaggaaataaagggtattcaattaggaaaagaggaagtcaaattgtccctgtttgcagacgacatgattgtttatctagaaaaccccattgtctcagcccaaaatctccttaagctgataagcaacttcagcaaagtctcaggatacaaaatcaatgtacaaaaatcacaagcattcttatacaccaacaacagacaaacagagagccaaatcatgggtgaactcccattcacaattgcttcaaagagaataaaatacctaggaatccaacttacaagggatgtgaaggacctcttcaaggagaactacaaaccactgctcaaggaaataaaagaggacacaaacaaatggaagaacattccatgctcatgggtaggaagaatcaatatcgtgaaaatggccatactgcccaaggtaatttacagattcaatgccatccccatcaagctaccaatgactttcttcacagaattggaaaaaactactttaaagttcatatggaaccaaaaaagagcccgcatcaccaagtcaatcctaagccaaaagaacaaagctggaggcatcacactacctgacttcaaactatactacaaggctacagtaaccaaaacagcatggtactggtaccaaaacagagatatagatcaatggaacagaacagagccctcagaaataatgccgcatatctacaactatctgatctttgacaaacctgagaaaaacaagcaatggggaaaggattccctatttaataaatggtgctgggaaaactggctagccatatgtagaaagctgaaactggatcccttccttacaccttatacaaaaatcaattcaagatggattaaagatttaaacgttagacctaaaaccataaaaaccctagaagaaaacctaggcattaccattcaggacataggcgtgggcaaggacttcatgtccaaaacaccaaaagcaatggcaacaaaagacaaaattgacaaatgggatctaattaagctaaagagcttctgcacagcaaaagaaactaccatcagagtgaacaggcaacctacaacatgggagaaaattttcgcaacctactcatctgacaaagggctaatatccagaatctacaatgaactcaaacaaatttacaagaaaaaaacaaacaaccccatcagaaagtgggcgaaggacatgaacagacacttctcaaaagaagacatttatgcagccaaaaaacacatgaagaaatgctcatcatcactggccatcagagaaatgcaaatcaaaaccactatgagatatcatctcacaccagttagaatggcaatcattaaaaagtcaggaaacaacagtcaggtggaacattcaggaggccctgagctaaacattgccagcagcaaggtcacaactgccagaacagccaaggccactcctgctcagcacagagaaggcagccaagcagatttcttggagcagctgccaagagagtctgcccagtgtgatggagaaagagccccacgtgtggagcacctgccagggaaccttgccttcttatcctag

SEQ ID NO: 131640 - DNA, 3897 bp, Homo sapiens; identical to SEQ ID NO: 120172

SEQ ID NO: 131641 - DNA, 3348 bp, Homo sapiens; identical to SEQ ID NO: 120176

SEQ ID NO: 131642 - DNA, 3984 bp, Homo sapiens; identical to SEQ ID NO: 118084

SEQ ID NO: 131643 - DNA, 3432 bp, Homo sapiens; identical to SEQ ID NO: 118085

SEQ ID NO: 131644 - DNA, 3924 bp, Homo sapiens; identical to SEQ ID NO: 120178

SEQ ID NO: 131645 - DNA, 4797 bp, Homo sapiens
atggggaaaaaacagaacagaaaaactggaaactctaaaaagcagagcgcctctcctcctccaaaggaacacagttccttaccagcaacggaacaaagctggatggagaaagactttgacgagctgagagaagaaggctacagacgatcaaattactctgagctatgggaggacattcaaaccaaaggcaaagaagttgaaaactttgaaaaaaatttagaagaatgtataactagaataaccaatacagagaggtgcttaaaggagctgatggagctgaaaaccaaggctcgagacctacgtgaagaatgcagaagcctcaggagccgatgcgatcaactggaagaaagggcccgccctaaaagagctcctgaaggaagagctaaacatggaaaggaacaaccggtaccagccgctgcaaaatcatgccaaaatgtaaagaccatcaagactaggaagaaactgcatcaactaatgagcaaaataaccagacacagactggcaaattggataaagagtcaagacccatcagtgtgctatattccggaaacccatctcacgtgcagagacacacataggctcaaaataaaaggatggaggaagatctaccaagccaatggaaaacaaaaacaggcaggggttgcaatccacatctctgataaaacagactttaaaccaacaaagatcaaaagagacaaagaaggccattacataatggtaaagggatcaattcaacaagaaaagctaactatcctaaatgtatatgcacccaacacaggagcacccagattcataatgcaagtcctgagtgacctacaaagagacttagactcccacacattaataatgggagactttaacaccccactgtcaacattagacagattaacgagacagaaagtcaacaaggatacccaggaattgaactcagctctgcaccaagtggacctaatagacatctatagaactctccaacccaaatcaacagaatatacattgttttcagcaccacaccacacctattccaaaattgaccacatacttggaagtaaagctctcctcagcaaatgtaaaagaacagaaattataacaaactatctctcagaccacagtgcaatcaaactagaactcaggattaagaaactcactcaaatccgctcaactgcatggaaactgaacaacctgctcctgaatgactactgggtacataacgaaatgaaggcagaaataaagatgttctttaaaaacaatgagaataaagacgcaacatgccagaatctctgggacacattcaaagcagtgtgtagagggaaattcttagcactaaatgcccacaagagaaagcaggaaagatccaaaatcaacaccctaacatcacaattaaaagaactagaaaagcaagagcaaacacattccaaagctagtagaaggcaagaaataactaaaatcagagcagaactgaaggaaatagagacacaaaaaacccttcaaaaaattaatgaatccaggagctggttttttgaaaggatcaacaaaattgatagaccactagcaagactaataaagaaaaaaagagagaagaatcaaatagacacaataaaaaatgataaaggggatatcaccaccgatcccacagaaatacaaactaccgtcagagaatactacaaacacctctacgcaaataaactagaaaatctagaagaaatggataaattcctcgacacatacacactcccaagactaaaccaggaagaatttgaatctctgaatagaccagtaacaggatctgaaattgtggcaataatcaatagcttaccaacgaaaaagagtccaggaccagatggattcacagccgaattctaccggaggtacaaggaggaactgcatataaacagagccaaagacaaaaaccacatgattatctcaatagatgcagaaaaagcctttgacaaaattcaacaacccttcatgctaaaaactctcaataaattaggtactgctgggacgtatttcaaaataataagagctatctatgacaaacccacagccaatatcatactgaatgggcaaaaactggaagcattccctttgaaaactggcacaagacagggatgccctctctcaccactcctattcaatatagtgttggaagttctggccagggcaattaggcaggagaaggaaataaagggtattcaattaggaaaagaggaagtcaaattgtccctctttgctgatgacatgattgtatatctagaaaaactcattgtctcagcccaaaatctccttaagctgataagcaacttcagcaaagtctcaggatacaaaattaatgtacaaaaatcacaagcattcttatacaccaataacagacaaacagagagccaaatcatgagtgaactcccattcacaattgcttcaaagagaataaaatacctaggaatccaacttacaaggaatgtgaaggacctcttcaaggagaactacaaaccactgctcaaggaaataaaagaggatacaaacaaatggaagaacattccatgctcatgggtaggaagaatcaatatcgtgaaaatggccatactgcccaagggaatttacagattcaatgccattcccatcaagctaccaaagactttcttcacagaattggaaaaaactactttaaagttcatatggaaccaaaaaagagcccacatcaccaagtcaatcctaagccaaaagaacaaagctggaggcatcacactgcctgccttcaaactatactacaaggctacagtaaccaaaacagcatggtactggtaccaaaacagagatatagatcaatggaacagaacagagccctcagaaataacgccacatatctacaactatctgatctttgacaaacctgagagaaacaagcaatggggaaaggattccctatttaataaatggtgctgggaaaactggctagccatatgtaggagaaagctgaaactggatcccttccttacaccttatacaaaaattaattcaagatggattaaagacttaaatgttagacctaaaaccataaaaaccctagaagaaaacctaggcaataccattcaggacataggcatgggcaaggacttcatgtctacaacaccaaaagcaatggcaacaaaagccaaaattgacaaatgggatctaattaaactaaagagcttctgcacagcaaaagaaactaccatcacagtgaacaggcaacctacagaatgggagaaaatttttacaatctacccatctgacaaagggctaatatccagaatctacaaagaactcaaacaaatttacaagaaaagaacaaacaaccccatcaacaagtgggtgaaggatatgaacagacacttctcaaaagaagacatttatacagccaaaaggcacatgaaaaaatgctcatcatcactggccatcagagaaatgcaaatcaaaaccacataccatgctggaccagatggatttacagccgaattctaccagaggtacaaggaggaactggtaccattccttctgaaactattccaatcaatagaaaaagagggaatcctccctaactcattttatgaggccagcatcatcctgataccaaagcctggtagagacacaaccaaaaaagagaattttagaccaatatccttgatgaacattgatgcaaaaatcctcaataaaatactggcaaaacgaatccagcagcacatcaaaaagcttatccaccatgatcaagtgggtttcatccctgggatgcaaggctggttcaatatatgcaaatcaataaacgtaatccagcatataaacagaaccaaagacaaaaaccacatgattatctcaatagatgcagaaaaggcctttgacaaaattcaacaactcttcatgctaaaaactctcaataaattaggtattgatgggacgtatctcaaaataataagagctatctatgacaaacccacagccaatatcatactgaatgggcaaaaactggaagcattccctttgaaaactggcacaagacagggatgccctctctcaccactcctattcaacatagtgtgggaagttctggccagggcaatgaggcaggagaaggaaataaagggtattcaattaggaaaagaggaagtcaaattgtccctgtttgcagacgacatgattgtgtatctagaaaaccccattgtctcagcccaaaatctccttaagctgataagcaacttcagcaaagtctcaggatacaaaatcaatgtacaaaaatcacaagcattcttatacaccaataacagacaaacagagagccaaatcatgagtgaactcccattcacaactgcttcaaagagaataaaatacctaggaatccaacttacaagggatgagaaggacctcttcaaggagaactacaaaccactgctcaatgaaataagaggatacaaacaaatggaagaacattccatgctcacgggtaggaagaatcaatatcgtgaaaatgctcatactgcccaagctaaggcgaaccacaggccagccacatccaaaaaggtttacctgattacggcaatgaagccactgtccagtcctattcctgaaggtttggggctagaaaacagaacaggaaaggaaatcaagagtagagaatggaccaccatgttaagattggctgtagctgctgaactaacctttagagattggaaggagcggtctcggaggactttggacacacatgaaacaaaggggattcccttaagtaaaagcagagcaggcattctggtgattgacattagatag

SEQ ID NO: 131646 - DNA, 8143 bp, Homo sapiens
atggtaaagggatcaattcaacaagaggagctaactatcctaaatatttatgcacccaatacaggagcacccagattcataaagcaagtcctgagtgacctacaaagagacttagactcccacacattaataatggaagactttaacaccccactgtcaacattagacagatcaacgagacagaaagtcaacaagaatacccaggaattgaactcagctctgcaccaagcagacctaatagacatctacagaactctccaccccaaatcaacagaatatacatttttttcagcaccacaccacacctattccaaaattgaccacatagttggaagtaaagctctcctcagcaaatgtaaaagaacagaaattataacaaactatctctcagaccacagtgcaatcaaactagaactcaggattaagaatctcactcaaagccgctcaactacatggaaactgaacaacctgctcctgaatgactactgggtacataacgaaatgaaggcagaaataaagatgttctttgaaaccaacgagaacaaagacaccacataccagaatctctgggacgcattcaaagcagtgtgtagagggaaatttatagcactaaatgcctacaagagaaagcaggaaagatccaaaattgacaccctaacatcacaattaaaagaactagaaaagcaagagcaaacacattcaaaagctagcagaaggcaagaaataactaaaatcagagcagaactgaaggaaatagagacacaaaaaacccttcaaaaaatcaatgaatccaggagctggttttttgaaaggatcaacaaaattgatagaccgctagcaagactaataaagaaaaaaagagagaagaatcaaatagacacaataaaaaatgataaaggggatatcaccaccgatcccacagaaatacaaactaccatcagagaatcctacaaacacctctacgcaaataaactagaaaatctagaagaaatggatacattcctggacacatacactctcccaagactaaaccaggaagaagttgaatctctgaatagaccaataacaggctctgaaattgtggcaataatcaatagtttaccaaccaaaaagagtccaggaccagatggattcacagccgaattctaccagaggtacaaagaggagctgcatataaacagaaccaaagacaaaaaccacatgattatctcaatagatgcagaaaaggcctttgacaaaattcaacaacgcttcatgctaaaaactctcaataaattagtgttggaagttctggccagggcaatcaggcaggagaaggaaataaagggtgttcaattaggaaaagaggaagtcaaattgtccctgtttgcagatgacatgattgtatatctagaaaaccccatcgtctcagcccaaaatctcctcaatctgataagcaacttcagcaaagtctcaggatacaaaatcaatgtacaaaaatcacaagcattcttatacaccaataacagacaaacagagagccaaatcatgagtgaactcccattcacaattgcttcaaagagaataaaatacctaggaatccaacttacaagggatgtgaaggacctcttcaaggagaactacaaaccactgctcaatgaaagaaaagaggatacaaacaaatggaagaacattccatgctcatgggtagaaagaatcaatatcgtgaaaatggccatactgcccaaggtcatttatagattcaatgccatccccatcaagctaccaatgactttcttcacagaattggaaaaaactactttaaagttcatatggaaccaaaaaagagcccgcatcgccaagtcaatcctaagccaaaagaacaaagctggaggcatcacgctacctgacttcaaactatactacaaggctacagtaaccaaaacagcatggtactcgtaccaaaacagagatatagaccaatggaacagaacagagccctcagaaatactgccacgtatctacaactatctgatctttgacaaacctgagaaaaacaagcaatggggaaaggattccctatttaataaatggtgctgggaaaactggctagccatatgtagaaagctgaaactggatcccttccttaaaccttatacaaaaattaagtcaggatggattaaagacttaaatgttagacctaaaaccataaaaaccctagaagaaaacctaggcattaccattcaggacataggcatgggcaaggacttcatgtctaaaacaccaaaagcaatggcaacaaaagcaaaaattgacaaatgggatctaattaaactaaagagcttctgcacagcaaaagaaactaccatcagagtgaaccggcaacctacagaaagggagaaaatttttgcaacctactcatctgacaaagggctaatatccagaatctacaaagaactcaaacaaatttacaagaaaagaacaaacaacctcatcaaaaagtgggtgaaggatatgaacagacacttctcaaaagaagacgtttatgcagccaaaaaacacatgaaaaaatgctcatcatcactggccatcagagaaatgcaaatcaaaaccacaatgagataccatctcacaccagttagaatggcaatcattaaaaagtcaggaaacaacaggagagacagaacagctgaggaaacagcagaacggtggaaaatttttgaaagtgttttgagcccacccaacctgaggagagcattcaaagaaaaacaggaagaagaagtcggcttcagaaggtgggttataacaaactcctccaagctaaaacagcatgttttaacccaatgcaaggaagctaagaaccttgaaaaaaggttagaggaatttctaactagaataaccagtttagagaagaacataaatgacctaatggacctgaaaaacacagcacgagaacttcttgacgcctacacaagtatcaatagccaaattaatcaagcggaagaaaggttatcagagactgaagatcaacttaatcaaataaagcatgaggacaagattagagggaaaaaaatgaaaaggaacaaacaaagcctccaagaaatatgggactatgtgaaaaggccaaatctacgtctgattggtgtagctgaaagtgacagggagaatggagccaagttagaaaacactcttcagtatattatccaggagaacttccccaacctagcaagacaggccaacactcaaattcaggaaacacagagaccaccacaaagatactccttgagaaaagcaaccccaagacacataattgtcagattcaccaaagttgaaatgaagcaaaaaatgttaagggcagccagagagaaagactttaaaccaacaaagatcaaaagagacaaagaaggccattacataatggtaaagggatcaattcaacaagaggagctaactatcctaaatatatatgcacccaatacaggagcacccagattcataaagcaagtcctgagtgacctacaaagagacttagactcccacacattaataatgggagactttaacaccccactgtcaacattagacagatcaacaagacagaaagtcaacaaggatacccaggaattgaactcagctctgcaccaagcagacctaatagacatctacagaactctccaccccaaatcaacagaatatacatttttttcagcaccacaccacacctattccaaaattgaccacatagttggaagtaaagctctcctcagcaaatgtaaaagaacacaaattataacaaactatctctcagaccacagtgcaatcaaactagaactcaggattaagaatctcactcaaagccgctcaactacatggaaactgaacaacctgctcctgaatgtctactgggtacataacgaaatgaaggcagaaataaagatgttctttgaaaccaatgagaacaaagacacaacataccagaatctctgggacacattcaaagcagtgtgtagagggaaatttatagcactaaatgcccacaagagaaagcaggaaagatccaaaattgacaccctaacatcacaattaaaagaactagagaagcaagagcaaacacattcaaaagctagcagaaggcaagaaataactaaaatcagagcagaactgaaggaaatagagacacaaaaaacccttcaaaaactcaatgaatccaggagctggttttttgaaaggatcaacaaaattgatagaccgctagcaagactaataaagaaaaaaagagagaagaatcaaatagacacaataaaaaatgataaaggggatatcaccaccgatcccacagaaatacaaactaccatcagagaatactacaaacacctctacgcatataaactagaaaatctagaagaaatggatacattcctcgacacatacactctcccaagactaaaccaggaagaagttgaatctctgaatagaccaataacaggatctgaaattgtggcaataatcaatagcttaccaaccaaaaagagtccaggaccagatggattcacagccaaattctaccagaggtacaaggaggagctggtaccattccttctgaaactattccaatcaatagaaaaagagggaatcctccctaactcattttatgatgccagcatcattctgataccaaagccgggcagagacacaaccaaaaaagagaattttagaccaatatccttgatgaatattgatgcaaaaatcctcaataaaatactggcaaaccgaatccagcagcacatcaaaaagcttatccaccatgatcaagtgggcttcatccctgggatgcaaggctggttcaatatacgcaaatcaataaatgtaatccagcatataaacagagccaaagacaaaaaccacatgattatctcaatagatgcagaaaaagcctttgacaaaattcaacaacccttcatgctaaaaactctcaataaattaggtattgatgggacgtatttcaaaataataagagctatctatgacaaacccacagccaatatcatactgaatgggcaaagactggaagcattccctttgaaaactggcacaagacagggatgccctctctcaccactcctattcaacatagtgttggaagttctggccagggcaatcaggcaggagaaggaaataaagggtattcaattaggaaaagaggaagtcaaattgtccctgtttgcagacgacatgattgtttatctagaaaaccccatcgtctcagcccaaaatctccttaagctgataagcaacttcagcaaagtctcaggatacaaaatcaatgtacaaaaatcacaagcattcctatacaccaacaacagacaaacagagagccaaatcatgagtgaactcccattcacaattgcttcaaagagaataaaatacctaggaatccaacttacaagggatgtgaagaacctcttcaaggagaactacaaaccactgctcaaggaaataaaagaggatacaaacaaatggaagaacattccatgctcatgggtaggaagaatcaatatcgtgaaaatggccatactgcccaaggtaatttacagattcaatgccatccccatcaagctaccaatgactttcttcacagaattggaaaaaactactttaaagttcatatggaaccaaaaaagagcccgcattgccaagtcaatcctaagccaaaagaacaaagctggaggcatcacactacctgacttcaaactatactacaaggctacagtaaccaaaacagcatggtactggtaccaaaacagagatatagatcaatggaacagaacagagccctcagaaataatgccacatatctacaactatctgatctttgacaaacctgagaaaaacaagcaatggggaaaggattccctatttaataaatggtgctgggaaaactggctagccatatgtagaaagctgaaactggatcccttccttacaccttatacaaaaatcaattcaagatggattaaagatttaaacgttagacctaaaaccataaaaaccctagaagaaaacctaggcattaccattcaggacataggcgtgggcaaggacttcatgtccaaaacaccaaaagcaatggcaacaaaagccaaaattgacaaatgggatctaattaaactcaagagcttctgcacagcaaaagaaactaccatcagagtgaacaggcaacctacaacatgggagaaaattttcgcaacctactcatctgacaaagggctaatatccagaatctacaatgaactcaaacaaatttacaagaaaaaaacaaacaaccccatcaaaaagtgggcgaaggacatgaacagacacttctcaaaagaagacatttatgcagccaaaaaacacatgaagaaatgctcatcatcactggccatcagagaaatgcaaatcaaaaccactatgagatatcatctcacaccagttagaatggcaatcatgaaaaaagtcaggaaacaacagggacatggatgaagctggaagccgtcactctcagcaaactaacataggaacagaaaaccaaacaccgcatgttctcactcataagtgggagttgaacaatgagaacacacagatgcagagaggggaacaacacaccctggagcctgttggaggagaaggtgaattaagaaaagataatcactcaaccaaaaatgaccagtacgataataggcattttcaactggctgtaggaaatggccttatggctaagaccttcatggtcagtttcttctataaagccagtgcctacgttgtacccacaggagaattgccagatttagatataattcagttaaaacaatttggaaacgcattgtcacatctaacagtaggaacctcagtcactcaaatacaaaatttaaatacaatgggaataattggatcccaagatagcagggaccaactggccacactcaaatgtcaaggtaaaggggacccaaaatatcaatgtgatcctccagttaaagtaggtgctaatggaggtcagataattaatgaagttttagctcaggtccaacttacagtgggtccaaagacaaatggatattggagaatgacagtggattatcataagcttaaccaagatgtgactccaattgtagctgctgtaccagatgtggtttcattgcttgaggttatatcaactcttcaaaaagacttctattgctttttccttctgcaaaatatcacactggtccattatattgatggcattatgctgactgaatccagtgagcaagaagtagcagacacactggacttattgactagtatacgtggactcatggaatgccttatccaccatcatggtatcccacacagcattgcctctgaccaaggccctcactttatggctaaagaattgtgggagtgggctcatgctcatggaattcactggtcttaccatattccccatcatcctgaagcagctggattgatagaatggcggaatgaccttttgaagtcacaattacaacaccaactaggtgacaatgctttgcagggctggggcaaagttctccagaaggccatgtatgctctgaatcagcatccaatatatgttactgtttttcccattgccaggattcataagtcctggaatcaaggggtggaagtagaagtggcatcactcaccatcacccctagtgatccactagcaaaatttttgctttccgttcccacaacattacattctcctggcctagaggtcttagttccagctggaggaatgctgccaccaggagacacaacaatcccattgaactggaagttaatattgccacctggacactttgggctcctcctacctttaagtcaacaggctaagaaggcagttacagtgttggctagggtgattgacccagactatcaggatgaaatcagtctactactccacaatggaggtaaggaagagtatgcatggaattcaggagatccattaggtgtctcttggtattaccatgccctgtcattaaggtcaatgagaactacaacagtgcaatccaggcaggattacaaatggcccagatacctcaggaatgaagatttgggtcatgttaccagggaaaaaaaacacaacctgctgaggtgcttgctgaaggctaagggaatatag

SEQ ID NO: 131647 - DNA, 2523 bp, Homo sapiens
atgagggcagcagcacagagctgcagggatgtcatgaatggtgaggctggaaaggatcgcagctccttgccagcaacggaacaaaactggatggagaatgactttcacaagctgacagaagtaggcttccgaaggttggtaataacaaacttctccgagctaaagaaacatgttctaacccatcgcaaggaagctaaaaaccttgaaaaaaggttagacgaatggctaactagaataaacagtgtagagaagaccttaaatgacctgatggagctgaaaaccacaccaattcgattaagtggaagaaaggctatcgtggttgaagatcaaattaatgaaataaaacgagaagacaagattagagaaaaaagagtaaaaagaaacgaaaaaagcctccaagaaatatgggactatgtaaaaaaaccaaatctacatttgattggtgtacctgaaagtgacggggagaatggaaccaagttagaaaacactcttcaggatattatccaggagaacttctccaacctagcaaggcaggccaatattcaaattcaggaaatatggagaccaccacaaagatattcctcaagaagagcaactccaagacacataattgtcagattaaccaaggttgaaatgaaggaaaaaatgttaaaggcagccagagagaaagaaatacaaactaccatcagagaatactataaaccgctctacacaaataaactagaaaatctagaagaaatggataaatttccggacacatacaccctcccaagactaaaccaggaggaagttgaatctcttaatagaccaataacaggttttgaaattgaggcaataatagcctaccaaccaaataaagtccaggagcagagggattcaccgctgaattctaccagagtgttggaagttctggccagggcaatcaggcaagagaaagaaataaagggtattcaactaggaaaagaggaactcaaattgtccctgtttgcagatggcatgactgtatatttagaaaactccatggtctcagccccaaatctccttaagctgataagcaacttcagcaaagtctcaggatacaaaatcaatgtgcaaaaatcacaagcattcctatacaccaataacagacatacagagagccaaatcatgagtgaactcccattcacaattgctacaaagagaataaaatacctaggaatacaacttacaagggatgtgaaagaccttttcaaggagaactacaaaccactgctcaatgaaataaaagaagacacaaacaaatggaagaacattccatgctcatggataggaagaatcaatatcgtgaaaatggccatactgcccaaggtcatttatagattcaatgccatccccatcaagctaccaattactttcttcacagaattggaaaaaactactttaaacttcatatggaaccaaataagagcctgcatagccaagacaatcctaagcaaaaaggaacaaagctggaggtatcacactacctgacttcaaactatactacaaggctacagtaaccaaaacagcattgtacttgtaccaaaacagagatgtagatcaatggaacagaacagagccctcagaaataatgccacatatatctacaactatctaatctttgacaaacctgagaaaaacaagcaatggggaaaggataccctatttaataaatggtgctgggaaaactggctagccatatgtagaaagctgaaactggatcccttccttacaccttatacaaaaattaattcaagatggattaaagacttaaatgttagacctaaaaccataaaaaccctagaagaaaacctaggcaataccattcaggacataggcatgggcaaggacttcatgtctaaaacaccaaaagcaacggcaacaaaagccaaaattgacaaatgggatctaattcaactaaagagcttctgcacagcaaaagaaaccaccatcagagtgaacaggcaacctacagaatgggagaaaatttttggtatctactcatctgacaaaggtctaatatcaagaatctacaatgaactccaacaaatttacaagaaaaaaacaaacaaccccatcaaaaagtgggtgaaggacatgaacagatacttctcaaaagaagacatttatgcagccaaaagacacatgaaaaaatgctcatcatcactggccatcagagaaatgcaaatcaaaaccacaatgagatactatctcacaccactcagaatggcgatcattaaaaagttcggaaacaacagacaggagacagtaagagaaatggcctgtctcctcagcggcacaatggactttagacatcgcgcctgttttgtactctccaagccggacttctctactcgctggcctggcgctgatgcccagaggccccctgtgcttgtggttgtggccttagacagttccctgccctttcctcaggcatcagggcagaggcctccgagcctggaggatgtggacggaggggccggtgccctcgtggctccctgctag

SEQ ID NO: 131648 - DNA, 1230 bp, Homo sapiens
  misc_feature (1)...(1230): n = a,t,c or g
atggccttacttgcttacagatccattttttacctttctgctgctctgctctgtgtggtgggaaggctaacttctgtaagcatccgtctaagtttggctcaaaggacatacagatggaaactggagattgtgagaaaaggagaaggtgagatagcaaggcaacaagaggttctaatggcaagaggaatgtccttccccaaatggcataagattttggtaaagtcatttctgctagaatataggccttttctatggagaaagtcggtaagaaaaacaaacaagcaaacactaattgtatcacagttgctgctaagtgcaccgaatgcagtcctaactgataaagtggtttttcacgtatcagtggaagaaaattgtgcccacatgcttcagagaatcagtagtgagtgtgagacaaatcttaccattatagaagagcgggaaaacataaaaataagaattagaacaaactactttaaacttcatatggaaccaaaagagagctgtatagccaaggcaatcctaagcaaaaagaacaaagctggaggcatcatgctacctgactttagactatactacaaggctacagtaaccaaaacagcaagcttagacacctgctatcaggaaatgtttgagctggagcagcagtccccaaactctttggcaccagcaaccaagttcatggaagacaatttttccacagacgtggacgtggagggggtgggtgaactttttcacactgatgatgaggaggaaggagagtatagcaaagtaacagaagaggttacagagcaggtttatttaccagctaaggctaaagcagcaaaggaaggaaaggttcattcatacccttctgcaccccctccttattattttgaagaaaaagaacctccagatctttcttttctggaagtcactgggncaggaattcagcaagctagacaagagggtgatttagaggcttggcagttccctgttagaatacaacccccagatcaacaaggaaatattatagctacatttgagccttttccttgtaaattactcaaagaatttaaacaagctataaatcagtatggaccagatgggtctagtaatggtaaagcttattctggatcaaaaggtaaagttttccagatgccttatacttcagctcaaaaaggggagcttgtagctgtaattgaggtattgactgctcttgaactgccaagtaacgggagttcgggttcttaa

SEQ ID NO: 131649 - DNA, 2776 bp, Homo sapiens
gaacttatgtagcctcattatcccgctccgtgaggtgacaattgtggaaaaggcagacagctccagtgtgctccccagtcccttatccatcagcacccgaaacaggatgaccttcctatttgccaacttgaaagatagagactttctagtgcagaggatctcagatttcctgcaacagactacttccaaaatatattctgacaaggagtttgcaggaagttacaacagttcagatgatgaggtgtactctcgacccagcagcctcgtctcctccagcccccagagaagcacgagctctgatgctgatggagagcgccagtttaacctaaatggcaacagcgtccccacagccacacagaccctgatgaccatgtatcggcggcggtctcccgaggagttcaacccgaaattggccaaagagtttctgaaagagcaagcctggaagattcactttgctgagtatgggcaagggatctgcatgtaccgcacagagaaaacgcgggagctggtgttgaagggcatcccggagagcatgcgtggggagctctggctgctgctgtcaggtgccatcaatgagaaggccacacatcctgggtactatgaagacctagtggagaagtccatggggaagtataatctcgccacggaggagattgagagggatttacaccgctcccttccagaacacccagcttttcagaatgaaatgggcattgctgcactaaggagagtcttaacagcttatgcttttcgaaatcccaacatagggtattgccaggccatgaatattgtcacttcagtgctgctgctttatgccaaagaggaggaagctttctggctgcttgtggctttgtgtgagcgcatgctcccagattactacaacaccagagttgtgggtgcactggtggaccaaggtgtctttgaggagctagcacgagactacgtcccacagctgtacgactgcatgcaagacctgggcgtgatttccaccatctccctgtcttggttcctcacactatttctcagtgtgatgccttttgagagtgcagttgtggttgttgactgtttcttctatgaaggaattaaagtgatattccagttggccctagctgtgctggatgcaaatgtggacaaactgttgaactgcaaggatgatggggaggccatgaccgttttgggaaggtatttagacagtgtgaccaataaagacagcacactgcctcccattcctcacctccactccttgctcagcgatgatgtggaaccttaccctgaggtagacatctttagactcatcagaacttcctacgagaaattcggaactatccgggcagatttgattgaacagatgagattcaaacagagactgaaagtgatccagacgctggaggatactacgaaacgcaacgtggtacgaaccattgtgacagaaacttcctttaccattgatgagctggaagaactttatgctcttttcaaggcagaacatctcaccagctgctactggggcgggagcagcaacgcgctggaccggcatgaccccagcctgccctacctggaacagtatcgcattgacttcgagcagttcaagggaatgtttgctcttctctttccttgggcatgtggaactcactctgacgttctggcctcccgcttgttccagttattagatgaaaatggagactctttgattaacttccgggagtttgtctctgggctaagtgctgcatgccatggggacctcacagagaagctcaaactcctgtacaaaatgcacgtcttgcctgagccatcctctgatcaagatgaaccagattctgcttttgaagcaactcagtacttctttgaagatattaccccagaatgtacacatgttgttggattggatagcagaagcaaacagggtgcagatgatggctttgttacggtgagcctaaagccagacaaagggaagagagcaaattcccaagaaaatcgtaattatttgagactgtggactccagaaaataaatctaagtcaaagaatgcaaaggatttacccaaattaaatcaggggcagttcattgaactgtgtaagacaatgtataacatgttcagcgaagaccccaatgagcaggagctgtaccatgccacggcagcagtgaccagcctcctgctggagattggggaggtcggcaagttgttcgtggcccagcctgcaaaggagggcgggagcggaggcagtgggccgtcctgccaccagggcatcccaggcgtgctcttccccaagaaagggccaggccagccttacgtggtggagtctgttgagcccctgccggccagcctggcccccgacagcgaggaacactcccttggaggacaaatggaggacatcaagctggaggactcctcgccccgggacaacggggcctgctcctccatgctgatctctgacgacgacaccaaggacgacagctccatgtcctcatactcggtgctgagtgccggctcccacgaggaggacaagctgcactgcgaggacatcggagaggacacggtcctggtgcggagcggccagggcacggcggcactgccccggagcaccagcctggaccgggactgggccatcaccttcgagcagttcctggcctccctcttaactgagcctgccctggtcaagtactttgacaagcccgtgtgcatgatggccaggattaccagtgcaaaaaacatccggatgatgggcaagcccctcacctcggccagtgactatgaaatctcggccatgtccggctga

SEQ ID NO: 131650 - DNA, 3745 bp, Homo sapiens
atggcgattgtattaggcggcaaaaaaaagttggtgtctgagaaaaatcagtgtgctgcatgccatggggacctcacagagaagctcaaactcctgtacaaaatgcacgtcttgcctgagccatcctctgatcaagatgaaccagattctgcttttgaagcaactcagtacttctttgaagatattaccccagaatgtacacatgcaaccaaaaagagccttggaccagatgaattcacagctgaattctaccagacatacaaagaagagctggcactaatcctactgatactataccaaataattgaggagaagaaactcctcctcaactcattctacaaagccaccatgactctgatactaaaatatgtcaaagacacaactaaaaaagaaaaatacaggccaatatccctgctgaacacagatgcaaaaatcctcaaccaaatccagaaacacgacaaaaaattaattggccataatcaaaaattcggaactatccgggcagatttgattgaacagatgagattcaaacagagactgaaagtgatccagacgctggaggatactacgaaacgcaacgtggtacgaaccattgtgacagaaacttcctttaccattgatgagctggaagaactttatgctcttttcaagtccctgcatttttctgacgaggaaaccgaacccagaaagatggaggcactccgggtgtccaggctggttggtggtgcgcttggtgcagcatcagcattatcaacagagtggacagtggcacccctgccagcctgcatccggcacttgaggtgtaagttggagatccgtaaggcaggagaaaacaatgatgcaattcagatcaggtttttaagggatgctgaggaccagaagaaacgttctcagggcatgggggcagggccaggattctggggggagctaaacgaagtggaagtagcagctggaggcagcaagagcatggacagcgaaagcaaagaaattgagacaaggccaacagctgatttccatttacgtcttcttgggctgatccctaatggtggccctcaggctgccagacatcctatcacaggacaaagccgcagttcccttcctctgcctggaaagacaatccttttaatttatatcagtgcctatattaccaggtctttcaacttagaacaaggaacaagtagctcagataaagcaatgagctggaatatgacaatcaccaatcaaaatcacagaacacctgtagagagcatagtgcgctcagcagaatactcaggctttgtcagtgatcatttctataaaagtttagagaatcaaggatcaggaaatgaagaaaccatcaagtgttatgagcacttggggccccacaaaccaccaggtgccatcaatgagaaggccacacatcctgggtactatgaagacctagtggagaagtccatggggaagtataatctcgccacggaggagattgagagggatttacaccgctcccttccagaacacccagcttttcagaatgaaatgggcattgctgcactaaggagagtcttaacagcttatgcttttcgaaatcccaacatagggtattgccagggcatcattgcagaatacaacaaaatcaatgatgtaaaggaagatgatgacacggagaagtttaaagaagccattgtgaaatttcataggctgtttgggatgccagaggaagagaaactcgtcaactattactcttgcagctattggaaggggaaggtcccccgtcagggttggatgtacctcagcattaaccacctttgcttttattcttttcttatgggaagggaagcgaaactggtcatccggtgggtagacatcactcagcttgagaagaatgccaccctgcttctgcctgatgtgatcaaagtgagcacacggtccagtgagcatttcttctctgtattcctcaacatcaacgagaccttcaagttaatggagcagcttgccaacatagccatgaggcaactcttagacaatgagggatttgaacaagatcgatccctgcccaaactcaaaaggaaatctcctaaaaaagtgtctgctctaaaacgctcccaccccaccagcctgcctccccactccctgctgtccaccccgggtatcacccgcaaggaagagacccccgacaacgtggtcgagaagaaggacttggagttgtataaggaagcccccagcactttccaggccttgttctcagatcccccccccagcaaaaaaccacaatacgggaggccctaccctttcctggggcagcccacagtggccgccgatgcggatggcctggcccctgatgtgctgctcccagctgatgggaccaagcgcctgacactctcgcccgaagacaagctcatcctcctgtccccctccaagatcccagagccgctgcgggaggacccggaggaagagccgctggctgaacaggaggcgaaggtggaggtggatgatgtggacgagcgccccgcagagctgccgcctctggagttgccgctgccactgcccgccatggaaaccatggctaccccgagccctgcaggcggatgcagaggtggcccgttggaggcccaggcgctgagtgccaccgggcagggctgcaccgagccctctgagtgcccagactttgcggaggggcctgaagcatgcgtggattccccgggccggacagaaccctgcacggccgcattggacctgggggtgcagctgacacccgagacgctagtggaggccaaggaggagccagtggaggtgcctgtggcggttcctgcggcagaggcagcgccggaggaaggcctggcccaggcggccctgagcgagccccagcccagcctagaaatgtcagactgtgacgtgcccgccggggagggagagtgcccgagactggagccccgggaggccgtgcctgtgcccggcagcacctgctacctggaagaggcaagctctgagcagttcctgcccggcctggaagacccactggctggcatggaggtggccatggagctgccccaggccaggcctctgccctccccaggtgctactggagtccaggccttggagaagcaggaagctgccgagagccttgtcttggagcagagctttctgcacggcatcaccctgctgagcgagatcgcagagctggagctggagaggaggagcaagaaggtgggaggtgcggagcgggccctggtggctcggccctcactggagagcctgctggcagccggcagccacatgctgagggaggtgctggatgggcccgtggtgggacccgctcaagaacctgcggctcccacgggagctgaagcccaacaacaagtacagctggatgcgcaagaaggaggaaagaatgtatgccatgaagtcctccctggaggacatggacgtcctggaactggacttcagaatgtggcgggccgaggtccagcaccagtacaaggagaagcagcatgagctgagggggaagaactgcaacagtagcggaaagctgagcagcaaatctctgccgacatcagatgactatgagctgggagcaggaataaggaagagacacaaagggcccaaggaggaacacaatgcccttattggaacagggaaagccagggagaggaaccagacttgggatgaacacgaggcttcgtctaagttcataagtcagctgaagattaagaagaagaagatggacagcgaccaggagcagttggcaagcaagctcgacaaatga

SEQ ID NO: 131651 - DNA, 903 bp, Homo sapiens
atgattagacccaaaaatgctaaggactctacttctaatagtatggagaacactgatagtacttggagtaaactgtttggagagttatgcaaaataaatgaatttgatactcctgattcaccactcctgagaggcaaggagtttaatgactctatacttaatacttttgaccatatgtggagaaccagggaacacaatgaagctgtttggttgcttctaagttcagtggacaaagtgatgaaagaaaatgatgaactcagggattctgtgtcccagcttcagaggcagatacctgcgcagaagatagatggatcttggcgaatgacagtgaattattgtaatcttaaccaagtggtgactccaatttcagctgctgtaccagatgcagtttcattgcttgagcaaatgaacacatctcctcgtatctggtatgcagccattgacttggcaaatgccttttattccattcctgtccataaggcccaccagaagcaatttgccttcagctggcaagtcactatgcaacctgaactgtgtatcataaactgggtgctttctgatccatcaagccataaagtgggtcatgcacagcagcattccatcatcaaatggaagtggtatatacgtgatcgggctcaagcaggtcctgaaggcacaacaaagaatcatgggtccagggatcaagaggtgaaagtggaagtggcaccactcaccatcacccctagtgatccactagcaaaacttttgcttcatgttcccacgacatcacgttctgctggcctagagatcttagttccagagggaggaacactgccaccaggagacatgacaatgattccactaaactggaagattgccacctggacactttggggtcctcctacctttaagtcagcaggctaa

SEQ ID NO: 131652 - DNA, 1293 bp, Homo sapiens
atgagcatacaagtcctgaaggtatttcaacaccagttcacacgtaatggatcaagaaccctggggcagattcagaaaacttcaatagaagaccgagttctgccatgcatgtatgcacgtaacctagaagttagagttctagcacccgcttttccaaaaacttcagagaagttgctgttcgtgtcgggaatctctagaggcgattcgaacggcaatcaacttccgggcgagtttttttctgggcacgtatttctgcccgcggataaaatgcccacattatctcgcgccgttatctcgggcggaagtatccgcgacgctatgtggtgcatacggggctccgagtttgatagccgcattcttcgcggctatggtgtccccacatttgtcgcgactgtatctccctttgttctctgccgttgccgacagagtgttgttcatggtgtttctagccttggtgctcatagttatgccgactcgtttctgctcaagagttgtcctgcatacagtcggggtttctggagttggctgcttaatatgattagacccaaaaatgctaaggactctacttctaatagtatggagaacactgatagtacttggagtaaactgtttggagagttatgcaaaataaatgaatttgatactcctgattcaccactcctgagaggcaaggagtttaatgactctatacttaatacttttgaccatatgtggagaaccagggaacacaatgaagctgtttggttgcttctaagttcagtggacaaagtgatgaaagaaaatgatgaactcagggattctgtgtcccagcttcagaggcagatacctgcgcagaagatagatggatcttggcgaatgacagtgaattattgtaatcttaaccaagtggtgactccaatttcagctgctgtaccagatgcagtttcattgcttgagcaaatgaacacatctcctcgtatctggtatgcagccattgacttggcaaatgccttttattccattcctgtccataaggcccaccagaagcaatttgccttcagctggcaagcaaagaatcatgggtccagggatcaagaggtgaaagtggaagtggcaccactcaccatcacccctagtgatccactagcaaaacttttgcttcatgttcccacgacatcacgttctgctggcctagagatcttagttccagagggaggaacactgccaccaggagacatgacaatgattccactaaactggaagattgccacctggacactttggggtcctcctacctttaagtcagcaggctaa

SEQ ID NO: 131653 - DNA, 4204 bp, Homo sapiens
gccgccgggcgccaggcctgagcggtgggagggctctgcggggcctggtgttcaggcgtcccaccacgagggtggagcagcgttggatacttgttccttagggaccgaagctccggtggcacccgggctatttctcagaggacaattagtaacgtgtcgccatgaggagccggagtaactccggggtccggctggacggctacgctcgactggtgcaacagaccatcctgtgccatcagaatccagtgactggcttgcttccagccagctatgatcagaaagatgcttgggtccgagataatgtgtacagcatcttggctgtgtggggtttgggcctggcctatcggaagaatgcagaccgggatgaggataaggcaaaggcctatgaattggagcagagtgtagtgaagctgatgagaggactactgcactgcatgatcagacaggtggataaagtagaatccttcaaatatagtcagagtactaaggatagcctccatgcaaagtacaacaccaaaacctgtgccactgtagtgggtgatgatcaatggggacacctgcagttggatgctacctctgtgtacctgctcttcttagcccaaatgactgcctcaggactccatatcatccacagcctagatgaagtcaatttcatacagaaccttgtgttttacattgaagctgcatataaaactgctgacttcgggatatgggaacgtggagacaagaccaaccaagggatctcagagttgaatgccagttcagttggaatggcaaaggcagccctggaagcattagatgaactggatctgtttggtgtgaaaggtgggcctcaatcagttatccatgtcctggctgatgaagtacagcactgccagtctatcctaaattcactactgccccgtgcttcaacatcaaaagaggttgatgctagtctactctcagtggtttccttccctgcctttgcagtagaggatagccagttggtggagctcacaaaacaggaaatcatcaccaagcttcagggtcgttatggttgctgtcgctttctacgagatggatataaaactcctaaagaggatcccaatcgtctgtactatgaaccagctgagctgaagctatttgaaaacattgagtgtgaatggccattgttctggacatactttattcttgatggggtcttcagtggcaatgcagaacaggttcaagaatataaagaggctcttgaagcagtcctcatcaagggcaaaaatggagtcccacttctgccagagctgtacagtgttcctcctgacagggtcgatgaagaatatcagaatcctcacactgtggaccgagtccccatggggaaattgcctcacatgtggggtcagtctctatacattttaggaagcttgatggcagagggatttttagcccctggagaaattgatcccctgaatcgcaggttttctactgtaccgaagcccgatgttgtggttcaagtctccattctagctgaaacagaagaaatcaagaccattttgaaggacaagggaatttacgtggagaccattgctgaggtataccccatcagagtacaaccagctcgtattctcagccacatttattccagcctaggatgcaacaatagaatgaaactcagtggacgaccctacagacacatgggagtgcttggaacttcaaaactctatgacattcggaaaactatctttactttcactccacagtttatagaccagcaacagttctacctggctctggacaacaagatgatagtggaaatgcttagaacagacctctcctacctctgtagccgctggcggatgacaggccagcccaccatcaccttccccatctcatacagcatgcttgatgaagatggaacaagcttgaattcaagtatcctggcagcactccgaaaaatgcaagatgggtattttggtggggcaagggttcaaacaggtaaattgtcagagtttttgacaacatcttgttgcacacacttgagcttcatggaccctggacctgagggtaagctgtacagtgaagattatgatgacaactatgattacctggaatctggcaactggatgaatgattatgattcaaccagtcatgctcgctgtggtgatgaagttgctcgttatttagatcaccttttggcgcacactgctccccatcctaaactagcccctacctcacagaagggagggctagatcggttccaagctgctgtgcaaacaacctgcgacttaatgtccttggtgaccaaggccaaggaactgcatgtacagaatgttcacatgtatcttcctacgaagttatttcaggcttcccggccttcattcaacttacttgattcacctcatccccgacaggagaaccaggttccctctgttcgtgtagaaatacatcttcctagagaccagtctggggaggtggactttaaagcactggttttacagttgaaggagacctcaagcttacaggaacaagctgatatcctctatatgctgtatactatgaaaggacctgactggaacactgaattgtataatgaacggagtgctacagtgagagagcttcttaccgagctgtatggcaaagtgggagaaattcgtcactggggcctgatccgatacatttctgggatcttaaggaagaaagtggaagcacttgatgaggcctgcacagaccttctctcccaccagaaacatttgacagtaggacttcctccagaacctcgagaaaagactatctctgcacctctgccctatgaggcgctcactcagctgatagatgaagccagtgaaggggatatgagcatttcaatccttacacaggaaataatggtatatctagccatgtatatgcgaacccagcctggcctctttgctgaaatgtttcgacttcgaattggtctgatcatacaagttatggcaacagaactggcccactcccttcgatgctcagctgaggaagccacagagggcctgatgaatctcagtccttcggccatgaagaatctcctgcatcacattctcagcggcaaggagtttggagtggaacgaagcgttcgtcccactgattcaaatgtcagtcctgctatttctatccacgagattggtgctgttggagcaaccaaaacagaacgaactgggatcatgcagttaaaaagtgagataaagcaggtggaatttcgtagactgtcaatctcagctgagagtcagtcacctggaacctctatgactccaagtagtgggtcctttcctagtgcatatgatcagcagtcatctaaagatagtcgtcaaggtcaatggcaacgccgaagaaggctggatggggcactgaatagagttccagttggattttatcagaaagtatggaaagttttgcagaagtgtcacggactttctgttgaagggtttgtccttccttcctctaccactagagagatgactccaggtgagattaaattctctgttcatgtggagtctgtcctgaatcgtgtacctcagccagagtaccgtcagctgctggttgaagccatccttgtcctcaccatgctggcagatattgaaattcatagcatcggaagcatcattgctgtggaaaaaatagtgcatattgccaatgacttgttccttcaagaacagaaaacccttggcgcagatgataccatgttggcaaaggatcccgcatctggcatctgtactcttctgtatgacagtgcacccagtggcaggtttggcaccatgacctacctctccaaggcagccgccacctacgtgcaggagttcctgccccacagcatctgtgccatgcaatgagggctttggttcctggcttctgggagccttttgacagctggtccctgcctcggttgattgtgcatggaactaaaatgttattgcctaatcactccaaccctgcccctttctgtcccatccttcccaagaagagagaactttttcgataaactaactactgtagaagaagtgaacacttacctggaggctcaccttgcagaaccagtgacaatcttatgagtataatgaacactcagccaggcctgtcatgattggctttatttctttcatcattcataaaagtttgcatgtgtttttattctctagatctgttaccaatatagttttctaactcctgtttggggagcaagtgttaataataacttattcct

SEQ ID NO: 131654 - DNA, 1186 bp, Homo sapiens
cgcgtctcccgcaaggtggaggcggcgcagcggtcgttgacctgttggcggcggccgggcgggaggctgtgggccgcggcggtctcccggggttgaggggaggatgcaggagtcacacgcggaggccggactggactaagggggcaggagcggcgcctggggcgctgcggcggggctctagaccgcgggaagccagtgctagcgctggcgcgtggtgggcccctgaggccgccggagtccggagagggaccgaaggctccggtggcacccgggctatttctcagaggacaattagtaacgtgtcgccatgaggagccggagtaactccggggtccggctggacggctacgctcgactggtgcaacagaccatcctgtgccatcagaatccagtgactggcttgcttccagccagctatgatcagaaagatgcttgggtccgagataatgtgtacagcatcttggctgtgtggggtttgggcctggcctatcggaagaatgcagaccgggatgaggataaggcaaaggcctatgaattggagcagagtgtagtgaagctgatgagaggactactgcactgcatgatcagacaggtggataaagtagaatccttcaaatatagtcagagtactaaggatagcctccatgcaaagtacaacaccaaaacctgtgccactgtagtgggtgatgatcaatggggacacctgcagttggatgctacctctgtgtacctgctcttcttagcccaaatgactgcctcagcatggcagaagcaatattcaaggcgggtacaaccaagagcacaatctccccagctagttcccagtttagggacactgtatctctctgagggaggactccatatcatccacagcctagatgaagtcaatttcatacagaaccttgtgttttacattgaagctgcatataaaactgctgacttcgggatatgggaacgtggagacaagaccaaccaagggatctcagagttgaatgccagttcagttggaatggcaaagagtttctacccgccagaagccctcaccagatggggccccttgacattggactttatcagcatgatgaacgggagccaggtgctattcctcaagacaatggaggaaagaccccaaggcatttcagagatcttagatgctgccttttccatcacaggtccaaaggcctag

SEQ ID NO: 131655 - DNA, 732 bp, Homo sapiens; identical to SEQ ID NO: 117818

SEQ ID NO: 131656 - DNA, 2235 bp, Homo sapiens
atgcagccgggaccccgggcgtcctgtcccgttcctgcgcggcgactgcggccccggcgccctctctgggcagctccgagcccgcagccccgggtctccccagattgtgcggctgtaaccaacacagcctggctcgcagttcctgtgaacccggtcctccggacggctcccgctgccaatgcgggttcccgcgggacacaggctgccacggaacttccaggtcgtctcttagctacagagccgagcaccgagcgcccagcgcaggaattgcctaaaaatgttgtaaaatacatcaaaagcctgcaaccacctggtaaaacggattatgattatgacataccatctctgatggttaatactgagtgtcaacttgattggattgaaggatacaaagtattgatcctgggtgcctctgactcagtggtctttgaggatgtggctgtgaacttcacccaggaggagtgggctttgctgggtccctctcagaagaaactctacagagatgtgatgcaagaaacctttgttaacttggcctctataggggaaaactgggaggagaagaacattgaagatcacaaaaatcaggggagaaagctaagaagtcatatggtagagaggctctgtgaaaggaaagaaggtagtcagtttggagaaaccatcagtcagactccaaatcctaaaccaaacaagaaaacttttactagagtaaaaccatatgaatgtagtgtgtgtggaaaggactatatgtgtcattcatctcttaataggcacatgagatctcatactgaacatagatcatatgaatatcacaaatatggagagaaatcatatgaatgtaaggaatgtgggaaaagattcagctttcgaagttcatttcgaatacatgaaagaactcacactggagagaaaccctataaatgtaaacagtgtggtaaggctttcagttggcccagttcctttcaaatacatgaaagaactcatactggagagaaaccttatgaatgtaaggaatgtgggaaggccttcatttatcacacaacctttcgaggacacatgagaatgcacacaggggagaaaccctataaatgtaaagaatgcgggaaaacgttcagtcatcccagttcttttcgaaatcatgaaagaactcacactgcagagaaaccctataaatgtaaacaatgtgggaaagctttcagatattaccaaacttttcaaatacatgaaaggactcacactggggaaaaaccctatcagtccttcagttttcctagttcctttagaaaacatgaaagaattcatacaggagagaaaccctatgattgtaaggaatgtgggaaagcattcatttctcttccaagctatcgaagacatatgataatgcacactggaaatggaccttataaatgcaaggaatgtgggaaagcctttgattgtcctagttcttttcaaatccatgaacgaactcacactggagagaaaccctatgaatgtaaacagtgtggtaaagccttcagttgttccagttcctttcgaatgcatgaaagaactcacactggagagaaaccccatgaatgtaaacaatgtggtaaagccttcagttgttccagttctgttcgaatacatgaaaggactcacactggagagaaaccctatgaatgtaaacagtgtggtaaagccttcagttgttccagttcctttcgaatgcatgaaagaattcacactggagagaaaccctatgaatgtaaacagtgtggtaaagcctttagtttttctagttcctttcggatgcatgaaaggactcacactggagagaaaccctatgaatgtaaacaatgtggtaaagccttcagttgttccagttcctttcgaatgcatgaaaggactcacactggggagaaaccctatgaatgtaaacagtgtggtaaggcgtttagttgttccagttccattcgaatacatgaaaggactcacactggagagaaaccttatgagtgtaaacaatgtggtaaggccttcagttgttctagttctgttcgaatgcatgaaaggactcacactggagtgaaaccctatgaatgtaaacaatgtgacaaagccttcagttgctcacgttcctttcgaatccatgaacgaactcacactggagagaaaccctatgcatgtcaacaatgtggtaaagccttcaagtgttcccgttcctttcgaatacatgaaagagttcatagtggagagtaa

SEQ ID NO: 131657 - DNA, 411 bp, Homo sapiens
tcaggagctggcaggcccgaagatgcactgggtagacccagtgggggccttcagtgtgttggtgtctaattccttggccgtcctttccagatcaatgaccaggcttctgagctgtgttactgccctggagatgtcaaggattctggccgcttctgctggcatgtgctccagctggcccagccactgctgcagagcctgcagtttcttctcctgctgagccttgagccgctgaagttctgcaatgtcctttctgagcttcctgctccggcgattgagtcgttcgagtgagaacatgtggtgtttggttttctgatcttgtgttagtttgctgagaatgatggtttccatcttcatccacgtccctgtaaaggacgtgaactcatctgtttttatggctgcatagtattccat

SEQ ID NO: 131658 - DNA, 627 bp, Homo sapiens
atgatccctttgcagaaggacaaccaggaggagggtgtctgccccatctgccaggagagcctgaaggaggccgtgagcaccaactgcggacatctcttctgtcgagtgtgcctgacacagcatgtggagaaggcctcagcctctggggtcttctgctgccccctctgccggaagccctgttctgaggaggtgctagggacaggctatatctgccccaaccaccagaagagggtgtgcaggttctgtgaggagagcagacttcttctatgtgtggaatgcctggtgtcccctgaacacatgtctcatcatgaactgaccattgaaaatgccctcagccactacaaggaacgactcaatcgccggagcaggaagctcagaaaggacattgcagaacttcagcggctcaaggctcagcaggagaagaaactgcaggctctgcagcagtggctgggccagctggagcacatgccagcagaagcggccagaatccttgacatctccagggcagtaacacagctcagaagcctggtcattgatctggaaaggacggccaaggaattagacaccaacacactgaaggcccccactgggtctacccagtgcatcttcgggcctgccagctcctga

SEQ ID NO: 131659 - DNA, 578 bp, Homo sapiens
agagaccttgatctcttttcgcttccacaagatatcacactgggtccattacgttgatggcattatgctgattggatccagtgagcaagaagtagcaagcacactggacttattggtgagacatttgcatgccagaggatgggaaataaatctgactaaaattcagggacttgctacctcagtaaaatttctaggagtccagtggtatggggcctgtagagatattccttctaaggtgaaggataagttgctgcatttggcccctcctacaaccaagaaagaggcacaacatctagctgccagttttgagtggggtccagaacagaagggtctgcaacaggtccaggttgctgtgcaagctgctctgccacttgggctgtatgacccagcagatccaatggtgcttgaggtgtcagtggcagatagggatgctgtttggagcctctggcaggcccccataggcgaatcacagtggaggcctctaggatttcagaacaaggccctgccatctgcagataactactctccttttgagagacagctcttggcctgttactgggctttggtggaaactgaag

SEQ ID NO: 131660 - DNA, 282 bp, Homo sapiens
cccatttatcgagtgagccgaaaggctgccaattttgagtggagtccagaacaggagaaggctctgcaacaggtccaggctgctgtgcaagctgcttggccacttgggccatacgacccagcagatccaatggtgcttgaggtgtcagtggcagatagggatgctgattggagctgttggcaggcctccatagccataaagtgggtcatgcacagcagcattccatcatcaaatggaagtggtatatacgtgattgggctcgagcagatcctgaaggcacaa

SEQ ID NO: 131661 - DNA, 338 bp, Homo sapiens
tccatttatctagtgacccaaaaggctgccattctgagtggggtccagaacaggagaaggctctgcaagaggtccaggctgctgtgcaagctgctctgatacttgagccatatgacccagcaggtccagtggtgcttgaggtgtcactggcagatagggatgctgtttggagcctttggcaggcccccataggtgaatcacagcaaaggcctctaggattttggagcaaggccctgccatcttctgcagccataaagcgtgtcatgcacagcagcattccatcatcaaatggaagtggtatatacatgatcgggctcgagcaggtccggaaggcacaa

SEQ ID NO: 131662 - DNA, 757 bp, Homo sapiens
atgtggagaaccaaggaacataatgaagctggttggttgctcctaagttcagtggacgaagtgatgaaagaaaatgatgaactcagggattctatctcccagcttcagaagcagatactgagtctcaaatctgctaagattgccctgactgagagtcttatctcctttagagaaagagctgaaattgtggaaaaacagacacaagctcttatcatgggaactgtgtactggggaaagggaaatgatcagacatttcagggactactggacactggctctgagctgacgttgattccaggggacccaaaacatcattgtggtcctccaggaccaaaagtaagggcttatggagatcaggtaattaacggagttttggctcaggtccaacttatagtgggtccagtgggcccctggactcatcctgtggtcatttccccagtgccagaatgcgtaattggcatagccatacttaacagctggcagaacccccacattggctccctgactgtccatttatctagtgacccaaaaggctgccattctgagtggggtccagaacaggagaaggctctgcaagaggtccaggctgctgtgcaagctgctctgatacttgagccatatgacccagcaggtccagtggtgcttgaggtgtcactggcagatagggatgctgtttggagcctttggcaggcccccataggtgaatcacagcaaaggcctctaggattttggagcaaggccctgccatcttctgcag

SEQ ID NO: 131663 - DNA, 1320 bp, Homo sapiens; identical to SEQ ID NO: 130563

SEQ ID NO: 131664 - DNA, 1119 bp, Homo sapiens
cctctgccagcgcctcttattggctgaacctaatgagaagccagggagcctgggaaatgtgatggctgtggcaagaatagaaattggaatctgtgagtattaccatgagaaaaccacagagaaagctctggacagccatggagtcttagctggatctacaataaaaggagtcagaagctttcagaggaatttggagctgaagttgccagcaacagagagggccacagctaacgcgatagagctgctcacagtgttagaccaggcctatgaaaactttgcaccgcagatcctccccagcactggcagccccacgtcccaggaaactgctcagttcaaggcaaaccagaacaaaccattggtcagaggaaaaggaagcccacatgaggccataagatatatttcagctgcccatcgagaatggaagccagcaatcctgacatcagccattaggtcattttgttctacctggctggtgttcacctccaagaactttcccaagcttgtgacccaacatggaagtacgatagcaggaaacgggcagagctcagatgagacccaagtccagggtgcagcctggaagtctgattccagaggaacaaagagacaaataccaacgtggattctggcagaggggaacaatgcaggtgcccaacttgacatcccaggcccaaccatccctgctcctaattgttccctgaaggtgccccagagctggagtaccacgcccagcatgccctcctcactagggaaggcctactggctcttggcctgttactgggccttggtggaaactgaacattggctatgggtcatcaagtcaccatgtaaacctgaactgcctgtcatgaactgggtgctttctgacccatctagccataaagtgggtggtgcacagcagcattccatcaacaaatggaagtggtatatacgtaatcgggctcgagcaggtcctgaaggcacaagttgattatgttggacctcttccatcatgcaaagagcagcagtttgttctcactggaatagatactttatctggatatggctttgcctatcctgcacacaatgcttctgccaagactaccatccatgggcacacagaatgccttatccaccatcatg

SEQ ID NO: 131665 - DNA, 1818 bp, Homo sapiens; identical to SEQ ID NO: 117791

SEQ ID NO: 131666 - DNA, 1950 bp, Homo sapiens; identical to SEQ ID NO: 130713

SEQ ID NO: 131667 - DNA, 1158 bp, Homo sapiens
atggggagaaaccagcgcataaaggctgaaaattgcaaaaaccagaactcctcttctcctccaaaggatcacaattcctcgccagcaagggaacaaaagtggacgaagaatgagtttgacaaattgacagaagtaggcttcagaaggtgggtaataacaaactcctccaagctaaaggagcatgttctaacccaatgcaaggaagctaagaaccttgaaaaaaggttagacgacttgctatctggaacaaccagtttaaagaagaacataaatgacctgatggagctgaaaaacacagcacgagaacttcgtgaaccatacacaagtatcaatagccaaatcgatcaagcagaaaaaaggataacagagattgaagatcaacataatgaaataaagggtgaagacaagattagagaaaaaagaatgaaaaggaatgaacaaagccttcaagaaatatgggactatgtggaaagaccaaatctacatttgactagtgtacctgaaagtgatggggagaatggaaccaagtcggaaaacactctgcaggatattatccaggagaactttcacaacctaccaacacagaccaacattcaaattcaggaaatacagagaaaaccacaaagatactccttgagaagagcaaccccaagacacataaacgtcagattcaccaaggttgaaatgaaagaaaaaatgttaagggcagccagagaggaaggtcgggttacccacaaagaaatacaaactaccatcagacaatactataaacacctctatgcaaataaactagaaaatctagaagaaatggataaattcctggacacatacaccctcccaagactaaaccaggaagaagtcgaatccctgaatagaccattaacaagttctgaaattgaggcagcaattaatagactaccaaccaaaaaaagcccaggaccagacggattcacagccgaattctaccagaggtacaaagaggagctggtacccttccttctgaaactattccgatcaacagaaaaagacagaatctgccctaactcattttatgaggccagcatcatcctgataccaaaacctggcagagacataacaacaacaaaaaatgttcaggccaatatccctgatgaacatagatgcgaaaatcaacaataa

SEQ ID NO: 131668 - DNA, 1347 bp, Homo sapiens
atggtgcgaacccgggaggcagagcttgcagtgagccgagatggtgccactgcactccagcttgggcaacaggggtttgacactagcatcctgcccatctgcaaggactccctgggctggatgttcaacaagttggacatgaactatgacctcctgcttgacccttcagagatcaatgccatctacctggataagtacgagccctgtatcaagcctcttttcaactcgtgtgactccttcaaggatggcaagctttctaacaatgagtggtgctactgcttccagaagcctggagagctcatcgcgtttgggcctctaaaggttaagggccctgtaattttgactaatagccaaccatccccatcctctgctgctgaccctgcagcagatattctgacatgggccttcatacctcggtgtaatgaggagggctattacaaagccacacagtgccacggcagcacggggcagtgctggtgtgtggacaaatatgggaatgagttggctggctccaggaaacagggtgctgtgagctgtgaagaggagcaggaaacctcaggggattttggcagtggtgggtccgtggtcctgctggatgacctagaatatgaacgggagctgggaccaaaggacaaagaggggaagctgagggtgcacacccgagccgtgacagaggatgatgaggatgaggatgatgacaaagaggatgagatgggactatctagttgcaggaaaacaagctcagggcttccactgattctacaatatggtgagttatataatgatttcattatatattacaatgtaataacaatagaaatgaagtgcacaataagtgtaatgcacttgaatcatcctgaaaccatctccctcacccctatatccatggaaaaattgtcttccacgaaacccgtccctggtgccaaaaaggcaaacagggtctggagtggacatctggcaaactgcagcagacctgcagcagaggggcctattagaaggaaaactaacaaacagaaaggaatagtatcaacatcaacaaaaacgatgtccacaccaaaaccccatctgaaggtcaccaacatcaaacaccaaagcaagggaaaaaactggacagagaatgagtttgatgaattgacagaagtaggcttcagaaggtggataataacaaactcctcccagctaaaggagcatcttctaacccaatgcaaggaagctaagaaccttgaaaaaaggttagaggaattgctaactagaataaccagtttagagaagaacattaatgacccgatggagctgaaaaacacagcagaagaacctcacgaagcatacacaagtatcaatagctga

SEQ ID NO: 131669 - DNA, 716 bp, Homo sapiens; identical to SEQ ID NO: 127020

SEQ ID NO: 131670 - DNA, 591 bp, Homo sapiens; identical to SEQ ID NO: 126415

SEQ ID NO: 131671 - DNA, 1143 bp, Homo sapiens; identical to SEQ ID NO: 121076

SEQ ID NO: 131672 - DNA, 777 bp, Homo sapiens
atgaggaaaaatcagtgcaaaaaggctgaaaattccaaaaaccaggacagctcttctcctccaaaggatcacaactcttcgccagcaagggaacaaaactggatggagaatgagtttgacgaattgacagaagtaggcttcagaaggcaggtaataacaaactcctctgagctaaaggagcatgttctaacccaatgcaaggaagctaagaaccttgaaaaaagggacatggatgaagctggaaaccatgattctcagcaaactgacacaggaacagaaaaccaaacacgcatattctcactcccagcaattcctgcagaaagaaaacttcctggtttgggttacatgtctgtgcttgtgaaatcagtatatttcatcttcctggccacagtgattatgccaacccctggcactgggcactggtttggtcccagcagaatcacacagtcagagcaggttagggataaaaggaatatcttattgacacaggaattttctctcagcccctttgctggactcgcagcaggtgcatcctgtctacttggcctgccacactcagtcccttgtgggagggagaatgtgagagagcgagtgcaggagccagctggccactccagctcaatggatggcagtgtgttggcagctcagtcggcccctggccctgtcacatggagtggctactctctgccggtgagggcaaaaggtcagtgtgacagcctttctgtgtacctgcactcagtgggtcctgagctcttgtccagcatccaagaagaatga

SEQ ID NO: 131673 - DNA, 993 bp, Homo sapiens
atgctgaaaattccaaaaaacagaatgcctcttctcctccaaatgatgaaactcctctgggcacaaaactggacggagaatgagtttgatgaattgacagaagtaggcttcagaaggtggatagtaacaaactcctctaagctaaaggagcatgttctaacccaatgcaaggaagctaagaaccttgataaaaggttacaggaactgctaactagaataaccagtttagagaagaacataaatgacctgatggagctgaaaaacacagcaagagaacttcgtgaagcattcacaagtttttgtgttaactgtgaagcagtttcactaataaccagtctaagggaggattcccactggttggaggatagtaaaggtcatcgtatgccaggcaccaggaatagaagtgtgaatactttcacccaccgcatcctgggctgcagttttaccagttgcctgaatctgactcccatagtgaccctctctggccacatggaggcagtttcctcagttctgtggtcagatgctgaagaaatctgcagtgcatcttgggaccatacaattagagtgtgggatgttgagtctggcagtcttaagtcaactttgacaggaaataaagtgtttaattgtatttcctattctccactttgtaaacgtttagcatctggaagcacagataggcatatcagactgtgggatccccgaactaaagatggttctttggtgtcgctgtccctaacgtcacatactggttgggtgacatcagtaaaatggtctcctacccatgaacagcagctgatttcaggatctttagataacattgttaagctgtgggatacaagaagttgtaaggctcctctctatgatctggctgctcatgaagacaaagttctgagtgtagactggacagacacagggctacttctgagtggaggagcagacaataaattgtattcctacagatattcacctaccacttcccatgttggggcatga

SEQ ID NO: 131674 - DNA, 1386 bp, Homo sapiens
atgggaagaaaccagcataaaaaggctgaaaattccaaaaaccaaaacacctcttctcctccaaaggatcacaactccttgccagcaagggaacaaaattggacagagaatgagtttgatgaattgacagaagtaggcttcagaaggtgggtaataacaaactcctctgagctaaaggagcatgttctaacccaatgcaaggaagctaagaaccttgacaaaaggttaactagaataaccagtttagaaaagaacataaatgacccaatggagctgaaaaacacagcacgaaaacttcgtgaagcatacacaagtatcaatagccaaatcaatcaagcacacgcaaatgctgagagattttgtcaacagcaagcctgccttacaagagctcctgaaggaagcactaaacatggaaaggaacaactggtaccagccagtacaaaaacataccaaatggaagaagtcaaatccccagatagaacaataacaagttctgaaattgaggcagcaattaatagcctaccaaccaaaaaaagtccaggaccagatggattcacagccaaattctaccagaggtacaaagaggagctggtaccattccttctcaaactattccaaacaatagaaaaagagggaatcctccctaactcattttatgaggccagcatcatcctgatacgaaaacctaacagagacacaacaaaaccagaaaatttcaggccaatatctctgatgaacatctatgcaaaaatcctcaataaaatactggcaaaccaaatccagcagcacatcaaaaagcttatctaccacaaccaaatcagcttcatccttgggatgcaaggctggttcaacatatgcaaatcaataaacataatccatcacataaacagaaccaatgacaaaaacccacgattatctcaagcagatgcagaaaaggcctttgacaaaattcaacagcccttcatgctaaaaattctcaataaactaggtattgatggaatgtatctcaaaataataagagctatttatgacaaacccgcagccaatatcatactgaatgggcaaaagctggaagcattccctttgaaaactggcacaagacaaggatgccctctctcaccactcctattcaacattgtattggaagttctggccagggcaatcaggcaagagaaagaaataaagggtattcaaaaaggaagagaggaagtcaaattgtctctgtttgcagatgacatgattgtatatttagaaaaccccatcgtctcagcccaaaatctccttaagctgataaacaacttcagcaaagtttcaggatacaaaatcaacatgcaaaaatcacaagcattcctatatatcaataagagacagagagccaaatcatga

SEQ ID NO: 131675 - DNA, 993 bp, Homo sapiens
atgcttgcaggccagcagcgcgagttcccggtgggcgtgggctccgcggaccccgcactcggagccgccggctggccccagcggcctgggcaggctcgggacctgcagctcgccatgcctgagcctcccccaaccccgtgggctcctgtgcggctggagcctcgcctacgagcaccgccccctgctccaaggcgcccagtcccatcgaccacccaagggctgcggagtgcaggcgcagggcgcgggactggcaggcagctccacctgcagcccccgtgcgggatccactgggtgaagccagcagggctcctgagtctggtctgcagcttcactcctgaagccagcgagaccacgagctcaccaggaggaacaaacaactccagacgtcctgccttaagagctgtaacactcactgtgaaggtctgcggcttcactcctgagccagcgagaccaccgacccaccagaaggaagaaactctgaacacatccgaacatcagaaggaacaaactccggacacgccgcctttaagaactgtaacactcaccgcgagtgtccgcggcttcattcttgaagtcaaaggaaaacaaacagaaaggaatagcatcaatatcaacaaaaaggatgtccacacagaaaccccatccaaaggtcaacaacagcaaagaccaaaggtagataaatccatgaagataaggaaaaaccagtgcagaaaagctgaaaattccaaaaaccagaatgcctcttctcctccaaaggatcacaactcctcaccagcaagggaacaaaactggacagagaatgagtttgatgaattgacagaagtaggcttcagaaagtgggtaataacaaactcctctgagctaaaggagcatgttctaacccaatgcaaggaaactaagaacgttgaaaaaagtttagaggaattgctaactagtataaccagtttaaagaaaaacataaatgacctgatagagatgaaaaacacagcatga

SEQ ID NO: 131676 - DNA, 1515 bp, Homo sapiens; identical to SEQ ID NO: 129514

SEQ ID NO: 131677 - DNA, 477 bp, Homo sapiens; identical to SEQ ID NO: 129518

SEQ ID NO: 131678 - DNA, 771 bp, Homo sapiens
atgcccttcagcgatacagagcgtgtcatcacagggccaagcacaaaggtgcattcctacccaggaggcctgcaggctctcctcctgcagctcaggcttcactctctgatgtggcgctggagtgctgctgtggcaattggggttcatgtgagatgtgacctcctggctgttcaccctgtattgtgggctgtacctcagtggcaggagccaattgaaaagatgctgactctcatacctgggcctaggatcacagctacaatcattggtctgtaccagcatgaaggtatcagagcatattgtgactcacgtgtatattatataaagccctcgagtggtatagagagtgtcctaacaaggcccagcacacaggatcacaactcctcgccagcaagggaacaaaactggacagagaatgagtttgatgaattgacagaagtaggcttcaaaaagtgggtaataacaaactcctttgagctaaaggagcatgttctaacccaatggaaggaagctaagaaccttgaaaaaaggttagccaatttgctaactagaataaccagtttagagaacataaatgacctgatggagctgaaaaacacagcacaagaacttcatgaagcttacgcaagtatcaatagccgaatcaatcaatcagaagaaaggatatcagagattgaagatcaacttactgaaatagagcaagtagacaagattagagaaaaaagaataaaaaaaggaatgaacaaagcctctaagaaatatgggactatgtga

SEQ ID NO: 131679 - DNA, 814 bp, Homo sapiens
aggaaggagcaggcagcaatctttgctgttctgcaacctccactggtgataaccaggcaaacagggtctggagtggacccccagaaaactccagcagacctgcaaaagaggtgccggacagttagaagaaaaactagccaacagaaagcagtagcatcaacattaacaaaaaggataaccacacaaaaactcaatgcaaaggatcacaactcctcaccaacaagggaacaaaactgtacagagaatgagtttgatgaattgacagaagtaggtttcagaaggtgggtaataacaaactcctctgagctaaaggagcatgttctaacccaatgcaaggaagctaagaactttgataaaaggttagaggaattgctaattcaaataaccagtttagagaagaacataagtgacctgatggagctgaaaaacacagcacgagaacgttggaagcatacacaagtatcaatagccaaatcgatcaagcagaaatggaccgctagccagactaataaagaagaaaagagagaagaatcaaatagcacaataaaaaatgataaaggggatatcacaactgatcccacagaaatacaaactaccatcagagaatactataaacatctctatgcaaataaactagaaaatttagaagaaatggacaaattcctggacacatacaccctcccaagactaaaccaggaagaagtcgaacccctgaatagaccaataacaagttctgaaattgaggcagtaattaatagcctaccaaaccaaaaaagtccaggacagacgaattcacagctgacttctaccagag

SEQ ID NO: 131680 - DNA, 1569 bp, Homo sapiens; identical to SEQ ID NO: 130834

SEQ ID NO: 131681 - DNA, 1005 bp, Homo sapiens
atgaacagggtaccaccagcatttgctaaaattacctggaaggaagttgacacgaaagggtgctttgatgaatgtgaaatatattacaacaaaccacagtttcctattagacaagaagtgacaggttaccgtaatccagctctgaagagagcagcagatctagcagatctcccagcgcagagctcaacctatgctaagggacagactgcctcctcaagtgggtccctgacccccgtgcctcctgacaaggagacacctcccagcagaggtcgacagacaccttatacaaaacagctccagctggcatctggcaggtccccctctgggacgaatcttccagaggaaggagcaggcagcaatctttgctattctgtagcctccactggcgatatgcagacaaacagagtctggggtggatccccagcaaactccagcagacctgcagaagagaagcctgacagtcaccaacatcaaagaccaaaggtagctaaagccacggaggtgaggaaaaaccagcgcaataaggctgaaaattccaaaaaccagaatgcctcttctcctccagaagatcacaactcctcaccaacaagggaacaaaacaggacagagaatgagtttgatgaattgacagaagtaggcttcagaaggtgggtgataacaaactccactgagctaaaggagcatgttctaacccaatgcaaggaagctaagaaccttgataaaaggttagaggaattgctacctagaattaccagtttagagaagaacataaatgacctgatggagctgaaaaacacagcacaagaacttcgtgaagcatacacaagtatccatagccgaatcaatcaagcggaagaaaggatatcagagtttgaagctcaacttaatcaaataaagcatgaagacaagattagagcaaaaaaacataaaaaggaacgaacaaagcctccaagaaatatgagactacatgaaaagaacaaacatatgtttgattgctgtacctga

SEQ ID NO: 131682 - DNA, 2175 bp, Homo sapiens; identical to SEQ ID NO: 129519

SEQ ID NO: 131683 - DNA, 507 bp, Homo sapiens
atggctgaaaaagaacagttccagtctgcaactcccagtgagatcaactcagaaggaaggatgtctctgaaagaaagacagcagccccagtcagaagcttatggatcaaactcctatctccctgggacagagcacctgggagaaggggtggctgatcacaactcattgccaccaagggaacaaaattggagagagaatgagtttgaagaattgacagaagtaggcttcagaaggtgggtaataagaaactcctctgagctaaaggagcaagttctaacccaatgcaaggaagctaagaaccttgaaaaaaggttagtctggcctattgaaccatcttttactgctgtgaccttcaaaaatgaaagctgtggttttgccctgagaagaagaaaaggagatttgaaatatgactcagattcttccctgcaaaaggctgggacccttgaaaactatctacgtggaaaagtgagagaacaaggggacacaagcaaagctgcccagaagtaa

SEQ ID NO: 131684 - DNA, 1603 bp, Homo sapiens; identical to SEQ ID NO: 129292

SEQ ID NO: 131685 - DNA, 348 bp, Homo sapiens
aggtctgtaagcttgcaggatttttcaggcaccaaggaaggtgggtgacagagatcagtacttcagcatataatcccaaagcctgccaggggcattagaggattcagaatcaagaggctccatctggggccatgaattccttccgcaggctccatagagccagagaactcccctggaacgaacttgtatctttataccaatcccacagcagaaggcctaggaaacagaaaggttcccatattggcagaattcaaaattaccttatgaaaaccttttgagaaggctgagaaggactctaggattgctacaaaccctatgcttaatccgccttctccatctccacgtaac

SEQ ID NO: 131686 - DNA, 828 bp, Homo sapiens
atggaagagaaaagcaaacgaagaggtgttttgtggagtcttctgatccttgccttgaagtttggagatgagatcagcagctccaagagggcagaaactgtgctcctgtttgctagccctgacctcatacctggtattcagtatgcaggaagaaggtttaggaggtgggagctgcaagctaaatttgccagagaactctggctgcagcacatagtccagggcagtatcagtacccctacatcctctggaggatctggcagaagaatcccacctgatggcaaggagacacagatatcaggtcatttccctctcaagcagagctctgttttcttaattaacagagagggtttttccctgccaaataatgcaggctttatgagaggtgctcagggtgatgatagagttaaacgcagtgatttatccatatcccaaggacacaggttgtcaacctctggtttagcatgctgcggcaagcctgaacagccccgaagtcatgggcgctacacagttgaagcctctcagaccgtgcaaaaagtgtcccaagatcttcagaaggagggcactgagaatggatggaggcaagacatagaaatctgggaaccctgcatgggctaccctgcagcaggactcacttttgaacaacaacagctcagggggaatggctatgctgcctctgtcattgtggtgaacacccacagggaggtaggcacccctgcatctgctagcactgttacagctgccacaccttggcacctccagtgcagtggactccaaatgtcgcagagccagataacaaagctggggcccaatacaagtcccccagagtaa

SEQ ID NO: 131687 - DNA, 966 bp, Homo sapiens; identical to SEQ ID NO: 130652

SEQ ID NO: 131688 - DNA, 394 bp, Homo sapiens
ggagtttagtgaccctatacatcatacctttgaccatatgtggagaactaaggaacataatgaagctggttggttgctcctaagttcagtggataaagtgatgaaagaaaatgatgaactcggggattctatctcccagcttcagaagcagatactgagcctcaaatctgccaagattgccctgagtgagagtctaatctcctgtagagaaagaactgaaattgtggaaaaatagacataagctcttatcatgttagtggctgacctgcaatgaaaggtgcatgcacagcctcaccatgcacagcctcgccaagtatctactgttaaagtgagggcattgattgttttgcaggaagtcacggacccttgatggagggatcggccacagctgagg

SEQ ID NO: 131689 - DNA, 1884 bp, Homo sapiens; identical to SEQ ID NO: 117487

SEQ ID NO: 131690 - DNA, 1181 bp, Homo sapiens
aacctaaatcacagccacagcagcttcatcagggacaatacagatcatcaaatactgagcaaaatggagtaaaagataataatcatctgagacatcctcctcgaaatgataccaggcagccaagaaatgaaaaaccgcctcgttttcaaagagactcccaaaattcaaagtcagttttagaaggcagtggattacctagaaatagaggttctgaaagaccaagtacttcttcagtatctgaagtatgggctgaagacagaatcaaatgtgatagaccgtattctagatatgacagaactaaagatacttcatatcctttaggttctcagcatagtgatggtgcttttaaaaaaagagataactctatgcaaagcagatcaggaaaaggtccctcctttgcagaggcaaaagaaaatccacttcctcaaggatctgtagattataataatcaaaaacgtggaaaaagagaaagccaaacatctattcctgattatttttatgacaggaaatcacaaacaataaataatgaagctttcagtggtataaaaattgaaaaacattttaatgtaaatactgattatcagaatccagttcgaagtaatagtttcattggtgttccaaatggagaagtagaaatgccactgaaaggaagacgaataggacctattaagccagcaggacctgtcacagctgtaccctgtgatgataaaatattttacaatagtgggcccaaacgaagatctgggccaattaagccagaaaaaatactagaatcatctattcctatggagtatgcaaaaatgtggaaacctggagatgaatgttttgcactttattgggaagacaacaaggctgcgcaactgttgggaagggcgatcggtgcgggcctcttcgctattacgccagctggcgaaagggggatgtgctgcaaggcgattaagttgggtacgccagggttttcccagtcacgacgttgtaaaacgacggccagtgccaagcttgcatgcctgcagaccaagacatttggaggaggtggtggtggtgctagaagtaatctcaatatgaatgctgctggtaaccgaaatagggaagttttacagaaagaaaagtcaaccaaatcagagggaaaacatgaaggtgtctatagagaactgggtacagaatatcccaaaacagcttaa

SEQ ID NO: 131691 - DNA, 447 bp, Homo sapiens
ttttttttttttttgttgttgctgccattgttattttacatgcattgaacgaatggccgagatctttggcgtcttacttactgatgggtagaggtaaccttctccattcatggctatatacaaccctgttttcactccctggatggcaacaacacgtagtcccactggtatgaggttgaagagtgctgtgaagataaacattgtctatcatgaatgggcaggaagaagcagggcagagtgtaattttttctttctgatttattttatttaagaaacatcatctttgccaagactttcgagaaattccaattaaagaacttagattttgctttataaggtaagaagtttctgctattggtaaaatgagtacttcagcttcaacctttaaatgtgagcagtcttgctgacagcattctgaagggctgatgcgacaataaacagaaccaa

SEQ ID NO: 131692 - DNA, 2322 bp, Homo sapiens
gtcaccctcgtcgactgaaagtgaaacctgattctgaaattttagttatagaaaatggaacagctttcccatttcaggtggaagttttagatgaatcagacaacataacagcacaaccaaaattgattgttcattgtaagagttgtaaagatgtggcacctgtggagaagactattaagttgcttcccagtagccatgttgcaagactacaaatattcagtgtagaaggacaaaaggcaattcagatcaaacatcaggatgaggttaattggatagcgggtgatattatgcataatcttatttttcaaatgtatgatgaaggagaaagagaaatcaatataacatcagctttagcagaaaaaattaaagttaattggactcctgagattaacaaagaacacttgctacagggtctgcttcctgatgtgcaagtaccaacatctgtaaaagatatgcgctattgccaggtttcattccaagatgatcatgtgtctttggaaagtgcgtttacagtaaggcgtggcctgtttaagagcttgtcagcatctgtggccttcacccaaaggtctgaaattgattccaagtgggatgtcacggccacttctcttgatgtacaggatctaaaagcaacactgagaacagtggatgggcagctacatgctgaagtgtggctggaggatgtggcacctgggaagagaaagcacagggtgaccaaagtccttgaagagggaggggtgccggtgctgcaaaccagtgaaagcccaggtcaagggaagagcaggagaaaggatggcagtgccttgagttttgtgatgcgtctcccacagtggaaggcatgcatgagctatatttcaaggggttgggcgcagcctgcagttggagatgatgtcatttttagccatgtgagtttgctcagaaggaagggactgggggcagaggggaatggggagatggtgtttaatgggaacagactttcagtttgggaaggtgaaacagttctggaggtggttagtggtgatgattacataacaacgagggtggccgattccctgaagggaggaagtgggtcctgggtctggggcttttccactttggctgcacttgacaacgacttggggacttttagaaagatgcttcctgcccttgaacattggactccaagtccttcagttttgagactcggactggctctccttgctcctcaagcttgcagacagcctattgtgggaccttgtggatcgtgcaaggagtttagtgactctatatataatacctttgatcatgtgtggagaaccaaggaacataatgaagctggttgtttgctcctaagttcagtggacaaagtgatgaaagaaaatgatgaactcagggattctgtctcccagcttcagaagcagatactgaccctcaaatattctaagattgccctgagtgagagtcttatctcctgtaaagaaagagctgaaattgtggaaaaacagacacaagctcgtatcatgcaagtggctgacctgcaacaaggaaatgatcagacatttcagggactactggacactggctctgagctgacgttgattccaggggacccaaaacatcattgtggtcctccaggaccaaaagtaagggcttatggagatcaggtaattaacggagttttggctcaggtccaacttatagtgggtccagtgggcccctggactcatcctgtggtcatttccccagtgccagaatgcgtaattggcatagccatacttaacagctggcagaacccccacattggctccctgactggtagggtgagggctattatggtgggaatcagctggcaaggccagcaatatacctttactgtcctacctcaaagatatatcaactttccagctttgtgtcataaaacagcaaaaagacacacagctaggaggtaaccacagattgcactagaagccaggatccagacaagcccctgcagacccaggaactacaactgccacaacatgaggccaaacccagactctagaccagactctgtgttctcagagtccagaagacaaagggtccaggattgccctaacagacccaggatccaggcccatcccagtagacccaaataccaggccagttccccatgcactgaggatccagtaccatccctgaagacccatgctcaaggtcagacaccatggacccaggaccctttcagactcaggctcaagggccaccccaagagcaagccagcccccatggacccaggcttcaggctagctcctgtgaatacagattccaggcccaaccccacccaggtaacacgtccacccacctgct

SEQ ID NO: 131693 - DNA, 1140 bp, Homo sapiens
atgaagagaggagccacaagccaaggaatgcaggcagcctctagagctggaaaggcccaggataactgtaagagcctcttccaagatgatgatgatgacgtggagaaaaaaatcaaatggttgctactagacttctctagagctacaagtatgctttcccaggtttctgctgcagccactgtttcatttaaagcactgcaactctattcagattatggaacaaaacgagaagatggggaaataatttgtctagatacagttagacagccataccaatttaattttgcaataaaacggatatcttctgcaactgaaagacaagtggtgaggcaaagcatctgtttaacagtaaacagagctaggcagcaccgaagggaggcaccaggtgccaacagaccacctgtggatacgccgtctagggctccccaaacaattgctgggggtggtctccccatttgctgtgcagcggtacagctgccactagcttctgaacagtgtgtggaagcactcttcaacctcataccagtgggactacgtgttgttgccatccagggagtgaaaacagggttgtatatagccatgaatggagaaggttacctctacccatcaaccaagacatttggaggaggtggtggtggtgctagaagtaatctcaatatgaatgctgctggtaaccgaaatagggaagttttacagaaagaaaagtcaaccaaatcagagggaaaacatgaaggtgtctatagagaactgatttgggatttttggagttggctgcttaatatgattagatccaaaactgctatggactctacttctaatagtgtggagaacactgatagtccttcacatgaactttttagagagttatgcaaaataaatgcatttactgtttttgattcatcactcatgagaggcaaggagtttagtgactctatacataatacctttgaccatatgtggagaaccaaggaacataatgaagctggttggttgcttctaagtttggtggacaaagtgatgaaagaaaatgatgaactcaggcatcctatctcctggcttcagaagcagatactgagcctcaaatctgctaagattgccctgagtaagagtcttattgttactggagggtccttgtcttag

SEQ ID NO: 131694 - DNA, 477 bp, Homo sapiens; identical to SEQ ID NO: 129518

SEQ ID NO: 131695 - DNA, 1071 bp, Homo sapiens
atggatggagatctccacaagggagtggctgtgttctggccaccagatgctgctggaggccacacctgctgcaggagcatggtctgcaggagcctgctaggaggagcacagtggaaatttcatagttttaggtgtaggatccgttttgaattaattttacatatgatacaagaaaggaatagcatcaacatcagccaaaaggacgtccacacagaaactccatctgaaactcaccatcatcaaagaccaaaggtagataaatccatgaagatgaggagaaaccagtgcaaaaaggctgaaaattccaaaaaccagaaagcctcttctcctccaaaggaacacaactcctggagagcaagggaacaaaactggacagagaatgagtttgacaaattgacggaagtaggcttcagaaggtgggtaataacaaactcctctgagctaaaggagcatattctaacccaatgcaaggaagctaagaaccttgaaaaaacattagaggaattgctaactagaataaccagtttagagaagaacataaatgacctgatgaagctgaaaaacacagcacgagaacttcgtgaagcatacacaagtatcaatagccgaattgatcaagcgaaagaaaggatgtcagagattgtagatcaactgaatgaaagaaatgacagggagaatggaaccaagttggaaaacactctgcaggatattacccaggacaacttcccctacctagcaaggcaggtcaacattcaaattcaggaaacacagagaatgccacaaagatactactcgagaagagtaaccccaagacacataattgtcagattcgccaaagttgaaatgaaggaaaaaatgttaagggcagccagagagaaagacacatcagtgaaacagaaagttaacaaggatatccaggaattgaactcagctctgcaccaagtggacctaatagccatctacagaactctccaccccaaatcaacggaatatacattcttctcagcaccacatcacacttattccaaaactgaccacatagttcattcgatactctgcgactctggttaa

SEQ ID NO: 131696 - DNA, 717 bp, Homo sapiens; identical to SEQ ID NO: 129516

SEQ ID NO: 131697 - DNA, 2303 bp, Homo sapiens
tcatgctgtgtttttcatctctatcaggtcatttatgtttttctttaaactggttatactagttagcaattcctctaaacttttttcaacgttcttagtttccttgcattgggttagaacatgctcctttagctcagaggagtttgttattacccactttctgaagcctacttctgtcaattcatcaaactcattctctgtccagttttgttcccttgctggtgaggagttgtgatcctttggaggagaagaggcattctggtttttggaattttcagcttttctgcactggtttttccttatcttcatggatttatctacctttggtctttgctgttgttgacctttggatggggtttctgtgtggacatcctttttgttgatattgatgctattcctttctgtttgttttcctttgacttcaagaatgaagccgcggacactcgcggtgagtgttacagttcttaaaggcggcgtgtccggagtttgttccttctgatgttcggatgtgttcagagtttcttccttctggtgggtcggtggtctcgctggctcaggagtgaagccgcagaccttcacagtgagtgttacagctcttaaggcaggagcgtctggagttgtttgttcctcctggtgagctcgtggtctcgctggcttcaggagtgaagctgcagaccttcgcgggcgggaaagcgtggctgttacaaacgcattctgacttgggggagcagaagttaactactttcataccaatctctctctctttaaaagtgatcttttggtgtaattggcctgaagcgaaaaccgcagcctatgatggtgaacaggccacgtgtgagcctgtgctcaaagccatgtttttggctgacacccacttgcttagggaattcctaggtcactggctggacaaattacgaagggaatggcaggtggagagagccttccagacagctctgtggttgctgcagccggaagtcgtcttcatcctggaggatgtctttgatgaagggaagtggagcacctctgaggcctgggtggatgatgtggagcagtttcggaaaatgttcagacacccaagtcatgtgcagctgaaggtagttgctggaaaccatgacactggcttccactatgagacgaacacatacgaagtagaacgttggaggaacagaaacaaccccagtttcattatgggtagcatcacacccacagactatgccctctccaagtgccacctaccacctgaggacgtggtcttgatcatctactgtggagtgaaattaccagatagaatagtagactctaaagcaggactcctgaaactacctgtgttgaagaatgtgatttccacccaactccaattcccatctatcatggaccaacttttggtctacaacttgttcaatgagacgagtccattggtcatgtgcctggatgtcatggcaatgtcaaatcgaggaaaccaccatctggctgcaacacgcctaaggaaggtattggatcacaactccttgccagcaagggaacaaaactggacggagaatgagtttgatgaattgacagaagtagtcttcagaaggtgggtaataacaagctcctctgagctaaaggagtgtatgttctaacccaatggaaggaagctaagaaccttgaaaaaaggttagatgaattgctaactagaataactagtttacagaagaatataaatgacctgatagagctgaaaaacacagcacaagaacttcatgaagcatacacaagtatcaatagccaaattgatcaagtggaagaaaggatatcagagattgaagatcaacttaatgaaataaagtgtgaagacaagattagagaaaaaagaatgaaaaggaacaaacaaaccctccaagaaacatgggactatgtgaaaagaccaaacccatgttggattggtgtacctgaaagtgatggggagaatggaaccaagttagaaaacactcttcaggatattatccatggagaacttccccaatctagcaaggcaggccaatattcaaattcaggaaatacagagaacgccacagagatactcctcgagaagagcaactccaagacacataattgtcagattcaccaaggttgaaatgaaggaaaaaatgttaagggcagctggagaaaaagaagatgaaactgacaacaatgagttcttcttgtggagccagaaagggaagagggccggaaccctgaacgaccacgtggaggaaagctgtccaccaaccaaaaatgcctgccttggaacacccattcattgctatgtgggcaagaaataa

SEQ ID NO: 131698 - DNA, 282 bp, Homo sapiens; identical to SEQ ID NO: 131660

SEQ ID NO: 131699 - DNA, 903 bp, Homo sapiens
atgtatatcaaccctccggctttgcggctttgtgtcatcatcttattcacagagatcttgatcacttttcacttccacaagatatgacgctggtcaactgcattgatgacattatgctgattggatccagtgagcaagaagtagcaaactcactggacttactggagagacatctgcatgacagaggatgggaaataaatctgactcaaattcaggaactttctaccttagtaaaatttctaggggtccagtggtgtggggcttgtccagatattccttctaaggtgaaggataagttactgcatttggcccctcctacagccaagaaagagacacaacacctagtgggcctatttggattttggaggcaacacattcctcatttgggtgtgtttctttggcccatttatcaagtgacccaaaaggctgctagttttgagtggggtccagaacaggagaaggccctacaacaggtccaggatgctgtgcaagctgctctgccacttgggccatatgacccagcatatgggtccacccatgttatcgcccaatgggcccataagcaaagtggccatggtggcagggatggatgtgacatacgggctcagcaacatggacttccactcaccaaggctgacctggctgcagctactgctgagtgtccaatttgccaacagcagagaccaacagtgagccctcgatatggcaccatttctcagggtgatcagccagctacctggtggcagcttgattatactgaacctcttccaccatggaaagggcagaggtttgtcctcactagaatagacacttactccagatatgggtttgcctatcctgcaggcaatgcttctgccaaaaccatcaaccgtggattcatagaatgccttatccacagccctg

SEQ ID NO: 131700 - DNA, 349 bp, Homo sapiens
ggctatatcaactctccagctttatgtcataatcttattcagagagactttgatcacttttcgcttctacaagatatcgcgctgggccattacattgattatattgtgctcattggatccagtgagccagaagtagcaaacgcactggacttgttgcccatttatcaagtgacccgaaaggctgccaattttgagtggggtccagaacaggagaaggctctgcaacaggtccaggctgctgtgcaatctgctttgccacttgggccatatgacccgacagatccaatggtgcttgaggtgtcagtggcaaatagggatgctgtttggagcctttggcaggctctcatag

SEQ ID NO: 131701 - DNA, 492 bp, Homo sapiens
cccatttatcaagtgacccgaaaggctgccaattttgagtggggtccagaacaggagaaggctctgcaacaggtccaggctgctgtgcaatctgctttgccacttgggccatatgacccgacagatccaatggtgcttgaggtgtcagtggcaaatagggatgctgtttggagcctttggcaggctctcatagccagagttcacggattcagcaatcaagaggtggaagtggaagtggcaccactcgccatcacccctagtgatccactagcaaaatttttgcttcctgttcccgcaacattacattctgctggcctagagacctcagttccagagggaggaaagctgccaccaggagttgcaacaacgatcccattaaactggaagttaagattgccacctggacactttggggtccttctacctttaagtaaacaggcaaagaagggagctacagtgttggctgctgtgattgcctcagactatagatga

SEQ ID NO: 131702 - DNA, 352 bp, Homo sapiens; identical to SEQ ID NO: 118591

SEQ ID NO: 131703 - DNA, 505 bp, Homo sapiens
aagacagatggatcttggagaatgacagtggattatcataagcttaaccaagtggccactccagttgcagctgctgtaccagatgtggtttcattgcttgagcaaattaacacatctctggatacctggtatgcagccatagatttgggaaatgtctttttctccattcctgtccataaggtccaccagaagaaatttgccttcagctggcaaggccagcaatatacctttactgtcctacctcagggatatatcaactctccagctttgtgtcgtcattttgttcggagacatcttgatccttttcccttccacaagatatcacagtggtccattacattgatgacattatgctggttggatccactcatttatcgaatgaccagaaaggctgccatttttgagtggggtccagaacagaaggctctgcaacaagtccaggctgctgtgcaagctgctctgccacttgggccatacgacccagcagatccaatgagattgaggg

SEQ ID NO: 131704 - DNA, 1557 bp, Homo sapiens; identical to SEQ ID NO: 131550

SEQ ID NO: 131705 - DNA, 838 bp, Homo sapiens; identical to SEQ ID NO: 118594

SEQ ID NO: 131706 - DNA, 1569 bp, Homo sapiens; identical to SEQ ID NO: 119655

SEQ ID NO: 131707 - DNA, 981 bp, Homo sapiens; identical to SEQ ID NO: 129814

SEQ ID NO: 131708 - DNA, 1219 bp, Homo sapiens; identical to SEQ ID NO: 117723

SEQ ID NO: 131709 - DNA, 2658 bp, Homo sapiens
atggagaacactgatagtccttggcatgagctgtttagggagttatccaaaataaatgcatttgacacacttgattcattgctcatgagaggcaaggagtttagtgactctacacataatacctttgaccatatgtggagaaccaaggaacataataaagctggttggttgcccctaaattcagtggaaaaagtgatgaaagaaaattatgaactcaaggattctgtctcccagcttcagaagcagatattgaacctcaaatctgctaggattgccctgactgagaggcttatctcctgtagaaaaagaactgaaattgtggacaaacagacacaagctcttatcatgctagtggctgacctgcaacagaagatgcatgcacagcctcgccagggagacctctggccttttaccagggtaactgtgcattgggaaaagggaaatgatcagacactttggggactactggacactggctctgagctgacgttgattccaggggacccaaaatgtcactgtggtcctccagttaaagtaggagcttatagaggtcagaagacagatggatcttggagaatgacagtggattattgtaagcttaaccaagtggtgactccaattgcagctgttgtaccagatgtgatttcattgcttgagcaaattaacacatttcctggtacctggtatgcagccactggcttggcaagtgcctttttctccatctctatccataaggcccataagaagcaatttgacttcaactggcaaggccagcaatatacctttacagtcctacctcaggggcatatcaactttccagctttgcatcataatcttatttggaaagatcttgattgctttttgctttcacaagatatcacactggtccattacattgatgacattatgctgattggatctggtgagcaagaagtagcaaacacactggacttattggttgattatatcggacctcctctatcatggaaagggcagacgtttgaccttactggaatagacacttactctggatatgggtttgcctatcctgcacgcaacactttttccaagactaccatccatggactcaaagaatgccttatccaccatcatggtattccatccagcattgcctctgatcaaggcactcgctttttgcctaaagaagtgcaaaatgggctcgtgctcatggaattcactgctaggattcacaggtccaggaatcaaggggtggaagtggcaccacccaccatcacccctagtgatccactagcaaaatttttgcttcctgttcccacgacattatgttctgctggcctagcagtcttagttccagagggaggaatgctgccaccaggagatgcaacaatgattccattaaactggaagttaagattgccacctggacagtttgggctcctcctacatttaagtcaacaggctaagaagggagttacagtgttagttgggatgactgacccagactatcaagatgaaatcagtctactactccacaacagaagaaaggaagagtccccaaagtctcatgtcattatagctatcagctcaaagtccaggatctcatcaactaagtcagatcccggtacggatgagatttctcagggtgagttccaaagttcagctccttatatggattctcttactatagagacctatgaaaatagaaatccaggttctctgcttctcacacatcaatatactatggtgaaacagcacagacacactcacctagactctcagacatgggcacagtcacctcgcgttcatcacaatgaaaacatagtgaactttcccaggatgagccgtgtgactagattgggtgagtccaggacatacagaccaaaatccaggaatgattctgagctgtggactgcagggatcctacctgtacttcctgtcagagcagaaagtgaagcggatacaggttcacctgggtctacaaatgcatccagggagagatacagcaactggctgggagaaagtagctggtgtctttggacaagcaacagggaagatggagcagcagttgcagggacaggggatcccagtgggtctggcttgagatgggacaatgctatagcaagaaatctgtggtcccagagtctgacacctcagagagaagcagcagttaagaaagcttccaagtccaggtatcggagatcatcgattctcgtcgatgcttccagcctcaattgccgtccgcacttcgcatccattggctacgctgtcgatcatcgtacatgctccgcctccatcgaggacaatcactaccacttgctcgtctcacagtgtgctttctcgtcctccctgtcgactgtgcccgtcgggtcgatcgatcttatctccgcatcagcgtcgtcagcagcgcatgtccgccaggtcatggctatcgcttcgtcttgttacgctcagcatttcgtcattatcgtcccgcggtcttgccgtggagagcttgatctaagcccatgttcgtcgacctgtagtgatcaacatgctatcctttcctcattgcttatttttgtcaggcttcatcctggggatgaagctgacttgatcatagtggataagctttttgatgtgctgctggatttggtttgccagtattttattgaggatttttgcatcaatgttcattag

SEQ ID NO: 131710 - DNA, 945 bp, Homo sapiens; identical to SEQ ID NO: 117726

SEQ ID NO: 131711 - DNA, 868 bp, Homo sapiens
atggtgattcccaccacatcctcattcacctctcccaattggcctgtgcagaagacagatggatcttggagaatgacagtggattatcataagcttaaccaagtgatgactccagttgcagctgctgtaccagatgtggtttcattgcttgagcaaatgaacacatctcctggtacctggtatgcagccactgacttggcgaatgcctttttctccattcctgtccataaggcctaccagaagcaatttgccgtcagctggcaaggccagcaatataccttcactgtcctacctcaggagtatatcaactttccatctttgtgtcataatcttattcagagagaacttgaccactttttgcttctgcaagatatcacactggtctgttatatcaatggcattacactgattggatccagtgagcaagaagtagcaaacacactggacttattggtgagacatttgcttgccagagggtgggaaataaatctgactaaaattcagggaacttctacctcagtaaattttctaggggtccagtggtgtggggcctgtcgatatattccttccaaggtccccgcaggtgaatcacagtggaggcctctaggattttggagcaaggccctgccatcttctgcagataactactctccttttgagagacagctcttggcctgttattgggctttggtggaaactgaacgtctgactgtggctcatcaagtcaccatgagacctgaactgcctatcatgaattgggtgctttctgaaccatctagccataaagtgggttgtgcacatcagcactccatcatcaaatggaagtggtatatacatgatcagtctcaagcaggtcctgaaggcacaa

SEQ ID NO: 131712 - DNA, 423 bp, Homo sapiens
  misc_feature (1)...(423): n = a,t,c or g
tgtatgttccttccagcattatcccacacccttaatatccattcccgtgcctgttctccaaatttctgcttatataaattagaaaactcaattcaagtgtagctcacctccccatgggtcacactctgaacctcacttctgtgggcccatcgggactttagttataggtctagaagcaaacaaaggtgttgagggtgctagaggagaatcgatattatcttgcctggcaactgcctcaggggaggccatcactgttgcctcaggcagcacagggtttatctcctcagacaaaggtggaaaggctgatggcagcatgggtcggggagaggatgttgccactattgnggatgccattttcctttctctttcttctgcctattanacctccactcctatnnnnnnnnnnnggaaggaaattggtgg

SEQ ID NO: 131713 - DNA, 643 bp, Homo sapiens
atggtgggaaaggccaaatggaagccattagagctgcctttacctagaaaaatagtaaatcaaaaacaacaccacattcctgaagggattgcagagattgctgccaccatcaaggacttgaaagatgcaggggtggtgattcccaccacatccccattcaactctcccatttgtcctgtgcagaagacagatggatcttggagaatgacagtggattattgtaaacttaaccaagtggtgactccaattgcagctgctgtaccagatgtggtttcatttcttgaggaaattaacacatctcttggtacctggtatgcagccattgacttggcaaatgcctttttctccattcctgtccataaggtccatcagaagccatttgccttcagctggcaaggccacaatatacctttactgtactacctcaggactatatcaactctctggctttgtgacataatcttatttggagggaccttgactacttttttgcttctgcaagatatcacactagtccattacattgatgacattatgctgattggatccaatgaccataaagtgggtggtgcacagcagcattccatcatcaaatggaagttgtatatacatgatcaggctcaaacaggtcctgaaggcacaa

SEQ ID NO: 131714 - DNA, 388 bp, Homo sapiens
aggccctttcaatctacttccgttgaaagcactcagcatgccaaggtgccatagtttggggtatcatgttctgaccccagcaacggctcagactactgcacaggaaacaggtacagagagggaagtggattgcaggggtttcagttggaaagacgtgacagtggttaaggagaggaaaaggggggcctggactcttccctgaaagggctgtgaattgggtgtagctcaatgtcacttacagaaagagccctcatggtagcattctgtgtgacgtcaagccccgcatcctgtagaccagtgagtgggtccacaggaagtccctgaggtgttctgagagcaatacatttacaaaaccttggggcaaagccagaaggacagtcgggggcta

SEQ ID NO: 131715 - DNA, 410 bp, Homo sapiens
acctaaagtcccggcaggcccctagatgtgaggttgagagtgtgactcacgaggaggtgtactacactcgaaaagaactgtttgagttctctaatttatatagaaagaaatctggagaacagatacgggaatggatattaaggaagacagatggatcttggagaataacagtggattatcgtaagcttaaccaaatggtgactccaattgcagctgctgtaccagatgtggggtttcattgcttgagcaaattaacacatctcctggtacctggtttgtgtcataatcttatttggagagaccttgattgctttttgcttccgcaaaatatcacactggtccattacactgatgacattatgcagattggatccagtgagcaagaagtagcaaacacactggacttattg

SEQ ID NO: 131716 - DNA, 526 bp, Homo sapiens
accacgtggtagaaataggaggagaaagacattccaagagagaagaatgacactgaatgaaagcccagagaaaataggcaaatggattgaatgctatgggcacccacctgcctctaagctggtggaaatttatattcatacagtctttgtggaagacaaattgtcaatatgtatcagaagctttaacaagaaggcagatggatcttggagaatgacagtggattattgtaagcttaaccaagtggtgactgcaattgcagctgctataccagatgtggtttcattgcttgagcaaattaatacatctcctgatacctggtatgcagccattgacttggcaaatgcccttttctccattcctgtccataaggggtatatcaactctctggctttgtgtcataatgttatttggagagaacttgattgcttttcacttccacgagataccacactggtccattacattgatgacattatgctgattggatccagtgtgcaagaagtagaaaacaaactggacttactg

SEQ ID NO: 131717 - DNA, 433 bp, Homo sapiens
gacacctctagcttctaccagggcaactgtggattggggaaatggaaatgatcagacatttcagggactactggacactggctctgagctgacattgactccaggggacacaaaatgtcattgtcgttctccagttaaagtaggggcttatggaggtcagtggggtccagaacaagagaaggttctgcaacaggtccaggctgctgtgcaagctgttcttacacttgggccatatgacccatcagatccaatggtgcttgaggtgtcggtggcagatagggatgccgtttggagcctttggcaggcccctgtaggtgaaacacagtggcagcctctaggatttggacctgcactgatagcttcttggggagttcactataatcaatcgatagaggaagagaagacaagggcctggttaataaactccccttag

SEQ ID NO: 131718 - DNA, 1506 bp, Homo sapiens; identical to SEQ ID NO: 120217

SEQ ID NO: 131719 - DNA, 756 bp, Homo sapiens
atgaagtcgggctcggagctgggaggctggtccctgggacgctggacccacgatggaattgacatcaacaacaactttcctgatttaaacacgctgctctgggaggcagaggatcgacagaatgtccccaggaaagttcccaatcactatattgcaatccctgagtggtttctgtcggaaaatgccacgatttgtgagggcagcaactgcatctttgaagctccctggattcatcctgtggtcacttccccagtgccagaatgcataattggcatagacatacttagaagctggcagaacccccacattggctccctggctggtaggaagacagatggatcttggggaatgacagtggattatcataagcttaaccaagtggtgactccaattgcagctgctgtaccagatgtggtttcattccttgagcaaattaacacatctcctggcaactggtatgcagccattgacttggcaaatgcctttttctccattcctgtccataaggcccaccagaagcaatttgtcttcagctggcaaggccagcaatatacctttactgtcctacatcaggggtatattaactctccggctttgtatcataatcttatttggagagatcttgatcgcttttcacttccacaagatatcacattgatccattacattgatgacatgacactgattggatccagtgagcaagacgtagcaaacacactggacttattggtgagacatttgcttgccagaggatag

SEQ ID NO: 131720 - DNA, 745 bp, Homo sapiens
agtgggtccctggactcatgcagttgtcatttccccagtgccggaatgcataatgggcacagacatacttagcagctggcagaacctccacattggctccctgactgaaagggtgctggttttgagtggggtccagaacagaagaaggctctgcaataggtccaggctgctgtgcaagctgctctgccacttgggccatatgacccagcagatccaatggtgcttgtggtgtcagtggcagataaggatgctgtttggatctttcatctttcaggatcggatcgttggcgtcgaacttatcgctgtctttaaagacacggcccgcgtttttccagctgtcgattgagttgtcgccgaccttttgataaaacatgtagattgatgtgtcatcagcgtctttcgggcttcccgcaagagcaaacacaacgtgatagccgttgtattcagctactgttccgtcagcgttttgcagcggccagctgtcccacacatcaagtccttttgcagactcaatatttttaatcgttgattgatcgaattgaggcacttggtatttttcgttttgctgctgtttagggatctgcagcatatcatggcgtgtaatatgagagacgccgtacgtttctttgtatgctttttggttattttctttcgcgaaggcttgagtcgctcctcctgccagaagtgcagtcgtaaaagtcagaactgtggcttgttttacaatttttttgatgttcatgttcat

SEQ ID NO: 131721 - DNA, 1322 bp, Homo sapiens
atggatggagttggaagccattatcctcagcaaactaatgcaggaacagtaaaccaaacaccacatattctcacttgcaagtgggagttgatcaatgagagcacggacacatggcaagcacttgaaaaccaccccaattgttccaccaatgatgagactggtatgggaaatatgtggcacatatacaccttggaatactatccgcccatacaaaatgatgactacagctcctttgtacggacatcgatgaagctcgcaaccattattctcagtaaagtatcgcaagtacaaaaacccagacaccgcatgttctcactcatagaagacagatggatcctggagaaagtggattatcgtaagcttaaccaagtggtgactccaattgcagctgctgtaccagatgtggtttcattgcttgagcatattaatatatcccctggtatctggcccaccagaagcaatttgccttcagctagcaaggccagcaatttaccttactgtcctactcacgggtatatcaactctctggctttgtgtcataatcttattcgaagagaccttgatcacttttcccttccacaagatatcacactggtccattacattgatgacattgtgctgactggatccagtgagcaagaagtagcgggatcctctagagtcgacctgcaggcatacaaaggtgtaaatacgtatggcagtggggctcggcgagtggagtatgccactactggggatggggaagctgtctcttctggcaaaaaaagttcatcagagtttacaaactcagtatccccagcttcatcagggtcctcccacacatccccattccaagttgcagggtcccattcttttccaatcagtgccctcactttaacagtagacacctggtgaggctgtgcatgcacctttccttgcaggtcagccacttgcatgataagagcttgtgtctgtttttccacaatttcagctctttttctacaggagataagggtctcactcaggtcaatcttagcagatttgaggctcagtatctgcttctgaagccaggagatagaatccctaagttcatcattttctttcatcactttgtctacagaatttaggagcaaccaaccagcttcactatgttccttggttctccacatatgcgcaaaggcattatgtatagagtcactaaactcctcgcctctcatgtgcaatgaatcagaagtgtcaaatgcatttattttgcataactctctaaacagttcatgccaaggattatccgtgttctccatactattagaagtagagtccttagcattttggggtctaatcat

SEQ ID NO: 131722 - DNA, 1364 bp, Homo sapiens
tttgtggtgataactgtgtgtttgaaagctggattggagacatcatattggacatggacaatgagtttagtgactctatacataatacctttggccatatgtggagaaccaaggaacataatgaagctggttggttgctcctaagttcagtggacaaagtaatgaaagaaaatgatgaactcagggattctatctcctggcttcagaagcagatactgagtctcaaatctgctaagattgccctgagtgagagtcttatctcctgcagggaaagagctgaaattgtggaaaaacagacacaagctgttatcatgcgaatggctgacccgcaaggaaaggtgcatgcgcagcctcaacaggtgtctactgttaaagggaggacattgattggaaaagaatgggaccccgcaacttggaatggggacgtgtgggaggaccctgatgaagctggggacactgagtttgtaaactctgatgaaccttttttgccagaagtaacagcttccccatccccaagagacctctggccttttaccagggtaactttgcactggggaaagggaaatgatcagacattttggggactactggacactggctctgagctggtgatgattccaggggacccaaaatgtcattgtggtcctccagttaaagtaggagcttatagaggtcagaagacagatggatcttggagaatgacagtggattattgtaagcttaaccaagtggtgactccaattgcagctgttgtaccagatgtgatttcattgcttgagcaaattaacacatttcctggtacctggtatgcagccactggcttggcaagtgcctttttctccatctctatccataaggcccataagaagcaatttgacttcaactggcaaggccagcaatatacctttacagtcctacctcaggggcatatcaactttccagctttgcatcataatcttatttggaaagatcttgattgctttttgctttcacaagatatcacactggtccattacattgatgacattatgctgattggatctggtgagcaagaagtagcaaacacactggacttattggttgattatatcggacctcctctatcatggaaagggcagacgtttgaccttactggaatagacacttactctggatatgggtttgcctatcctgcacgcaacactttttccaagactaccatccatggactcaaagaatgccttatccaccatcatggtattccatccagcattgcctctgatcaaggcactcgctttttgcctaaagaagtgcaaaatgggctcgtgctcatggaattcactggtcttaccatgttccccattatcctgaagcagctggattga

SEQ ID NO: 131723 - DNA, 1206 bp, Homo sapiens
atgggggatccttctagacgtcgaacatgcagggctatgcaagccaagtatccattggtttttaaagggtgtggtgtatgttggggttctctagatccaagatgcagggttgcaagccaagtatggccaataccaaaacgcctctcccgcggttggccgtttcataatgcagttggcagacaggtttccgactggaaaagcgggcaggattttgccgatttcggaaccacccatcaaacaggattttcgcctgctggggcaaaccagcgtggaccgcttgctgcaactctctcagggccaggcggtgaagggcaatcagctgttgcccgtctcactggtgaaaagaaaaaccaccctggcgcccaatacgcaaaccgcctctccccgcgcgttggccgattcattaatgcagctggcacgacaggtttcccgactggaaagcgggcagtgagcgcaacgcaattaatgatactttgccttttaccagggtatctgtgcaatggaaaaagaaaattatcagccattcagggactattggacaatggctctgagctgagtttattcccagagaacccaaaacgtcattgtggtctcccagttaaagtaggggcttatggaggtcagaagacagacagatcttggagaaagacagtggattattgtaagcttaaccaagtggtggctccaattgtcgctgctgtaccagatgtggtttcattgcttgagcaaattaacacatctcctggtacctggtatgcagccattgacttgacaaatgcctttttctccattcctgtccataaggcccatcagaagcaatttgccttcagctggcaaggccagcaatatacttttactgtcctacctcaggggtatatcagctctctggctttgtgtcataatcttattcgaagagaccttgatggctttttgcttctgcaaaatatcacactgctggtccattatgttgatgacattatgctgattggatccagtgagcaagaagtagcaaatgcactggacttattggtgttttctgaccatctagccataaagtgggtcatgcacagcagcattgcatcatcaagtggaagtggtatatgcgtgatcaggctcaagaaggtcctgaaggcacaacctgcaccaatggcctcatggggggttctctatgatcagttgacagaagaagagaagattagggcctag

SEQ ID NO: 131724 - DNA, 1374 bp, Homo sapiens; identical to SEQ ID NO: 117725

SEQ ID NO: 131725 - DNA, 1765 bp, Homo sapiens
atggcttcccctgaggcagttgccagtcaagataatgatggtttttctcagaagccacccccaacacctctgtttgcctctagatctgtaaatagactgaagtcccagcggacccctagaggtgaggttgaaagtgtgaccgatggggagaagacagatggatcttggagaatgacagtggattactgtaagcttaaccaagtggtgactccaattgcagctgctgtaccagatgtagtttcattgcttgagcaaattaacagtctcctggggtacatcaactctccaggtttgtgtcataatcttattcagagagaccttgatcgcttttggtttccacaagatatcacactcgtgccttacattgatgacattatgctgattcgatccagtgagcaagaagtagcaaacatactggacttattggtgagacatttgcatgccagaagatgggaaataaatccaactaaaattcaggaaccctctacctcagtaaaatttccaggggtcccttggtgtgggacctgtcaagatattccttctaaggtgaaggataagttgctgcatttggcccctcctaccatcaagaaagaggcacaatgcctagtcagcctatttggattttggaggaaacacattcttcatttgggtgaatcacaggagacacctctaggattttggagcaaggccctgccatcttctgcagatacctactctctttttgagagacagcttttggcctcttactgggctttggtggaaactgaatgtttgactatggatcatcaagtcaccatgagacctgaactgcctgtcatgaactgggtgctttctgacccatctagccataaagtgggtcatgcacagcagcattttgtcatcagatggaagtggtatatatatgatcaggctcaagcagccacccttgtaatcgcaaaatgggcccatgaacaaagtggccacggtggcagggatggaggctacacaaggactcagcaatatggacttctactcaccaaggctgacctggctacagcgggcaaagttttccagaaggctgtgtaagctctgaattagcattcaatatatggtactctttctctcatagccaggattcacaggtccaggaatcaaggagtggaagtggaagtggcaccactcaccatcagccccagtgatccaccagcaaaatttttgcttcctgttcccccgacattacgttctgctggcctagagttcttagttccagaggaaggaatgctgccatcaggagacacaacagttccattaaactggaagttaagattgccacctggacactttgggctcctcttccctttacatcaacaggctaataagggaaggcttagcccccattctcgggaaaggggtacttctgtctttgcctcctccaattcccaacctgtcacagctctgaacaatgagccagcaggccctaataagagagatattggcaaagccaagggattgaaattccaccaccctgggccccacaggcaggagagagacatgctggagcaatgctatgaccttggggctatccagtgggaaagcaatggaaccatcttatcaagaagcaaggaaggcattgaaattggacctgctttccatcaggcacacagaaacatcactctccatcagttaggccggagacagaaggagctgaccagaggccacggcattcctgggctagacgggaacccactaactggaattgcctggtctcccatgcaaaccttgtccc

SEQ ID NO: 131726 - DNA, 522 bp, Homo sapiens
tcaagctgtcagcttcatcacactgtttccaggtaaagagaaggagcccttgtttcctgggtaaagagaaggagcgttgtttgctgacccctggtccacagcctgccgtggtcgcctcgctgtgctggcctttgtgttgctgtcccctccttccctcctttttggcattgtgctcccttcaagtggccccctgtcattcaggtggaatgtggaacgagattgcccagctgtggatttgaacatcattaaagtcaacaaagggttaaaagttacttcctctgatggatttaaaattgccgcatacacgcaaacaagtttttcaaactgccccattttatgtttattataagaaatgtacctgctgaatgggctagaatttgctgatgactggtcagtgcattttcccagcagggcagtcttcagttcttttgatacaactttgagagcttccttactttctggtacaacaagatgtttcaggttcatcttgtgcgtttcctgccccagacctgaatagggcat

SEQ ID NO: 131727 - DNA, 368 bp, Homo sapiens
gcggccgcctactactactatacggctgcgagaagacgacagaagggagagatacaggcctcgcgggactcaccagtggtgactaaaaagcccttgggccttgaataaacatcagtggcagccaagcggtagctgccctgagcctagagtgataatggccatagggagagacttctgcttgaggaaaggagaaggaaaagtaaagaggactttgtcttgcaacctggtaaaataagcaccaagaagattccttaaagcctcccatcccaggccctagctcttggacggcatttctaaacccaccttgggccagaaggggacctgctgcactgaaaaaaaaaaaaaaaaaaaaaaaaagggtcgtatcg

SEQ ID NO: 131728 - DNA, 1582 bp, Homo sapiens
atgggcaaagacttcatgactaaaacacaaaaagcaattgcaacaaaagccaaaattgacaaacgggatctaattaaactaaagagcttctgcacagcaaaagaaatgattatcagagccacaaaagaagtaatagaacgggaagcaccagggatggccctggcaatgctgatgggatcacttaatgttacacctctgggcatgctctctagacaaacagagagccaaatcatgagtgaactcccattcacaaatgcttcaaagagaataaaatacctaggaatccaacttacaagggatgtggaggacctcttcaaggagaactacaaattactgctcaacaaaataaaagaggatacaaacaaatggaagaacattccatgctcatggataggaagaatcaatatcgtgaaaatggccatactgcccaaggttgttgtagctcctattgtttgtgatatatttatctattcgccttcatactggagttatgattgtgtgtccagagttggttccttccggtgggttcgtggtctcgctgacttcaagaatgaagccgcggacctttgcagtatatttgttccttcagacacttgtgatgcttcccatgggttaaggcagggacaggtctactgccagggcatgcaaaatgatggaaagctggctgttcaccttgatctcactttttccaatgttaaaacagaatgctttcaattcatactgccagctctacctcatgccattgaccttttacgtgatgccattgtaaaagtaaaggaggtgcatgatgaacttgaagatttgccttccccacctccccctctttcccctcctcctactaccagcccccataaacagacagaagacaaaggagttcaatgtgaggaagaggaagaagagaagaaagacagtggtgttgcttcaacagaagatagttcctcatcacatataactgcagcagccattgctgccaagaagcatccattctacaccagtcctgctgttgtcatggcacacggtgaacagcccatccctggtctcatcaattattcccatcattcaacagatgaacgggctcagggcagctaccgcttggctgccactgatgtttattcaaggcccaagggctttttagtcaccactgcagttacatctccttcagaggcctatctaagggtccccaacaaaagggaccatcggccaagcctccagttgcatgaccgtttggaggttgatggcctgaaggtgacaagagagaaaccaggttattagaaaacttgtatcaaaatgaaacaaggggcaggtgaggacagctcaaaaatctcgtgtcctttgaccagtctgtacagggagaagggggaccaaaagcttgaccggtaagaaaaacttttacccttttgctagcatttcagacttctgggttcctgtcccctgagctcaatcctaagccaatcagtttaaggtttgggaaattaactcttctcagtttggaagatgtatccaaagggagtgtcccatagtatggagacacagttacctatctgtgaagagaggacagggaaggaaaaaggaaaaaaaaaaa

SEQ ID NO: 131729 - DNA, 397 bp, Homo sapiens
  misc_feature (1)...(397): n = a,t,c or g
cgatcacctgaggtcgggagtttgagaccagcctgatcaacatggagaaacctcgtctctactaaaaacacgaaaaaattagctgggcgtnngtggcgcatgctcattcacgtacatgggagagtctacaaagtcacacgtattcataggttaagccacatgctgacaaatgtcataagaagaccctacacttttaccttggccgatccctcccctcagtgcaagctctgtgcaagagtgaacttgaactytcactcagtgcaagagtgaacacacactttgtgccggctttaaagaacccagcacaaagccagtctgcatggcctacagacatattttggctgggacaatgattacttgcttttctttttgtttttcttgtatttgcctctaagct

SEQ ID NO: 131730 - DNA, 1979 bp, Homo sapiens
ttttaagctcatcacgtgttgttagcattagtgtattttatgtgtggctcaggagcattcttcttccaatgtgggcctgagaagtcaaaagactggacacctgtgcactcaatcaaaaggctattccttctggaagcaattgtaaagaatttctcacattatcttgacatgaaaaccaatggatagtgggacagaatgcaaaatcttcaagaatttttgttgttgttgttgtttttgagtcaaggtcttgctctgtggcccaggctggagtacactggggagatcagagctcagggcaggatcaagggctcctcccgcctcagccacagtagtagctgggactacagatgcccacaaccacccctggctaatattttattttttgtaaaaatggggtctcactatattgcccaggttggtctcaaactccttgactcaagggatccaggaaaggataacaggcgggttcctggcaagtcatttctccctcaggccttcggtttcctcacctacaagatgagagggctgcaccagatggaaattcagggggtaaggggatgtcctcgcgcagcccacccccacccccacgggaccctggagcctccatcccagttcccaccacgcacctgctccacaaatcctgcccaaggacgccagtagagccggcagccgagtctgctgctcccgccctcagagccgcggcggcggggacaaaaatcctcggcggcgggggcaaaaagtcgcggtggcaaaaagcggcggcgacgggggcaaaaagtcgcggcagcaaaaagccgcggcggcggggacaaaaagccgcggcggcgtgggggcagaaagccacggcgggcaaaaagccgcggcggcaaaaagccatggcggcgagggtgcaaaaagctgtgtcggcggtggggcaaaaagcctggtcgggaaaaaagccgcggcagcggcgaagggcaaaaagccgcggcggcggagggcgaaaagtcgcggcggcgggaggaaaaaagccgcggaggtcaaaaagccgaggcagggggggaaaaagccatggcagcgaaaaagccgcggcggcggggggggcaaaaagcggcggggggcaaaaagcggcagggggcaaacagccgctgcaccagttgggggaaaaagccgcggcgggcaaaaagccacggcggcaaaattcgcagaggcgaaggtcaaaaagccgcggtggtcaaaaagccttggcgcttggggggcaaaaagccgcggcgggcaaaaagcggaggcgcggccatgcagactggctttgtgctgggttctttaaagccagagaaaagtgtgtgttcactcttgcactgaatgaagttcaagttcattcttgcacagaggttgcactgaggggagggatcggccaaggtttttcccgccgtggcttcttgccctgccgccccggcattttgccgtcatggcttttggccgaggccaccgcggctttttacgcctttccgcccccgccgccgcggcttttttccccctccgccacaggtttttccagccgcggcttcttgcccccactctgcagccagcatagagctgcgctgcgctcggccccgatgggagagaagaaggagagcggtggagggggtgacgcggctatcgcggagggaggcgcaggggccgcagccagccgggtgctgcagcagtgcgggcagcttcagaagctcatcggcatctctcttggcagcctgcgcgggctgcgcaccaagtgcactgtgtccaaggacctcacccagcaggagatacggaccgtgcaggaagaagcaaatgggtttgctttcctagctctgtccagtaccttagggaccctgagaactggagagattcttggagagccatctggtgtatgtcatgggtgggccttgtttgaaggtcagtctgcccagtgggctggctcagcccgaatgaactgtcttgaatctttggagatgtctgggtag

SEQ ID NO: 131731 - DNA, 415 bp, Homo sapiens
tttccggggggagccgcaacccggaaatgaatgagttgtcagggcttggtatcctggatggggtcaggggtcggagaaggagtggcagtgggatcagcaggaagctctcggtagggtccgggggtcgaaggtcacaggtgagtgggaggggcgggccggacctgaggggaccgggcagaacggagaggggcctagggggatactagaggtgggtgggaccacagcgccattttgtctagcagagggggagtgggggcctggaggccatcctcaccatcttctgtttcctccgtcgccgcctcggccgccgcctcagcctccaccgacgccaccagagccgccttcttagccgccgcctcacagtaacttccagcctcggcacagcacgaaatcgtcgcgccggtacttagtgccg

SEQ ID NO: 131732 - DNA, 975 bp, Homo sapiens
atggccacgctctggctgacagaggatgaggcaagctctacaggtggcagggaacctgtcggcccttgccggcacctgccagtctccactgtgtctgacttggagttgctgaagggactccgagcacttggtgagaatcctcaccccatcacacccttcaccaggcagttgtaccaccagcagctggaagaagcccagattgctcctggcccagagttttcagggcacagcctagaactggctgcagccctgcggacgggctgtattccagatgtccaggcagatgaagacgcgctggcccagcagtttgagcagccagatcctgccaggaggtggcgggagggggtcgtgaagtctagcttcacctatctgctgctggaccccaggtggtgcctagtggggtatgttggtgtgacagggaccaccaaagatggcatagattccatcgtggccagtgagatggaaggtgatggaccctaccaggattggcatgaagttaacccacctatgcctgccagtgttgacataggcaccttttctgttttctatagccctgaaggcagcagtgtggataagcccaccccacaggaagtggctttccagctccgaagctatgtccagcgtctccaggagcgccgttctctaatgaagattctctcagagcctggccccaccttggcacccatgcccactgtgccccgtgcagaagccatggtgcaggccattctggggacccaggctggcccagctcttccccgactggagaagacacaaattcagcaggacctggtgccgcaagggtacaaatgggctgtggccactgtgtcagtctggtaccgagatgagttgtatcatcaggctggaaacgctgccaagaagagagaccaggagcaagtggagctggaaggcgagagctccgcacctccccgcaaggtggcgcggaccgacagcccagacatgcacgaggacacttaa

SEQ ID NO: 131733 - DNA, 492 bp, Homo sapiens
atggcagattttttgaaaggactgcctgtctacaataaaagcaattttagtcgatttcacggggactccgtgtgcaaagcctcgaaccaacggccctcagtctacctgcccacccgagagtacccgtctgaacagatcatcgtgaccgaaaagacaaacatcctcctgcgctacctgcatcagcaatggacaaaaagaacgctgccaagaaggaagaccaggagcaagcagaggaagctcacctatggctactgccactacaggtccacagggagtaatgcccggctaccactgatgttcattaagacccaagggttcttcagtcggcttgtggtagatgctgcctggcctgggactcacccttcaggacagtgggctcccttctggcccaaggcaggtccagaattactgtccaggagccaaggctttgaatcagggacctcaagagcccgcttgatgttctaccccactatggctgcgcctgtacctaag

SEQ ID NO: 131734 - DNA, 755 bp, Homo sapiens
  misc_feature (1)...(755): n = a,t,c or g
aggaatcggggaaactggccccgatgnaaggcgaanggtccggcagggacaatgttgctttttttaaaaagcatctaccaacatcacactaactgggtctgatgtgccctgtagccaaggcttgatagcaggtgtagaggatgaaataagagctcaaggaaaataaatacatcggctcctatgaggttggaaagtggtgtggaacgcaagggtgtggatgggccggcagggaggcgggcgggcggggtgcttaacacatggcgggcaaggcgggtgggcgaaccgaaggaagcaagacctgggcaggaggcgcctgtggagttgagagtcttaagtgtcctcgtgcatgtctgggctgtcggtccgcgccaccttgcggggaggtgcggagctctgcgccttccaagctccacttgctcctgggtctctcttcttgggcagcgttctttttgtcccattgctgatgcaggtagcgcaggaggatgtttgtcttttctgtcacgatgatctgttcagacgggtactccgcgggtaggacaggtagactgagggccgtcggttcgaggctttgcacacggaagtccgcgtgaaatcgactaaaattgcttttgttgtagacaggcagtcctttcaaaaaatctgccatcttctgtttccgtccgtcgccgcctcggccgccgcctcagcctccaccgccgccaccagagccgccttcttctcgtgccgaattcctgcagccggaggcgaggtcaatt

SEQ ID NO: 131735 - DNA, 1263 bp, Homo sapiens
ttaacgactccaccacccaccaactcctccaaaagggagagacacagccaaagcatcccactggggcgttctctttcgcacacggacgctcccgcactccctggccctttctggagcgacgctccccgactgccttttccgcgagaagacagcctgtgccccactgcctgggacgagggtttcagcccccgctacttcactacttagacctgtcactttaactctttgacctatactctcctgacctccggtacccatttggtcaaacctactgcctgtctgtcctctttgctgtgaggatgtcaacctgctgctcctcatactgtcttctggtcccctctggcctttgagatgatgtcctgtctgtccattaggcatccccctggcagaagcttctgagaccacagtcagtataattggtgatctggtggtctgctgggggtctactgtgtcccctccagttatactcccttgtcttggttcttgctgttccattgtaagaagaacctggagaaacccacctgaaagcttggtattcctggccaccttatctttctcattttttaaagaagtcatatagccattgatataattctgatttaaaatgcgaccccagcagcctgcacccatgtcactgtggagggtgctaaagtcttcagaagaccaaagcttcttcccagtcaactttgcatcttttgctgaatgggttccaggataatgagccctttggtattttaccctaatggtgcgggggggtgtgtttaagagaccaccaattgggatcactacttttgattttggcaaacctggaataaagacaactggactttctctcctgccttgtgcaaagggagtgcttttctcatgtacatgaatttttacagcagcacagcattcctcacctgcattgccgttgatcggtatttggctgttgtctaccctttgaagttttttttcggggcggttgtatgctttttggttattttctttcacaaaggcttgagtcgctcctcctgccagaagtgcagtcgtaaaagtcagaactgtggcttgttttacaatttttttgatgttcatcttcatgtcgggtggtgatggactgttttttgcgatctgccgtttccatcctcccgagtggactagtgggtaggcctggcggccgcctggccgtcgacatttaggtgacactatataaggatccgcggaattctttgctctgggactcaaatccggtggccaattactaatcttcagtttagtcat

SEQ ID NO: 131736 - DNA, 391 bp, Homo sapiens
atggtggaacaagggaaaggaggttggtccacatgtaggcttgtgatacccaagcatgattctggagcaagaggcagaagggatgagtgtgaagagctgtactggttcatgggcatcttgcctgaaaatagcagggccaaggaagagcttggaacaaagtgggcagcagcatctgacttcagcagccctaagtgtttaggcaaacactcaggcttctttcccttgcctacgctcattttggcttggctggctgtcttggggcagaatagcaggaaatatagggcgctagtcgcgactagcagggctgagccttacaggaagtggactcatcatgcctttaccacaggtggttggcacctgcagggagccgcacctggttacagaccccaag

SEQ ID NO: 131737 - DNA, 697 bp, Homo sapiens
gccggggctcaacccggagtgcacgccttgcaactcaagcccgtgtgcgtgtcggacagcctcaagaagggcaccaaattcgtcaagtgggatgatgactcaactattgttactccaattattgtgaggactgaccctcagggatttttcttttactggacagatcaaaacaaggagacagagctactggatctcagccttgtcaaagatgccagatgtgggagacacgccaaagctcccaaggaccccaaattacgtgaacttttggatgtggggaacatcgggcgcctggagcagcgcatgatcacagtggtgtatgggcctgacctcgtgaacatctcccatttgaatctcgtggctttccaagaagaagtggccaaggaatggacaaatgaggttttcagtttggcaacaaacctgctggcccaaaacatgtccagggatgcatttctggaaaaagcctatactaaacttaagctgcaagtcactccagaagggcgtattcctctcaaaaacatatatcgcttgttttcagcagatcggaagcgagttgaaactgctttagaggcttgtagtcttccatcttcaagggtggaaaaagctaatgaggctgcgaaaagtgagcagagctgtggaaaggctcccccaaaacacccccaccttcattttataaagcaaaataaaatgcttgaacctg

SEQ ID NO: 131738 - DNA, 891 bp, Homo sapiens
atgggccctcctgggtgggctatcacctcccaagcacttccagctctccatagtgttagggcagttgcagtagcaaaagagaaatttctgaagaaggctgctacagatactgctgcagcagtatcttctgttgccatccagattaccatttccattctcagccttctgaagaaggctgcagttggaaataaagcatgtaaaagctgggaatgggagcacagaccctgcaaaagggacagaggtggcaactctggtggcagcagcagtatctgctacgtcctcttgggttttataggcaccagcaaaacacatcttttgttaaaatggtggccttctgacgggaagggcaggtctactactgaggtcaaaattcatgtgttatttttaaacgagagaaaaggcatctgtgattgtgcctctgattgggtggcatccaaaatcttgtttctcaggacagccagccaagccaaaatgagcgtaggcaagggaaagaagcctgagtgtttgcctaaacacttagggctgctgaagtcagatgctgagggcaaagggcaaccattaaacttcttcaagcttgattcccttactgtttctcctcttccagcaaatattttggttgtcattgctgtagagatgaagaaacctggacatatgcttgacttactcatgtctggtttttccaccgtttcttcacagagggagacagagctactggatctcagccttgtcaaagatgccagatgtgggagacacgccaaagctcccaagcacattatgaccattgctggagacaaggatgaacagagagggatgaatgatgcccagaaaggtgcctgtaaccaagactgtggttctcaggaagccagagacgtccaggattcagagatgtga

SEQ ID NO: 131739 - DNA, 1669 bp, Homo sapiens
ccatgaccatgcattacgagattccggtccgtacccggagatcaaaagggacgacataactccctcagaacgcctggtgaacaacatgcctcactgaacaggtgctatttaagctgatatctcaatgactaattatgcaaggattgagaggaaccatttagggagaggaaacagcaactccaaagaccctaagctacgagagagctctgagcatttgaggaaattaaagaccagagtggtgaacgagcagaccaggcttggtctcataatggagacgtttgtgggccgaggcggagaggctccattttactttcaatgtgacaaacatctgtcacggagttttcagggactcggtctgatctgtctgtaaaaagcctgtaaaactgctctctgggcagggcatctctgaaagaaaggcagcagccccagtcaggggattacagatcaaactgccatctccctgggacagagcacctgggggaaggggcggctgtgggtgcagcttcagcagacctaaacgtttttgcctctcggctctgaagagagcagcagctctcccagcacagcgctcaaactctgaagagttttggctggcatctagcaggtgccattctgggacaaagcttccagaggaaggaacaggcagcaatctctgctgttctgcagcctctgctggtgatacccaggcaaaaaggacctggagtggacctccagcaaattccaacagacctgcagaagaggggcctgactgttagaaggaaaactaaccaaacagaaaggaatagcatcaacatcaacaaaaaggacatccccacaaaaactccatctgaaggtcaccaacatcaaagaccaaagtaacggggagaatggaaccaagttggaaaacactcttcaggttgttatccaggagaactatcccaacctagcaagacaggccaacattcaaattcgggaaatacagagaacaccacaaagatactactcgagaagagcaaccccacgacacataattgtcagattcaccaggattgaaatgaaggaaaaaatgttaagggcagctagagagaaagacagatcgacgagtcagaaaattaacaaagatattcaggacttgaactcagctttagaccaagtggacttaatagacatctacagaactctccaccccaaatcaacagaatatacattcttctcagcaccacatcacacttattccaaatttaaccgcataattggaagtaaaacactgctcagcaaatggaaaagaatggaaatcataacgaacaggctctcagaccacagtgcaatcaaattagaactcaggattaagaaactcactcaaaaccgcacaactacatggaaactgaacaacctgctcctgaatgactactgggtaaataacaaaattaaggcagaaataaataagttctttgaaaccaatgagaacaaagatgcaacataccagaatctctgggacacagctaaagcagtgtttagaaggaaatttatagcactaaatgcccacaggaaaaggcagaaaagatctaaaatcagcaccctaatattacaattaaaagaattagagaagcaagagcaaacaaagtcaaaagctagcagaagacaagaaataactaagattcgagtggaactgaaggagatagagacatga

SEQ ID NO: 131740 - DNA, 2088 bp, Homo sapiens
agacccaggcgaacaccaaatgatgctggtgcccagcgccgcatcttcccgctactctgtcactcagccggaccgcggcgtcccccgaggcggcgaacagcctttggagccccgaagccggctttggtgaaggactttattgatctgacattatcgaagactcaaagaaagactccaacagttattcacaaacattatcaaattcaccgaattcgacatttttatatgagaaaagtcaaatttactcaacagaattaccatgacagactgtcacagattttgacagatttccccaaattggatgatatccatccattttacgctgacttgatgaatattctctatgacaaagatcattacaagttggctctaggtcaaataaatattgccaaaaatttggtggacaatgttgctaaagattatgtgcggcttatgaaatacggtgattctctgtaccgctgcaagcagctgaagcgcgctgcccttgggcgcatgtgtactattatcaagagacagaaacagagtttggagtatttggaacaagtacgtcaacatttatcccgcttgccaaccattgatccaaatacaaggactctgcttttgtgtgggtatccaaatgttgggaaatccagcttcatcaataaggtgacaagagcagatgtggatgttcagccctatgcatttaccaccaaatctctgtttgttgggcacatggattataagtacttgcgctggcaggttgtagataccccagggattttggatcatcctttggaggatcggaacaccattgaaatgcaagctatcacagccctggcccacctccgagctgcagttctgtatgtgatggatttgtctgagcagtgtggacatgggttgaaggagcaattagaactcttccagaatatcagacctctgtttatcaacaagcctcttattgttgtagcaaacaaatgtgatgtgaagagaataactgagctttctgaagaagatcagaaaatatttaccgacttgcaggctgaaggattccctgtcatcgagaccagcaccctgactgaggaaggtgtcattcaggttaaaacagaggcttgtgataggcttttggctcatcgagtcgaaacaaaaatgaaaggaaataaagtgaatgaggttctgaacagattgcatttagctgtgccaaacaagagagatgataaggagcgaccccctttcatcccagaaggagtggtagctcgaaggaaaagaatggagattgtagagcccaggaagaagagggaacgagatcttgagctggaaatgggagatgattatattttggatcttcagaaatactgggacttaatgaattcatccgagaaatatgataagataccagagatctgggaaggccataatgttgctgattatatcgatcctgctatcatgaagaaattggaagagttagaaaaagaagaagagctaagaacagctgctggggagtatgacagtgactctgaaagtgaagatgaggaaatgatggaaatccgacagctggcaaaacaaattagagaaaaaaagaagttgaaaattctacagtccaaagaaaagaatacacagggacccaggatgccccgaactgctaagaagggcagtttatcagtccctgttactggtgaatctagggagaacctctgtaggtgtgaatggaagacatcagattcttcccatttcttggcttcatattgggatgtcattgtctcctacttctgctttcgtctagatgacaggcccatatcacatgtctacccttttgactatagcttccctgaaagttggggtaaaggagtggcaggctcccaaaagagacaaggttctgggaagttaaaatataacaggagggttcaacgggcagacttggagaatgagatgcgtagtcttggtgttgacatggatgataaagacaatgcccactatgcagtccaggcaagaagatctcggagcgtcactaggaaaagaaaacgagaagaatctgttccaccctcttctatagcccggagtcggagttgttctcgaactccacgtgatgtttctggtcttcgggatgtcaag

SEQ ID NO: 131741 - DNA, 730 bp, Homo sapiens
ctacagcagaaggcttttaacgacataaaacacattatcaggtgttccataggtgatgtacagagaaaaacccatatttggagattgcgctgaactggaaattgctgctgcagttatgaagatttttatgcacctctgcatctttgccctgggactgtatctgataacatcctgatgagtagatctagttgcatagtcacctggtgttccacaatcaggaacagtttctattagaatccagtaaaatatccaaagccagttttcatatgagaccattcttgttatcagcagttcctggacctcataagttgtattggctctgttcatttcaaagcctgattcttcatcctttccgctcttccatatttggccttgtgatgctgaagccggttgtgggtaacctccagtgtcatttttgccacctggcttccggttagattctgccaatgggggagctgtagagcttgttaaatcaggattcctggctccactgcacagtttctggttcactaggtctggaatagggcctgatgatttgcattctaacaattcccaggggacgttgatgctattggtccaggaaccacatttgcctcgaccaggaaatacttctactgtccccaccctctgattgttaggcttgtggtcagaatcccagcacatgaactggcactgctgctgggaattatgagtcaccctttcatgttcttcctggtgttgaagcaagtct

SEQ ID NO: 131742 - DNA, 497 bp, Homo sapiens
gccttgtctggtatccttatgcagaatgaactgaaataatcatcaatctgaaaagctactcttaaacagagacttgcttcaacaccaggaagaacatgaaagggtgactcataattcccagcagcagtgccagttcatgtgctgggattctgaccacaagcctaacaatcaggtcagggagtcagatttctgttggatttagaaaagcatctatgtgtttatgaaagaaacccactggatttttaatagttctgcagctcttggaggctctacatctaccctttctccccagccaagagcatggctagtgggagaatggaaggcaggcagcaggcaggtaagtgtgacttcctcacttcccctaccttctcatcttaaagccatagagtggttgctgggtaacccactcctacatatattggttcataaagcctagtgagccactgaaattcttactgatctgtaaaatttcaaacacactagtaacacagacagcc

SEQ ID NO: 131743 - DNA, 1029 bp, Homo sapiens; identical to SEQ ID NO: 118139

SEQ ID NO: 131744 - DNA, 822 bp, Homo sapiens
atgcctgttctgcgcgttttcgaattaggctttggacaaaagtttcagaacgcaggagtggacagcttataccggttaggcttccagaaacccggcgtcctgcgcctattatacctgcccgccattcgccaagagcgcaacgagttcctgcgttcgggctttaaacactacgcaatttacgccaggctgctgttcggcaaagcgaccgctaacaacttagtacaaaaactctaccagtgcgacaacaacaacctcgggttgtattcagtacgcctcgactgccccaactcgcgcgattgcgtaggcggctgcgcgtccataaccggttacgcccccagactcctgagcaaatcgtacaaactggcgtccgcatccttctatggaaaacacgccgcttaccggatccggagactacaacgccaggtagccaggcgacggaagaaacagaaaggaacacttgctgaaatggcagcagccacatccgtccatgtggttgcagtgattgaacccatcattcagcatgccgactggttcttccctgaagaggtggaatttactgtatcagaagcatttgtacctctcaccaccccgagttctaatcactcattccacactggaaacgactctgactcggggaccctggagaggaagcggcctgctagcacgccggtgatggaaggagacctggtgaagaaggaaagcgtcgtcaattttgaccgccgaaagattttgcgcgttaatcgcctggagcaccatatcggtaccgatcacttgggtggcgacagtgggttgcatcgccgtagtcgcacctgcccgtggtag

SEQ ID NO: 131745 - DNA, 2118 bp, Homo sapiens
atgtcagggagttatagcagtgtctgggctgaagacgacattcagtttgattcccgttttctggaattaaaaggcgacacaaaaattgatctgaagcgtttttccagccaggggtatgttgagcccggaaaatacaatttacaggttcaactaaataaacagccattggcggaagagtacgatatttactggtatgctggtgaagatgacgttagcaaaagctatgcttgtctgacaccggaactggtggcgcagtttggtttaaaagaagacgtggcgaaaaatctgcaatggagccacgatggtaaatgcctgaagcccggtcaactggaaggcgtggaaattaaggctgatttaagccagtccgcattagtcatttcactaccgcaggcttacctcgaatatacctggcccgactgggatccaccttctcgttgggatgatggcatctccgggatcattgcggactacagcatcactgcgcaaacacgacacgaagaaaatggcggcgatgacagtaacgagatcagcggcaacgggacggtcggggttaacctggggccatggcgtatgcgcgctgactggcagaccaactatcaacatacgcgcacccaactggcgctgggcgaagattacctcaattccgatattttcgacggtttgaattatgttggtggcagtgtcagcactgacgatcaaatgttgcctccccatctgcgcggctacgcgccagacatttccggcgtggcacacaccacagccaaagtgaccgtcagccagatggggcgtgtgatttacgaaacgcaggttccggctggaccgtttcgtattcaggatcttggtgattccgtctccggtacgttgcatattcgcattgaagaacagaacggccaggtgcaggaatatgacatcagcaccgcctcgatgccatacctcactcgcccaggccaggttcgctataagatcatgatgggacgtccgcaagagtggggccaccatgtcgaggggggatttttctctggtgctgaagcctcctggggcatcgctaacggctgtcgttatatgccgagcgctggctgtattgctgaatttccctttcccggagccacgaaactgttgcgcgaagtggggatggactggatgtcgcaagatctcgctgctcgtttgtctacccgcccagctcaggggattggtgcaggacttctgacggcacgactcgggattaaagctatggagctttgccgcccgctgccgtggattgacgatgacaaacctcgcctcggggatttccgtcgtcagcttatcggtcaggtgaaggttcccatgcgtctggaagtcttttgtgaagaccgactcggtctgacccgcgaattactcgatctactcgtgctaagaggcattgatttacgcggtattgagattgatcccattgggcgaatctacctcaattttgctgaactggagtttgagagtttcagcagtctgatggccgaaatacgccgtattgcgggtgttaccgatgtgcgtactgtcccgtggatgccttccgaaccagagtggatatggcgaacccggcgagctgtcagctttttgggcaaaattggatcgcctgcgcaaccataccgccgcacaatgattaggtaccgaactcgagtgtatctccatttgatcaactccggttctgctgcgctggacggttcctgtaaacaacgcgacagcgaaggtaacccgacgatgaagttgcaggtggcggcgattgcggcgctggagggcgatcaacagtgcgtgcgcgacattgccgaacagtacaaacgccgccgtgatgtattggttaaaggtgccgtaatcgtgatagcttttaatacgagccagggcgctgaccagcgttttgttgccaaccataaagccgatacgagccccagggccccccacccacaacagagggaacaaatgaggccaaatcccgggagggggggaaaaaaaaagaaaggaaataagcgggtgtccgggaggaaaataaccagcgaggaacccgccagggagtcatggttagacgcccccaccgaggaaggaacaaggcagctaaccagcaggggcacgatggtccagaggggataa

SEQ ID NO: 131746 - DNA, 1083 bp, Homo sapiens
atgaaaattgaactgaagattacaatcaatttaacaacaagttacacaaccaattcagactccgccagcccaccaatcatgattggacggtgtaaggacaacaccaacaaaaacaggaagttagaagtctcagcaaaacaccgaccagacgatgttcctgtctttgttcgggggcatgccgcgtttgccgaaggcgttggtgaaatactaacgccggtggatccgccagagaagtggtatctggtggcgcaccctggtgtaagtattccgactccggtgatttttaaagatcttgaactcccgcgcaatacgccaaaaaggtcaatagaaacgttgctaaaatgtgaattcagcaatgattgcgaggttatcgcaagaaaacgttttcgcgaggttgatgcggtgctttcctggctgttagaatacgccccgtcgcgcctgactgggacaggggcctgtgtctttgctgaatttgatacagagtctgaagcccgccaggtgaaggttcccatgcgtttgaaagtcttttgtaaagaccgtctcggtttgacccgagaattactcgatctactcgtgctaagaggcattgatttacgcggtattgagattgatcccattgggcgaatctacctcaattttgctgaactggagtttgagagtttcagcagtctgatggccgaaatacgccgtattgcgggtgttaccgatgtgcgtactgtcccgtggatgccttccgaacgtgagcatctgacgttgagcgcgttattgaaggcgttgcctgaacctgtgctctctgtcgatatgaaaagcaaagtggatatggcgaacccggaaagctgtcagctttttgggcaaaaattggattgcctgcgcaaccataccgccgcacaattgattaacgcctttaattttttacgttggctgaaaagcgatccgcaagattcgcataccgagcttgtcgttattaatgggcagaatttcttcatgcaaattcacatgcaaaaacatagatgcacacacaagttttacaccccactttcaaaatcagattttattttatctccaaaacatataactaaataa

SEQ ID NO: 131747 - DNA, 253 bp, Homo sapiens
atgggcgtggtgcgcaccttccagcatgtgcgtctgttccgtgaaatgacggtaattgaaaacctgctggtggcgcagcatcagcaactgaaaaccgggctgttctctggcctgttgaaaatactgaaaggagtaccaggaatgatgtctgaactctccattcccgaaggctgtggctatagctccatagttccaagcaggacctctgagaaggggctcaacacagctgccaaagctgggcctcaggtgacag

SEQ ID NO: 131748 - DNA, 1128 bp, Homo sapiens
atgacaacaaaactctggtttaaggagcgggttctcattcaagataccgttcaattgaaacgtgaaagggtaccgaactcgaattcgaaaacatgggcatatgggggttgccccgagctgcagctgcattgccatctagaagaccccgtcaatcttgaactgtacccgcaggagatcgtctcgttaatcggccctaacggtgccggaaaaaccacggtttttaactgtctgaccggattctacaaacccaccggcggcaccattttactgcgcgatcagcacctggaaggtttaccggggcagcaaattgcccgcatgggcgtggtgcgcaccttccagcatgtgcgtctgttccgtgaaatgacggtaattgaaaacctgctggtggcgcagcatcagcaactgaaaaccgggctgttctctggcctgttgaaaacgccatccttccgtcgcgcccagagcgaagcgctcgaccgcgccgcgacctggcttgagcgcattggtttgctggaacacgccaaccgtcaggcgagtaacctggcctatggtgaccagcgccgtcttgagattgcccgctgcatggtgacgcagccggagattttaatgctcgacgaacctgcggcaggtcttaacccgaaagagacgaaagaactggatgagctgattgccgaactgcgcaatcatcacaacaccactatcttgttgattgaacacgatatgaagctggtgatgggaaattcggaccgaatttacgtggtcaatcaggggacgcgctggcaaacgaacccaggccagctgaaaaagccgctaaacagcttaaccaatggagacaaaaaagccgtcacgttattggatgagagtcaacttgacgctttgctggataagctctctggttatgccaaaccggaagagcgcattctgatcctggcgcgttaccatcacatgaggcctgccagcctggaaaaagcggcaacacgctggccgaagttgcaaatcgactttatgaccattcatgccagcaaagggcaacaggcggattacgtcatcatcgttggcttgcaggagggaagtgatggttttccggctgcggcgcgggagtcgattatggaagaagcgctactgccaccg

SEQ ID NO: 131749 - DNA, 764 bp, Homo sapiens
atggcagcaatcgcgtttatcggtttaggacaaatgggttcgccaatggcgagcaatttattgcagcaagggcatcaacttcgcgtctttgatgtgaacgccgaagctgtgcggcatctggtagacaaaggtgcgactcccgccgccaacccggcgcaggccgctaaagatgccgaatttatcattaccatgttgccgaatggcgatctgcatcttatccgagtggaaggaaatttgcgtgtggagtatttggatgacagaaacacttttcgacatagtgtggtggtgccctatgagccgcctgaggttggctctgactgtaccaccatccactacaactacatgtgtaacagttcctgcatgggcggcatgaaccggaggcccatcctcaccatcatcacactggaagactccagtggtaatctactgggacggaacagctttgaggtgcgtgtttgtgcctgtcctgggagagaccggcgcacagaggaagagaatctccgcaagaaaggggagcctcaccacgagctgcccccagggagcactaagcgagcactgcccaacaacaccagctcctctccccagccaaagaagaaaccactggatggagaatatttcacccttcagatccgtgggcgtgagcgcttcgagatgttccgagagctgaatgaggccttggaactcaaggatgcccaggctgggaaggagccaggggggagcagggctcactccagccacctgaagtccaaaaaggtcgagtctag

SEQ ID NO: 131750 - DNA, 990 bp, Homo sapiens
catttattgcagcaagggcatcaacttcgcgtctttgatgtgaacgccgaagctgtgcggcatctggtagacaaaggtgcgactcccgccgccaacccggcgcaggccgctaaagatgccgaatttatcattaccatgttgccgaatggcgatctggtgcgcaacgtgttgttcggtgaaaacggcgtttgcgaaggcttatctaccgatgcgctggtcattgatatgtccaccatccatccgctgcaaaccgataaattgattgccgatatgcaagccaaaggcttcagcatgatggatgttccggtaggccgtacttctgcaaatgccattaccggtactctgttactgctggctggcggcaccgctgaacaagttgaacgtgccacaccgatcctgatggcgatgggcagtgagttgatcaacgctggcggtccgggcatggggatccgcgttaagctcatcaacaactacatgagcatcgcgctcaatgcgctttcggcagaagccgccgttttgtgcgaagccctgaatcttcccttcgatgttgccgtcaaagtgatgagcggtaccgccgccgacagtgtccggcatttggtagtcaaaagcgcgactcccgcagccagccaggagcagaccgctaaagatgctgacttgatctatgccatgtccccgaatgtcgatctagtgcgcaccgtgttgttcggtgaaatcggcgtttgcaaaggcttgtcgcgtaatccgttgttctttgatatgtccaccatccttccgatgccaaccgataaattgattgcctatatgctagccaaaggtttcagctcgatgcatgttccgctagcccgtatttttgcgaatgccaacattggccgtgtgcaggtgctggctgacgccatcgttgtacaagttgagcatgccaatccgatcatcctgggagtgcaatgtgagtatatcaacgttggcgctcagcgctttaccaaccccgtatag

SEQ ID NO: 131751 - DNA, 1425 bp, Homo sapiens
atggctcgacaacgaccgactctggaaaatttaggcaagcaagccgtggttgcagctgctgcaggtgcagacttcatcgccccttccgccgcgatggacggccaggtacaggcgattcgtcaggcgctggacgctgcgggatttaaagatacggcgattatgtcgtattcgaccaagttcgcctcctccttttatggcccgttccgtgaagctgccggaagcgcattaaaaggcgaccgcaaaagctatcagatgaacccaatgaaccgtcgtgaggcgattcgtgaatcactgctggatgaagcccagggcgcagactgcctgatggttagacctgctggagcgtacctcgacatcgtgcgtgactggcgtggacgtactggattgcccgtggcgcatatcaggagagcaggcatgagtcagccattattatctgttaacggcctgatgatgcgcttcggcggcctgctggcggtgaacaacgtcaatcttgaactgtacccgcaggagatcgtctcgttaatcggccctaacggtgccggaaaaaccacggtttttaactgtctgaccggattctacaaacccaccggcggcaccattttactgcgcgatcagcacctggaaggtttaccggggcagcaaattgcccgcatgggcgtggtgcgcaccttccagcatgtgcgtctgttccgtgaaatgacggtaattgaaaacctgctggtggcgcagcatcagcaactgaaaaccgggctgttctctggcctgttgaaaacgccatccttccgtcgcgcccagagcgaagcgctcgaccgcgccgcgacctggcttgagcgcattggtttgctggaacacgccaaccgtcaggcgagtaacctggcctatggtgaccagcgccgtcttgagattgcccgctgcatggtgacgcagccggagattttaatgctcgacgaacctgcggcaggtcttaacccgaaagagacgaaagaactggatgagctgattgccgaactgcgcaatcatcacaacaccactatcttgttgattgaacacgatatgaagcttgtgatgggaatttcggaccgaatttacgtggtcaatcaggggacgccgctgggcaacggtacctcttatactgcctgcagggcaaacagcgatgcgtcgttttccgccgcctgcgccatcaacgaggcacaaatctcagcgttcttttcccacacagatgtaacagcaaactgtcctgcggcaaccagcattgccacctcctgtcagagtcgtaaaattcgccaacgacgattattcggcgttacacttatcactcatacaaatcaaatagcaggattttgcagtgttacaacttcttttagcagtttttattggcggtggtacgggaagcgtggcgagatggctgttaagtatgcgatttaa

SEQ ID NO: 131752 - DNA, 1113 bp, Homo sapiens
ctacagcgagttgccagatggtactgtaacactcagagaggcgatgtatccgagctgaagcgctttaaagaccatgcaggcaaatgttcgcaagcgcctgttcaccttgcactgtgtggtcaaagtgaaatcctggttgggccgacgacgaacgcgcactgcgcagtctcggttacgttgacgatctttaagagtaactccgatggaaggctggcagcgcgcatttggtccttgcatagtcagccctgtggcagcgcaaacccagccttgatgcttggcactgtacttcactggcaggcaatcgtgggctgcgtgctgtcttggtttgcccaacaggctgccacgcatcttaacactgctcgtcacccatgcaacaggttgccattcaccagcccttttccaccgccttccttctttgctaacgcgtttttggctggtgctgttggcagcaagatcgaaaaactgcttgctgccagttgcttgacaagccagtcctccgcatgtgcggtattggcgcttcgggtctgtcgcggggctcgagtctgaagtggggcttactccggtaccttgaaacccgtttggtttcgcgcctgtggccgttcttcggaagatttgttcgcggggggatacgccgtccagaaacggcatctggtagacaaaggtgcgactcccgccgccaacccggcgcaggccgctaaagatgccgaatctatcattaccatgttgccgaatggcgatctggtgcgcaccttccagcatgtgcgtctgttccgtgaaatgacggtaattgaaaacctgctggtggcgcagcatcagcaactgaaaaccgggctgttctctggcctgttgaaaacgccatccttccgtcgcgcccagagcgaagcgctcgaccgcgccgcgacctggtgcgcacgaactccgcacattcccagtatccccccagaacgacaccatccagccaacaacacccgcaaatacagccacacttacaaccaacagcaggacacttacaaactctaaaggcgagttacccacaccagcaaaacttcccaacaccacaccagcttccaaactggggaggaccaccaaagagccccaacacctcaaccgcat

SEQ ID NO: 131753 - DNA, 431 bp, Homo sapiens
atgcttactaattttatgtccagacccgcacaaccgggggaatggcagaaccctggggtaaaccacctttgtcacatagcaacgaatctgtcgggcatggacccgctcacgttattttggctatatgccgccactcctaagactgccctgattctggtaaccataattttagtgaggtttttttaccatgaatcagacgctactttcctcttttggtacgcctttcgaacgtgttgaaaatgcactggctgcgctgcgtgaaggacgcggtgtaatggtgcttgatgatgaagaccgtgaaaacgaaggtgatatgatcttcccggcagaaaccatgactgttgagcagatggcgctgaccattcgccacggtagcggtattgtttgcctgtgcattactgaagatcgccgtaaacaactcgatctgccaa

SEQ ID NO: 131754 - DNA, 849 bp, Homo sapiens
atgattcccttcgtggtatcgggcggtattttgctggcggtttccgtcatgttgtatggcaaaggcgcagtgccggatgccgtagccgatccaaatctgaaaaaactgtttgatatcggcgttgcgggcttgacgctgatggtgcctttcctcgcagcgtacatcggttattccattgcagagcgttctgcgctggctccgtgcgctatcggtgcctgggttggtaacagctttggtgcgggcttctttggtgcactgatcgccgggattatcggcggcatcgtggtgcattacctgaagaaaattccggtgcataaagttctgcgctcggtgatgcctatcttcattattcctatcgtcggcacactgattaccgcaggcatcatgatgtggggcttgggcgagcctgtaggggcgttgaccaacagcctgactcagtggcttcaggggatgcagcagggcagcattgttatgctggcggtgatcatgggtctgatgctggcgttcgatatgggcggtccggttaacaaagtggcctatgccttcatgctgatttgcgttgctcagggtgtttataccgtggtggccatcgctgccggctggaagagcgacgcggccttaaaccgaggttttcccatgaaaaaagatattcacccgaaatacgaagaaattactgctagctgctcttgcggtaacgtaatgaaaatccgctccaccgttggtcatgacctgaacctcgacgtgtgcagcaagtgccacccgttcttcactggcaaacagcgtgatgttgctaccggtggccgtgttgaccgcttcaacaagcgtttcaacatcccgggcagcaaataa

SEQ ID NO: 131755 - DNA, 1818 bp, Homo sapiens; identical to SEQ ID NO: 117791

SEQ ID NO: 131756 - DNA, 1581 bp, Homo sapiens; identical to SEQ ID NO: 129918

SEQ ID NO: 131757 - DNA, 1152 bp, Homo sapiens
atgcaagctgctcataggttacgccctgcataccgtataaagactggcaaaccaccagctttggcagattatcatcctgcatatcaagaaatgctttcacgaaaacaggatcgtgtaatcgatcagatcgattttggcatcaaagacaccgtcgaaattctgcatatggggcagatccagagcatgggtcgcgagttcgcattgtctctcaggttttcaatccatggacacaatgtgcatggaaatgaaagcccagagatgggtcccgagcgtcgttcaggtttctatgatgaatggtcccctgagagaatcatacaatattataggcctgcccgggagcagcttatgaatgagttggtgcagatccttaaaaatacccgtcagcatttaatgacgggcgtttcacacatgattcccttcgtggtatcgggcggtattttgctggcggtttccgtcatgttgtatggcaaaggcgcagtgccggatgctgtagccgatccaaatctgaaaaaactgtttgacatcggcgttgcgggcttgacgctgatggtgcctttcctcgcagcgtacatcggttattccattgcagagcgttctgcgctggctccgtgcgctatcggtgcttgggttggtaacagttttggtgcgggcttctttggtgcgctgatcgacgcctttccacgtttgtctgaggagataaaccctgcactacctgaggcaaaagtgatggcctgccttgaggcagttgccaggcaagataatgttgattctcctcaggagctacccccaacacccctgtttgcttctagacctataactagactgaagtcctggtgggcccctggaggtgaagttgagagtgggacccacaagaagcgggaaagggctagggacacggcggacttcccagagatcggacacttgttacttgttgaaaaggcgccaccttccctgacaaagcgaaggcgcagcgaaacagtacgagtttggtcgaggccggctttgacggctttgcgggactggtgggtcctggatgctggcaaatttggactctaccagacccccccacgaggaaccgcagggccccctcttgccttccagagctccacacggaggatggaatgccctacagaaactcaagccacattgtag

SEQ ID NO: 131758 - DNA, 444 bp, Homo sapiens
acccaaagcgccgttcgatagctggctgaacgaatctctttaatcttaccggggcgcatcttgtgccccgttttctcctctgcgacaagggcgttttttcgacgctctcttatgaccgaaaacgctgttctccagttacgcgccgagcgtattgcgcgcgcaacacgtccttttcttgcccgcggaaatcgcgttcggccctgccaacgctgtcttttgccagagaaattatgtctctgttcgacaatcagcctttactttcaggtcctgacagcgatagccattggtattctccttggccatttctatcctgaaataggcgagcaaatgaaaccgcttggcgacggcttcgttaagccgcacctgcagactttaggaatatggataacagatgttgtttggaaccaagtgaaactcaaaggagtgtttttaaatagccaataa

SEQ ID NO: 131759 - DNA, 1248 bp, Homo sapiens
tcatgggcccttggggggcgtctggcccctgtccggggaccctttctgtgtgtgccctgttcttcgcctcggttccccccccgccctaggtccctcggacctttcgggcaattcgaggtttccgtgagcccctgggtaccccgtgggccccggtgtcgcgtctttacgttcccggcgttttgggagccaaccggaggccaatgcccccaaaggatataggccaacaccgtacagcgtgtcctggttaaccaggtacggaacatagttctcactgtagccatgctgttcggtatgcagatccagcataaactgcgacagtgcgcggtgcatgcgagcaatctgccctttcattaccacaaagcgggaaccagtcagcttaactgcagctgcaaagtcgaggccagagtgcatttcacccagcgtcacgtggtcacgaacttcaaagtcaaactcacgcggggtaccccagcggctgacttcaacgttgtcattttcgtctttacctaccggcacttcatctgcaggcaggttagggatggtcagcgcgatatcgcgaatttcagcctgtaaagcatccagctcggcttttgctgcatccagctcttcgcccagtttgttcacttccagacgtaaaggctcgatatcttccccgcgcgctttcgcctggccaatggatttcgatcgggagttacgctccgcttgcaggttttccgttttgacctgcaatactttacgacgctcttcaagagcgcccagcttatctacatccagccccagccagtcaataatcccctgtgccgcatgacgtccttctgccattgcggtaaccaccagatccgcaccacgcacggcgtcaccaccagcgaagattttcggattggtggtctggtaacggtactggctttccacatccgcgatgatgcggccccatttgtccatatcatgggtcaccagcagcattcccggcgcttgtttttgcataatgctttccagcagatcgaggatgcgcgcctgtgctaccacgtcaaggtcggtggtcggttcatcggcgatgataaacggtgattcacacagcaccgccatcgcaatcatcatgcgctgcaacatgccgccgctcatctcgaacgggtacagcttcagcacgcgcgcggcgttttccagccccaccgcttctatggcagcggtaagcgtagcgtcatcggcgggtttccctaacgccaggcaggtttcccgcgcgtgggtgtgcat

SEQ ID NO: 131760 - DNA, 2008 bp, Homo sapiens
atggaaagcaaacgtctggataatgccgcgctggcggcggggattagccccaattacatcaatgcccacggtaaaccgcagtcgattagcgccgaaaccaaacggcgtttgcttgacgcgatgcatcaacgtaccgccacgaaagtggcggtaacgccagtcccgaatgtcatggtttataccagcggcaaaaaaatgccgatggtggtggagggcagcggcgaatatagctggctgctgaccaccgaagaaggaacgcagtacaaaggccatgtaacggggggcaaagcgttcaatctaccgacgaagctgccggaaggttatcacacgctgacactcacccaggacgaccagcgcgcgcattgccgggtgattgtcgccccgaaacgctgttacgaaccgcaggcgttgctgaataaacaaaagctgtggggtgcctgcgttcagctttatacgctgcgatcggaaaaaaactggggtattggggattttggcgatctcaaagcgatgctggtggatgtggcaaaacgtggcgggtcgttcattggcctgaacccgattcatgcgctctatccggcaaatccggagagcgccagcccatacagcccgtcttctcgccgttggctgaatgtgatttatatcgacgttaacgccgttgaagatttccatcttagcgaagaggctcaggcctggtggcagttgccgacaacgcaacagacgctgcaacaggcgcgcgatgcagactgggaatacgaagatgacgccgtattccgtagctatatcgacgacgaatatatgggccacaagtggcaatgcgttgaatttgctcgccgttttctctttctgaattacggtgtggtctttactgacgtgggtatggcgtgggagattttctcgctgcgcttcctgcgagaagtggttaatgacaacatcctgccattgcaggcatttcctaacggctcgccgcgtgcgccggtcgcgggtgcgcttcttatctgggataaaggcggtgaatttaaagacactggccatgtcgccatcattacccaattgcatggcaacaaagtccgtattgcggaacagaacggagagcggagtattttccgctggcggatactcaagcccattggaaaggggaaagattctctggaacccttgggaactaaagacgggttttccttgcctaggcactaccggtccaggaaagcgggtttacccaaagaaaatgccccgggcgtttatgacgcgctgccgttcctcattgccaacactaaacaggtgatggggctcgaagagctaccggaagagccgtttatcaataccgccggacttaacgtcgtggtactgggcggcggcgacaccgcgatggactgtgtgcgtaccgcactgcgccacggcgcgagtaacgtcacctgcgcttatcgtcgtgatgaagctaacatgccaggctcgaagaaagaagtgaagaacgcccgcgaagagggggccaacttcgaatttaacgtccagccggtggcgcttgagctgaatgaacaaggtcacgtctgcgggattcgtttcctgcgcacgcgtcttggagagccggatgcccaggggcgtcggcgtccagtgccggtggaaggcagtgaatttgtcatgccagccgacgcggtgattatggcgtttggcttcaatccgcacgggatgccgtggctggagtcgcacggtgtaacggtagacaaatggggccgcatcatcgcggatgtggaaagccagtaccgttaccagaccaccaatccgaaaatcttcgctggtggtgacgccgtgcgtggtgcggatctggtggttaccgcaatggcagaaggacgtcatgcggcacaggggattattgactggctggggcgccagcgccagctctaccagtcccctcagtgcggctgcgcgctcctccagcggccccgagcagcccagcaccgccagcgccccggccagcgccagtgtctgatgcctgcagaggtggagggcaagg

SEQ ID NO: 131761 - DNA, 563 bp, Homo sapiens
atgccgtggctggagtcgcacggtgtaacggtagacaaatggggccgcatcatcgcggatgtggaaagccagtaccgttaccagaccaccaatccgaaaatcttcgctggtggtgacgccgtgcgtgacaaaattctctccgataactatttcaccctgcacaacattacttacgatctcacgcgcaaagacggcgaagttatccgccataaacgtgaagtgtacgatcgcggcaatggtgcgacgatcctcctgtacaacacgaagaaaaagaccgtggttctgattcgtcagttccgtgtcgctacctgggttaatggcaatgaaagcgggcagctgattgaaagctgcgccgggctgctggataacgacgaaccggaagtgtgtattcgcaaagaagcgattgaagagacgggctatgaagtgggtgaagtgcgcaaattatttgaactgtatatgtcgccaggcggtgtgactgagctaatccacttttttatcgccgaatacagtgacaatcagcgcgctaacgccggtggcggggtcgaagatgaagatattgaagg

SEQ ID NO: 131762 - DNA, 741 bp, Homo sapiens
ttaagctacaaagcgtaaggatctcccatgtctgaaatgaccccacgcgaaatcgtcagcgaactggataagcacatcatcggccaggacaacgccaagcgttctgtggcgattgctctgcgtaaccgctggcgtcgcatgcagctcaacgaagagctgcgccatgaagtgaccccgaaaaatatcctgatgatcggcccgaccggtgtcggtaaaactgaaatcgcccgtcgtctggctaagctggcgaatgcgccgttcatcaaagttgaagcgaccaaattcaccgaagtcgaatgtggctgccaatctaaaaactggactcccaagaggagcacaactatcttccattccctccttgaacctcattattaacctgcgtgggatgtacgcctgtgggtgctcccattgtctgcccgtaggttcttcccctgggggtccctggcttacgtgtttgtctcgtatatatgagggctttgcgatcccggcgtcagcggctttctgccagtcgcgtgtgccccgatgagtccgtgattgtctatgaatgccttgcttacggtctgtgtccagcttgacagctggtccagtggtagctacatgtccctggaaagacttctgcaaggccacccagtcctgctgcacctgcttgcacctgcatacaatggcacctggcctgacaaccagtgctgccgtggcttgaacctgtggacagacttcctcaaggcagcatggcatggccat

SEQ ID NO: 131763 - DNA, 491 bp, Homo sapiens
aatggaagtcgcggaagtggaagccttgtaccgtaaaaatcagatcccgtggattaacagtcccaattattcggtagaagagattgccaccaagatcctcgatatcatgggccttagtcgccgaatgtactagagaactagtgcattagcttatttttttgttatcatgctaaccacccggcgaggtgtgacacacctcgcacttgaaatcagcagcgattggtttatcgtgatgcgcatcacttcccggcagtcctgccgtagaagcaacaaatttctgagacttgtaatgaacagaactgacgaactccgtactgcgcgtattgagagcctggtaacgcccgccgaactcgcgctacggtatcccgtaacgcctggcgtcgccacccatgtcaccgactcccgccgcagaattgaaaaaatactgaatggtgaagataagcgactgttggtcattattggcccctgctcgatccacgatctcaccgctg

SEQ ID NO: 131764 - DNA, 972 bp, Homo sapiens; identical to SEQ ID NO: 122965

SEQ ID NO: 131765 - DNA, 841 bp, Homo sapiens
gaagcggacaaatccggtaccgtgaaagcaattctggtcgaaagtggacaaccggtagaatttgacgagccgctggtcgtcatcgagtaacgaggcgaacatgctggataaaattgttattgccaaccgcggcgagattgcattgcgtattcttcgtgcctgtaaagaattgggcatcaagactgtcgctgtgcactccagcgcggatcgcgatctaaaacacgtattactggcagatgaaacggtctgtattggccctgctccgtcagtaaaaagttatctgaacatcccggcaatcatcagcgccgctgaaatcaccggcgcagtagcaatccatccgggttacggcttcctctccgagaacgccaactttgccgagcaggttgaacgctccggctttatcttcattggcccgaaagcagaaaccattcgcctgatgggcgacaaagtatccgcaatcgcggcgatgaaaaaagcgggcgttgctgggtccgcatggaaaagtgtaggaggaattgacattctcagtgcaagttcagcagaaggaacagagaaaggcagaggaatgaaggaaaccacatttgtactcaccaatgccatgttaggaagaaagaaattggatgcacttgatttcaaagtcaacatctttcatgagcatctgatacagcagttcctgagcagaacaaaacaacaaaaacaggacagacaggagtcattgctgcttgttgcaccagatcctggactcgctaatcggactaatctcctgctgcacgtgcataccatccgccgtccacagggttctaagcagattcttccttgccgtaagccgtccatgatatga

SEQ ID NO: 131766 - DNA, 1074 bp, Homo sapiens
ttaaccagatcttgttgctgtttctggtgaacggacatataccctaccgccggaaagccggaagccgacgcggcctgcataacgcagagaagccccaaacggaatcacttcacggaaatgatgctggctgcagtaccatgcgccctggttgagcggctcttcctggcaccagacaaaatccttgacgtgagcaaactgctgcaacacttcctgcatcgctttatgcgggaacgggtagagttgctcgatacgcacaatggcgacatcgtgttgattgttcttacgacgctgttccagcaggtcgtaataaaccttaccagaacacatcactacgcgcttcacgcccttcggatcaagctcgtcgaataaataaaggatacacaatgagtagcgtagatattctggtccctgacctgcctgaatccgtagccgatgccaccgtcgcaacctggcataaaaaacccggcacgcagtcgtacgtgatgaagtgctccctcccctttgccggacatacgctgcattttgttgagttcgatccggcgaatttttgtgagcaggatttactctggctgccgcactacgcacaactgcaacacgctggacgtaaacgtaaaacagagcatttagccggacggatcgctgctgtttatgctttgcgggaatatggctataaatgtgtgcccgcaatcggcgagctacgccaacctgtctggcccggtgtttaaaggttcttcgctgatgttcctcaaaccgggcatgcaggttccggtttctcagctgatccgcggtattaacctgcaatcgggtaacgatgcttgtgtcgccatggccgattttgccgctggtagccaggacgctttcattgcctggccgataacgtaactggtcatcattttggtcaggatctgcgttctgttcggcgagcactttgccggagttatagtcaatcaggatgtaggactccgcatcgatctgcggtacacccgggatcatagttttgatattcaggtcatcggcatgtgcagcagagataaaggctgtgcaaagagccgtggtgagcgccaggcgcttcat

SEQ ID NO: 131767 - DNA, 659 bp, Homo sapiens
cttgctagtgcatgcaaagcttgtgcactggcctgtctgtttataccaactgtctgttgcacttgggcaaaacccatggctgttaccctaacattcaatctgccatatgcaaagcaaccatcccccccatattctgcaccagccttgtgcatgtcaatcagctgcacatgcatgtgccctgcaacactgcattctggcccatatccttgtggtactggtttaataggtttttccatcaagcctccaatataaacagtgttgggaagcaggggccgggcaaaatcaaaggcaaaatcagagttaacaaaccacaactctgctttcagtagaagatgagacaaaactggcctagagccttctgggaaatgctccttgatggtgttgtcaaatgtagactgcatgtcccattggctcctggagaaactaaagaacatcagaaaattcttcactcggccccagaagtccatgtgatcagtcagcaaggaagggaatactggaacataagacaaggggcttggtagcccaaaatccaaagagccgaatgtggtgggaagaatggccacaaatggtttcacaagcttctcagcaatcaggaaagaacagaaatcaaatgcttcaacaaataccagatcatagttctcattctttaaggaatccat

SEQ ID NO: 131768 - DNA, 2220 bp, Homo sapiens
  misc_feature (1)...(2220): n = a,t,c or g
gcagccacccagctgccatgccatgcccagcagctttccacaaagctacatagtgcccagagtgagccccaggaagaacacaaagacgtcgagcaggttctgctcattccagggctgcaggaaggcataaggcttgaggtgtgctgccccctgtccccaccccatctggaggatgtagtcgattcagcccaccggccactgtgcagtcattttttaaatagaaaggatatcatggattccttaaagaatgagaacttcgacatggtgatagttgaaacttttgactactgtcctttcctgattgctgagaagcttgggaagccatttgtggccattctttccacttcattcggctctttggaatttgggctaccaatccccttgtcttatgttccagtattccgttccttgctgactgatcacatggacttctggggccgagtgaagaattttctgatgttctttagtttctgcaggaggcaacagcacatgcagtctacatttgacaacaccatcaaggaacatttcacagaaggctctaggccagttttgtctcatcttctactgaaagcagagttgtggttcattaactctgactttgcctttgattttgctcgacctctgcttcccaacactgtttatgttggaggcttgatggaaaaacctattaaaccagtaccacaaacaggcaataacaaggatgtggagaaagcaaactcgcacattgtttgtgggaatttaaatcagtacaaccactatggaaagcagtttagaggctggataaggcgttcacgccgcatccggcatctgggctcgattggcccacctggggtggtttgcgaaccccggttagtccgagggtggcaaacggagaaatgtcttgagctaccggtagaagagaatttcaccggggagacacgtgcaaggctagcaagcacaatagggcatcgacgaactagaggagagacgcacacgcaaacacaacacagctataggaccgacagagcacaagagcgagactcggccacggcacacctccgtgaaaggtggttaccgctgtttgacttcgcttaccagggttttgcccgtggtctggaagaagatgctgaaggactgcgcgctttcgcggctatgcataaagagctgattgttgccagttcctactctaaaaactttggcctgtacaacgagcgtgttggcgcttgtactctggttgctgccgacagtgaaaccgttgatcgcgcattcagccaaatgaaagcggcgattcgcgctaactactctaacccaccagcacacggcgcttctgttgttgccaccatcctgagcaacgatgcgttacgtgcgatttgggaacaagagctgactgatatgcgccangctggcctgacaaaagaacaagtgctgcgtctgcgcgaagagtttggcgtatatgcggttgcttctggtcgcgtaaatgtggccgggatgacaccagataacatggctccgctgtgcgaagcgattgtggcagtgcttggcggatatccgatgagcggcagacatcgtgcggtacttatcgaggtgtggtccccgtcgaagcttcgtggtcgtgaaattcggctccgagtacggcgattcgaggccggcgctccgggagtcctgcggggccccccgggggcggacccagtctcgaatatggtcgatatgaaaactacgcatacctccctcccctttgccggacatacgctgcattttgttgagttcgatccggcgaatttttgtgagcaggatttactctggctgccgcactacgcacaactgcaacacgctggacgtaaacgtaaaacagagcatttagccggacggatcgctgctgtttatgctttgcgggaatatggctataaatgtgtgcccgcaatcggcgagctacgccaacctgtctggcctgcggaggtatacggcagtattagccactgtgggactacggcattagccgtggtatctcgtcaaccgattggcattgatatagaagaaattttttctgtacaaaccgcaagagaattgacagacaacattattacaccagcggaacacgagcgactcgcagactgcggtttagccttttctctggcgctgacactggcattttccgccaaagagagcgcatttaaggcaagtgagatccaaactgacatattctcctcataccttatagtccaaagttggcagtacttctga

SEQ ID NO: 131769 - DNA, 804 bp, Homo sapiens
tgacattgcgtgatgttcagggaaaaatgaagaaagccgggcagccgtgggaaaaggctaaagcgtttgataactcttgtccgctttccgggtttattcccgcggcggaatttaccggcgacccgcaaaatacaacgctgagcctgagcgtaaacggcgaacaacgccagcaaggtacgactgcggacatgatccataaaatcgttccgctgatcgcttatatgagcaagttttttaccctcaaggccggtgacgttgtgttgacaggcacgcctgatggctacggcccgttgcaaagcggtgatgagctgacagtcactttcgatgggcattctttgacaactcgcgttttgtaatactttttgccgcctgaaagcgcggcaaaacttgcatcgctgtgccagactggttataaggtgcgttttaacgtaatggcggaacacctgatgagcgatgtacctttctggcaaagtaaaaccctggacgaaatgagcgatgcggaatgggagtcgttgtgtgatggttgcggtcagtgttgcctgcataaactgatggatgaagacaccgacgaaatctacttcactaacgtcgcctgtcgccagctcaatattaaaacctgtcaatgtcggaactacgaacgtcgtttcgagtttgaacccgactgcattaaattaacccgtgaaaatctgccaacattcgaatggctgccaatgacctgcgcttatccgtttgctgcgggaagtaaagatttacctgcgtggaatccgctacttactgggtcgaaagcggcaatgcatggtgaac

SEQ ID NO: 131770 - DNA, 2361 bp, Homo sapiens; identical to SEQ ID NO: 120356

SEQ ID NO: 131771 - DNA, 2835 bp, Homo sapiens; identical to SEQ ID NO: 121594

SEQ ID NO: 131772 - DNA, 3480 bp, Homo sapiens; identical to SEQ ID NO: 118327

SEQ ID NO: 131773 - DNA, 3529 bp, Homo sapiens; identical to SEQ ID NO: 120366

SEQ ID NO: 131774 - DNA, 3021 bp, Homo sapiens; identical to SEQ ID NO: 120367

SEQ ID NO: 131775 - DNA, 4374 bp, Homo sapiens; identical to SEQ ID NO: 116411

SEQ ID NO: 131776 - DNA, 2010 bp, Homo sapiens
atggacagcaacacaataatagtgagggacttcagtactccactgccagcactagacaggtcatcaacacagaaaatcaacaaagaaacaatggatttaaactataccttggaacaaatggacttaacagatacatacagaacatttcatccaactgctgcagaatacacattctattcaacaacacatggaactttctccaaggcagaccatatgataggccataaaacaagcctcaataaatttcagaaaattgaaattatatcaagcactctctcagactacagtggaataaaactggaaatcaactccaaaaggaatcttcaaaatcatgcaaatacatggaaattaaataacctgctcctaaataagcattgggtcaaaaatgaaatcaagatggaaattaaaaagctcttcaaactgaacagtaataatgacacaacctatcaaaaccttttagatacagcaaaggcagtgttaagaggaaagttcatagccctaactgcctacaacgaaaagactgaaagagcacaaactgacattctaagcaagcagcggaatgcagcaggtccgagtgaatggagtttgcccctaccagcaccgaagcagctggctagttcttgcgctcatgtactccagttcctgcccgcaaaggggtcagggaaatatcctgctttatcaacacaatactatagagcacaactagagaagcaagagcaaacacattcaaaagctagcagaaggcaagaaataactaagatcagagcagaactgaaggagatagagacacaaaaaacccttcaaaaaatcaatgaatccaggagctggttttttgaaaagatcaacaaaattcgtagaccactagcaaggctaataaagaagaaaagagagaagaatcagatagatgcaataaaaaatgataaaggggatatcacccccaatcccacagaaatacaaactaccatcagagaatactataaacacctctacacaaatgaactagaaaatctagaagaaatggataaattcctcaacacatacaacctcccaagactaaaccaggaagaagttgaatctcttaatagaccaataacaggctgtgaaattgaggcattaattaatagcttaccaaccaaaaaaagtccaggaacagacggattgacagccaaattctaccataggtacaaggaggagctggtaccattccttctgaaacgattccaatcagtagaaaaagagagaatcctccctaactcattttatgaggccagcatcatcctgataccaaagcctggcagagacgcaacaaaagaagaaaattttcgaccaatatccttgatgaacatcgatgcaaaaatcctcaataaaatactggcaaaccgaatccagcagcacatcaaaaagcttatccaccatgatcaagtgggcttcatccctgggatgcaaggctggttcaacatatgcaaatcaataaatgtaatccagcatataaacagaaccaatgacaaaaaccacattattatctcaatagatgcagaagaggccttcaacaaaattcaacagcccttcatgctaaaaactctcaataaattagccccaaatctccttaagctgataagcaacttcagcaaagtctcaggatacaaaatcaacgtgcaaaaatcacaagcattcttatacaccaataacagacaaacagagagccaaatcatgagtgaactcccattcacaattgcttcaaagagaataaaatacctaggaatccaacttataagggatgtgaaggaccttttcaaggaaaactacaaacctctgctcaacgaaataaaagaggacacaaacaaatggaagaacattccatgctcatggataggaagaatcaatatcatgaaaatggccacactgcccaaggacctttcctttgtgcacatgaagagagagaacgctggtgtctcctctacttataaggacgtcagtcctattgcatgccacccttatgacctcatttaa

SEQ ID NO: 131777 - DNA, 2168 bp, Homo sapiens; identical to SEQ ID NO: 124328

SEQ ID NO: 131778 - DNA, 2067 bp, Homo sapiens
atgaaggagatagagatacaaaaatcccttccaaaaatcaatgaatccaggagctggttttttgaaaagatccacaaaattgatagactgctagcaagattaataaagaagaaaagagagaagaatcaaatagacacaataaaaaatgataaaggggatatcaccgccaatcccacagcaatacaaactaccatcagagaatactataaacacctctatgcaaataaactagaaaatctagaagaaatggataaattcctcgacacatacaccctcccaagactaaaccaggaagaagctgaatctctgaatacaccaataacaggctctgatattgaggcaataattaatagcttaccaaccaaaaagagtccaggaccagatggattaacagctgaattctaccagaggtacaaggaggagctgaaaaaggagggaatcctccttagctcattttatgaggccagcatcctcctgataccaaagccgggcagagacacaaccaaaaaagagaattttagaccaatatccttgatgaacattgatgcaaaaatcctcaataaaatactggcaaaccgaatccagcagcacatcaaaaagcttatccaccatgatcaagtgggcttcatccctgggatgcaaggctggttcaacatatgcaaatcaataaatgtaatccagcatataaacagaaccaaagacaaaaatcacacgattatctcaatagatgcagaaaaggcctttgacaaaattcaacagcccttcatgctaaaaactctcaataaattgggtattgatgggacgtatctcaaaataataagagctatctatgacaaacccacagccaatatcatactgaatggacaaaaactggaagcattccctttgaaaactggcacaagacagggatgccctgtctcaccagtcgtatttaacacagtgttggaagttctggccagggaaatcaggcaggagaaggaaataaagggcattcaattaggaaaagaggaagtcaaacggtccctgtttgcagatgacatgattgtatatctagaaaaccccatcgtctcagcccaaaatctcctaaaactgataagcaacttcagcaaagtctcaggatacaaaatcaatgtgcaaaaatcacaagcattcttatacaccaataacagacaaacagagagccaaatcatgagtgaactcccattcacaattgctccaaagagaataaaatacctaagaatccaacttacaagggatgtgaaggacctcttcaaagagaactacaaactactgctcaatgaaataaaagaggatacaaacaaatggaagaacattccatgctcatgggtaggaagaatcaatatcgtgaaaatggccatactgcccaagggaattcatagattcaatgccatccccatcaagctaccaatgactttcttcacagaattggaaaaaactactttaaagttcatatggaaccaaaaaagagcccgcatcgccaagtcaatcctaagccgaaagtacaaagctggaggcagcatgctacctgacttcaaattatgctacaaggctacagtaaccaaaaaagcatggtactggtaccaaaacagagatatagaccaatggaacagaacagagccctcagaaataatgccacacatctataactatctgatctttgacaaacctgagaaaaacaagcaatggggaaaggattccctatttaataaatggtgctgggaaaactggctaaccatatgtagaaagctgaaactggatcccttccttacaccttatacagaaataaattcaaggtggattaaagacttaaatgttagacctaaaaccataaaaactctagaagaaaacctaggaaataccattcaggacataggcatgggcaaggacttcatgtctaaaacaccaaaagcaatggcaacaaaagccaaaattgacgaatgggatctacttaaactaaaagagtttctgcacagcaaaagaaactaccgtcagagtgaacaggcaacctacagaatgggagacaatttttgcaatctactcatctga

SEQ ID NO: 131779 - DNA, 3457 bp, Homo sapiens; identical to SEQ ID NO: 120165

SEQ ID NO: 131780 - DNA, 3633 bp, Homo sapiens
atggtaaagggatcaattcaacaagaggagctaactatcctaaatatttatgcacccaacacaggagcacccagattcataaagcaagtcctcagtgacctacaaagagacttacactcccacacattaataatgggagactttaacaccccactgtcaacattagacagatcaacgagacagaaagtcaacaaggatacccaggaattgaactcagctctgcaccaagcggacctaatagacatctacagaactctccaccccaaatcaacagaatatacatttttttcagcaccacaccacacctattccaaaattgaccacatagttggaagtaaagctctcctcagcaaatgtaaaagaacagaaattataacaaactatctctcagaccacagtgcaatcaaactagaactcaggattaagaatctcactcaaagccgctcaactacatggaaactgaacaacctgctcctgaatgactactgggtacataacgaaatgaaggcagaaataaagatgttctttgaaaccaacgagaacaaagacaccacataccagaatctctgggacgcatgcaaagcagtgtgtagagggaaatttatagcactaaatgcctacaagagaaagcaggaaagatccaaaattgacaccctaacatcacaattaaaagaactagaaaagcaagagcaaacacattcaaaagctagcagaaggcaagaaataactaaaatcagagcagaactgaaggaaatagagacacaaaaaacccttcaaaaaatcaatgaatccaggagctggtttcttgaaaggatcaacaaaattgatagaccgctagcaagactaataaagaaaaaaagagagaagaatcaaatagactcaataaaaaatgataaaggggatatcaccaccgatcccacagaaatacaaactaccatcagagaatactacaaacacctctacgcaaataaactagaaaatctagaagaaatggatacattcctcgacacatacaccctcccaagactaaaccaggaagaagttgaatctctgaatagaccaataacaggctctgaaattgtggcaataatcaatagcttaccaaccaaaaagagtccaggaccagatggattcacagccgaattctaccagaggtacaaggaggaactggtaccattccttctgaaactattccaatcaatagaaaaagagggaatcctccctaactcattttatgaggccagcatcattctgataccaaagccgggcagagacacaaccaaaaaagagaattttagaccaatatccttgatgaacattgatgcaaaaatcctcaataaaatactggcaaaccgaatccagcagcacatcaaaaagcttatccaccatgatcaagtgggcttcatccctgggatgcaaggctggttcaatatacgcaaatcaataaatgtaatccagcatataaacagagccaaagacaaaaaccacatgattatctcaatagatgcagaaaaagcctttgacaaaattcaacaacccttcatgctaaaaactctcaataaattaggtattgatgggacgtatttcaaaataataagagctatctatgacaaacccacagccaatatcatactgaatgggcaaaaactggaagcattccctttgaaaactggcacaagacagggatgccctctctcaccgctcctattcaacatagtgttggaagttctggccagggcaatcaggcaggagaaggaaataaagggtattcaattaggaaaagaggaagtcaaattgtccctgtttgcagacgacatgattgtatatctagaaaaccccatcgtctcagcccaaaatctccttaagctgataagcaacttcagcaaagtctcaggatacaaaatcaatgtacaaaaatcacaagcattcttatacaccaacaacagacaaacagagagccaaatcatgactgaactcccattcacaattgcttcaaagagaataaaatacctaggaatccaacttacaagggatgtgaaggacctcttcaaggagaactacaaaccactgctcaaggaaataaaagaggacacaaacaaatggaagaacattccatgctcatgggtaggaagaatcaatatcgtgaaaatggccatactgcccaaggtaatttacagattcaatgccatccccatcaagctaccaatgactttcttcacagaattggaaaaaactactttaaagttcatatggaaccagaaaagagcccgcatcgccaagtcaatcctaagccaaaagaacaaagctggaggcatcacactacctgacttcaaactatactacaaggctacagtaaccaaaacagcatggtactggtaccaaaacagagatatagatcaatggaacagaacagagccctcagaaataatgccgcgtatctacaactatctgatctttgacaaacttgagaaaaacaagcaatggggaaaggattccctatttaataaatggtgctgggaaaactggctagccatatgtagaaagctgaaactggatcccttccttacaccttatacaaaaatcaattcaagatggattaaagatttaaacgttagacctaaaaccataaaaaccctagaagaaaacctaggcattaccattcaggacataggcgtgggcaaggacttcatgtccaaaacaccaaaagcaatggcaacaaaagccaaaattgacaaatgggatctaattaaactaaagagcttctgcacagcaaaagaaactaccatcagagtgaacaggcaacctacaacatgggagaaaattttcgcaacctactcatctgacaaagggctaatatccagaatctacaatgaactcaaacaaatttacaagaaaaaaacaaacaaccccatcaaaaagtgggcgaaggacatgaacagacacttctcaaaagaagacatttatgcagccaaaaaacacatgaaaaaatgctcatcatcactggccatcagagaaatgcaaatcaaaaccactatgagatatcatctcacaccagttagaatggcaatcattaaaaagtcaggaaacaacaggtgttccagcctgctggctccagagagtccagatggtccagatgaggaaggtttccccacaacacagcacagctgtgctaccaaaaagcagccagactgcttctttaagcaggccctgatcttgttcctcctgactggaaccaaagacaaaaatcacatgattatctcaatagatgcagaaaaggccatcaataaaattcagtatcccttcaagttaaaaaccctcaataaactaggtattgaaggagcacacatcaaaataataagagccatatatgacaaactcacagccaatatcataccgaatgggcaaaagctggaagcatttcccttgaaaagcagcacaagacaaggataccctctctcacaactcctattcaacatagtattggaagttctggccagggcaatcaggcaagataaagaaataaaggataatcttggtattcacagaatagccgagagaagagaccaccaggagttcacacgtgtgaggcaaatgtccactcaccatgctctaatggcctacagagttctgtag

SEQ ID NO: 131781 - DNA, 3384 bp, Homo sapiens; identical to SEQ ID NO: 120168

SEQ ID NO: 131782 - DNA, 2199 bp, Homo sapiens
atgaagatgttctttgaaaccaatgagaacaaagacacaacataccagaatctctgggacacattcaaagcagtgtgtagagggaaatttatagcactacatgcccacaagagaaagcaggaaagatccaaaattgacaccctaatgtcacaattaaaagaactagaaaagcaagagcaaacacattcaaaagctagcagaaggcaagaaataactaaaatcagagcagaactgaaggaaatagagaccaaaaaaacccttcaaaaaattaatgaatccaggaactggttttttgaaaagatcaacaaaatcgatagactgctagcaagactaataaagaagagaagagagaagaatcaaatagacgcaataaaaaatgataaaggggatatcaccagcgatcccacagaaatacaaactaccatcagagaatactacaaacacctctacgcaaataaactagaaaatctagaagaaatggataaattcctcgacacatccaccctcccaagactaaaccaggaagaagttgaatctctgaatagaccaataacaggctctgaaattgtggcaataatcaatagcttaccaaccaaaaaaagtccaggaccagatggattcacagccgaattctaccagaggtacaaggaggagctggtatcactccttctgaaactattccaattaatagaaaaagagggaatccttcctaactcattttatgaggccagcatcatcctgataccaaagccgggcagagacacaaccaaaaaagagaattttagaccaatatccttgatgaacattgatgcaaaaatcctcagtaaaatactggcaaaccgaatccagcagcacatcaaaaagctgatccaccatgatcaagcaggcttcatccctgggatgcaaggctggttcaacatatgcaaatcaataaatgtaatccatcatataaacagaaccaaagacaaaaaccacatgattatctcaatagatgcagaaaaggcctctgacaaaattcaacaacccttcatgctaaaaactctcaataaattagaattggaaaaaactactttaaagttcatatggaaccaaaaaagagcccggatcgccaagtcaatcctaagccaaaagaacaaagccggaggcatcaagctacctgacttcaaactatactacaaggctacagtaaccaaaacagcatggtattggtaccaaaacagagatatagatcaatggaacagaacagagccctcagaaataacgctgcatatctacaactatctgatctttgacaaacctgagaaaaacaagcaatggggaaaggattccctatttaataaatggtgctgggaaaactggctagccatatgtagaaagctgaaactggatcccttccttacaccttatacaaaaattaattcaagatggattaaagacttaaacgttagacctaaaaccataaaaaccctagaagaaaacctaggcattaccattcaggacataggcatgggcaaggacttcatgtctacaacaccaaaagcaatggcaacaaaagccaaaattgacaaatgggatctaattaaactaaagagcttctgcacagcaaaagaaactaccatcagagtgaacaggcaacctacaaaatgggagaaaattttcacaacctactcatctgacaaagggttaatatccagaatctacaatgaactcaaacagatttacaagaaaaaaacaaacaaccccatcaacaagtgggcgaaggacatgaacagacacttctcaaaagaagacatttatgcagccaaaaaacacatgaaaaaatgctcatcatcactggccatcagagaaatgcaaatcaaaaccacaatgagagaccatctcacaccagttagaatggcaatcattaaaaagtcaggaaacaacaggtgccagcagaaggatgggaccctccagattctgcaggagaagggggaggactcctccttgccctggcggcacctccactgctgccaccgaggccgacggtacagcacccacagcttcctacccacgccaggccaggtggctccgcagtgctcctactcccacttcccaggacccccagacttgctgctgctgccaccactaaggccaatgccaatacaaccactgctgctgtcaccctcgatgcaccggcactccctacaaggcccctactag

SEQ ID NO: 131783 - DNA, 3927 bp, Homo sapiens
atgggagactttaacaccccactgtcaacattagacagatcaacgagacagaaagtcaacaaggatacccaggaattgaactcagctctgcaccaagcagacctaatagacatctacagaactctccaccccaaatcaacagaatatacatttttttcagcaccacaccacacctattccaaaattgaccacatagttggaagtaaagctctcctcagcaaatgtaaaagaacagaaattataacaaactatctctcagaccacagtgcaatcaaactagaaatcaggattaagaatctcactcaaagccactcaactacatggaaactgaacaacctgctcctgaatgactactgggtacataacgaaatgaaggcagaaataaagatgttctttgaaaccaacgagaacaaagacaccacataccagaatctctgggacgcattcaaagcagtgtgtagagggaaatttatagcactaaatgcctacaagagaaagcaggaaagatccaaaattgacagcctaacatcacaattaaaagaactagaaaagcaagagcaaacacattcaaaagctagcagaaggcaagaaataactaaaatcagagcagaactgaaggaaatagagacacaaaaaacccttcaaaaaatcaatgaatccaggagctggttttttgaaaggatcaacaaaattgatagaccactagcaagactaataaagaaaaaaagagagaagaatcaaatagacacaataaaaaatgataaaggggatatcaccaccgatcccacagaaatacaaactaccatcagagaatactacaaacacctctacgcaaataaactagaaaatctagaagaaatggatacattcctcgacacatacactctcccaagactaaaccaggaagaagttgaatctctgaatagaccaataacaggctctgaaattgtggcaataatcaatagtttaccaaccaaaaagagtccaggaccagatggattcacagccgaattctaccagaggtacaaggaggaactggtaccattccttctgaaactattccaatcaataggaaaagagggaatcctccctaactcattttatgaggccagcatcattctgacaccaaagccgggcagagacacaaccaaaaaagagaattttagaccaatatccttgatgaacattgatgcaaaaatcctcaataaaatactggcaaaccgaatccagcagcacatcaaaaagcttatccaccatgatcaagtgggcttcatccctgggatgcaaggctggttcaatatacgcaaatcaataaatgtaatccagcatataaacagagccaaagacaaaaaccacatgattatctcaatagatgcagaaaaagcctttgacaaaattcaacaacccttcatgctaaaaactctcaataaattaggtattgatgggacgtatttcaaaataataagagctatctatgacaaacccacagccaatatcatactgaatgggcaaaaactggaagcattccctttgaaaactggcacaagacagggatgccctctctcaccgctcctattcaacatagtgttggaagttctggccagggcaatcaggcaggagaaggaaataaagggtattcaattaggaaaagaggaagtcaaattgtccctgtttgcagacgacatgattgtttatctagaaaaccccatcgtctcagcccaaaatctccttaagctgataagcaacttcagcaaagtctcaggatacaaaatcaatgtacaaaaatcacaagcattcttatacaccaacaacagacaaacagagagccaaatcatgggtgaactcccattcacaattgcttcaaagagaataaaatacctaggaatccaacttacaagggatgtgaaggacctcttcaaggagaactacaaaccactgctcaaggaaataaaagaggacacaaacaaatggaagaacattccatgctcatgggtaggaagaatcaatatcgtgaaaatggccatactgcccaaggtaatttacagattcaatgccatccccatcaagctaccaatgactttcttcacagaattggaaaaaactactttaaagttcatatggaaccaaaaaagagcccgcatcgccaagtcaatcctaagccaaaagaacaaagctggaggcatcacactacctgacttcaaactatactacaaggctacagtaaccaaaacagcatggtactggtaccaaaacagagatatagatcaatggaacagaacagagccctcagaaataatgccgcatatctacaactatctgatctttgacaaacctgagaaaaacaagcaatggggaaaggattccctatttaataaatggtgctgggaaaactggctagccatatgtagaaagctgaaactggatcccttccttacaccttatacaaaaatcaattcaagatggattaaagatttaaacgttagacctaaaaccataaaaaccctagaagaaaacctaggcattaccattcaggacataggcgtgggcaaggacttcatgtccaaaacaccaaaagcaatggcaacaaaagccaaaattgacaaatgggatctaattaaactaaagagcttctgcacagcaaaagaaactaccatcagagtgaacaggcaacctacaacatgggagaaaattttcgcaacctactcatctgacaaagggctaatatccagaatctacaatgaactcaaacaaatttacaagaaaaaaacaaacaaccccatcaaaaagtgggcgaaggacatgaacagacacttctcaaaagaagacatttatgcagccaaaaaacacatgaagaaatgctcatcatcactggccatcagagaaatgcaaatcaaaaccactatgagatatcatctcacaccagttagaatggcaatcattaaaaagtcaggaaacaacagctcgagggaagcagccccgaagcctccgcggcggcggcggcggcggtcgcggatcctctccaggctgctcgcaaagtccggccggccggaggcagccgccaactcctctcaacttctgccgatccgctgggcgaagcaacacgcttcctgcgcgtctctcctaggggctgagccggtctccgagggtctcggccgcctccactccctggcgctgcacacaacttacgtggaggccaggcccgcgcggggggcccagagaaagccggcgccgggcgaggctcttgcaggttctcagacccgaacacagacctgggttagagttggggacttgcctgtaataagtgacttacccattgccctcaacctaaggaagccttgccatttaaaacctcccaatggagcctatcaaagcgtgcttcaaagtgtgagggaggctgagagaggaattacagaaccgcctgacattggctgcaacctgatggggagatctgactcaaggaacagtacgatggccattgatgtccccgcccacgcactctgtagaagccttgggaatcttttcaaagcactgcccccacccgagagcatcatgacttctgttgctgggacaaaggtaagaatcattaggaaacacgatcacagtagtgcacctgcttacgcacgatatccagcccagagaaggtcccgcttcctaagccctcctgagactcaccagccacaagcccacatctatactaagttctttcgaaggccctctttactgctggacattcttcctttgtgcaacacgttaataaacccaacttggttcagccacagcgctgcaatgaacattcacggcataaaaaggaatgagagcatgtcttttgcaggagcatggatggagctggaggttatcatccttagcaaactaacacaagaacagaaaaccaaataccgcaagttctcacttataagtgggcactaa

SEQ ID NO: 131784 - DNA, 3348 bp, Homo sapiens; identical to SEQ ID NO: 120169

SEQ ID NO: 131785 - DNA, 2385 bp, Homo sapiens
atggtaaagggatcaattcaacaagaggagctaactatcctaaatatttatgcacccaatacaggagcacccagattcataaagcaagtcctcagtgacctacaaagagacttagactcccacacattaataatgggagactttaacaccccactgtcaatattagacagatcaacgagacagaaagtcaacaaggatacccaggaattgaactcagctctgcaccaagcagacctaatagacatctacagaactctccaccccaaatcaacagaatatacatttttttcagcaccacaccacacctattccaaaattgaccacatagttggaagtaaagctctcctcagcaaatgtaaaagaacagaaattataacaaactgtctctcagaccacagtgcaatcaaactagaactcaggattaagaatctcactcaaagccgctcaactacatggaaactgaacaacctgctcctgaatgactactgggtacataacgaaatgaaggcagaaataaagatgttctttgaaaccaacgagaacaaagacaccacataccagaatctctgggacgcattcaaagcagtgtgtagagggaaatttatagcactaaatgcctacaagagaaagcaggaaagatccaaaattgacaccctaacatcacaattaaaagaactagaaaagcaagagcaaacacattcaaaagctagcagaaggcaacaaataactaaaatcagagcagaactgaaggaaatagagacacaaaaaacccttcaaaaaatcaatgaatccaggagctggttttctgaaaggatcaacaaaattgatagaccgctagcaagactaataaagaaaaaaagagagaagaatcaaatagacacaataaaaaatgataaaggggatatcaccaccgatcccacagaaatacaaactaccatcagagaatactacaaacacctctacgcaaataaactagaaaatctagaagaaatggatacattcctcgacacatacactctcccaagactaaaccaggaagaagttgaatctctgaatagaccaataacaggctctgaaattgtggcaataatcaatagtttaccaaccaaaaagagtccaggaccagatggattcacagccgaattctaccagaggtacaaggaggaactggtaccattccttctgaaactattccaatcaatagaaaaagagggaatcctccctaactcattttatgaggccagcatcattctgataccaaagccaggcagagacacaaccaaaaaagagaattttagaccaatatccttgatgaacattgatgcaaaaatcctcaataaaatactggcaaaccgaatccagcagcacatcaaaaagcttatccatcatgatcaagtgggcttcatccctgggatgcaaggctggttcaatatacgcaaatcaataaatgtaatccagcatataaacagagccaaagacaaaaaccacatgattatctcaatagatgcagaaaaggcctttgacaaaattcaacaacccttcatgctaaaaactctcaataaattaggtattgatgggacgtatttcaaaataataagagctatctatgacaaacccacagccaatatcatactgaatgggcaaaaactggaagcattccctttgaaaactggcacaagacagggatgccctctctcaccgctcctattcaacatagtgttggaagttctggccagggcaatcaggcaggagaaggaaataaagggtattcaattaggaaaagaggaagtcaaattgtccctgtttgcagacgacatgattgtttatctagaaaaccccatcgtctcagcccaaaatctccttaagctgataagcaacttcagcaacgtctcaggatacaaaatcaatgtacaaaaatcacaagcattcttatacaccaacaacagacaaacagagagccaaatcatgggtgaactcccattcacaattgcttcaaagagaataaaatacctaggaatccaacttacaagggacgtgaaggacctcttcaaggagaactacaaaccactgctcaaggaaataaaagaggacacaaacaaatggaagaacattccatgctcatgggtaggaagaatcaatatcgtgaaaatggccatactgcccaagagatacaagcagctggatgtagagaggaacacacaggtggaagagcacaccaacaggtaccggctgacaccagcaggccatcaaccggcgaggcgaaatgatgcggagtttggcccaggtggtcggggttatgagcagcgggacaccaaagaagagagccacacccccatcacaagccctgagaggggaacaagggaactttccctgtttcacttataa

SEQ ID NO: 131786 - DNA, 3723 bp, Homo sapiens; identical to SEQ ID NO: 120171

SEQ ID NO: 131787 - DNA, 3897 bp, Homo sapiens; identical to SEQ ID NO: 120172

SEQ ID NO: 131788 - DNA, 2427 bp, Homo sapiens
atgggctgcgttcgccagattataccattagggacacatccagtcgtgcaccaactaaccagtattcctcaaaactgtcaaagtcctcaaaaaacaaggaaagatcgggaaattggacagccaagaggagcctatggagacatgagaagcaaatgtaatgtgatgctgatgatggaatcctggaacagaaaaagaacattagaaatacaaactaccatcagagaatactataaacacctctacacaaataaactagaaaacctagaagagatggataaattccttgacacatacaccctcccaagactaaaccaggaagaagttgaatctctgaatagaccaataacacactctgacattgtgacaatcatcaatagcttaccaaccaaaaaaaagcccgggaccagacagattcacagccaaattctaccagaggtacaaggaggagctggtaccattccttctgaaactattccaatcaatagaaaaagaggaatcctccctaactcattttatgaggccagcatcatcctgataccaaagcttggcagagacacaacaaaaaaagagaattttagaccaatatccctgatgaacactgatgcaaaaatcctcaataaaatactggcaaaccgaatccagcaacatatcaaaaagcttatccaacatgatcaagtgggcttcatccctgggatgcaaggctggttcaacatacgcaaatcaataaacataatccagcatataaacagaatcaaagacaaaaaccacatgattatctcaatagatgcagaaaaggcctttgacaaaattcaacaacccttcatgctaaaaactctcaataaattaggtattgatgggacgtatctcaaaataataagagctatctatgacaaacccacagccaatatcatactgaatggacaaaagctggaagcattccctttgaaaactggcacaagacagggctgccctctctcaccactcctattcaacatagtgttggaagctctggccagggcaatcaggcaggagaaggaaataaagggtattcaattaggaaaagaggaagtcaaattgtccctgtttgcagatgacatgattgtatatctagaaaaccccattgtctcagcccaaaatctccttaagctgataagcaacttcagcaaagtctcaggatacaaaatcaatgtacaaaaatcacaagcattcttatacaccagcaacagacaaacagagagccaaatcatgagtgaactcccattcacaattgcttcaaagagaataaaatacctaggaatccaacttacaagggatgtgaaggacctcttcaaggagaactacaaaccactgctcaaggaaataaaagaggatacaaacaaatggaagaacattccatgctcatggataggaagaatcaatattgtgaaaatggccatactgcacaaagcactttatagattcaatgccatccccatcaagctaccaatgactttcttcacagaattggaaaaaactactttaaagttcatatggaaccaaaaaagagcctgcattgccaagtcaatcctaagccaaaagaacaaagctggaggcatcacgctacctgacttcaaactacactacaaggctacagtaaccaaaacagcatggtactggtaccaaaacagagatatagatcaatggaacagaacagagccctcagaaataataccacccatctacaactatctgatctttgacaaacttgacaaaaacaagaaatggggaaaggattgcctatttaacaaatggtgctggcaaaactggctagccatatgtagaaagctgaaactggatcccctccttacaccttatacaaaaatcaattcaagatggattaaagacttaaacgttagacctaaaaccataaaaaccctggaagaaaacctaggcattaccattcaggacataggcatgggcaaggacttcatgtccaaaacaccaaaagcaatggcaacaaaagacaaaattgacaaatgggatctaattaaactaaagagcttctgcacagcaaaagaaactaccatcagagtgaacaggcaacctacaaaatgggagaaaattttcgtaacctactcatctgacaaagggctaatatccagaatctacaatgaactcaaacaaatttacaagaaaaaaacaaacaaccccatcaaaaagtgggcgaaggacatgaacagacacttctcaaaagaagacatttatgcagccaaaaaacacatgaaaaaatgctcatcatcactggccatcagagaaatgcaaatcaaaaccacagtgagataccatctcacaccagttagaatggcaatcattaaaaagtcaggaaacaacagctgctggagaggatgtggagaaataggaacactgacactgttggtgggactgtaa

SEQ ID NO: 131789 - DNA, 3783 bp, Homo sapiens; identical to SEQ ID NO: 120174

SEQ ID NO: 131790 - DNA, 2811 bp, Homo sapiens
atgggagactttaacaccccactgtcaacattagacagatcaacgagacagaaagttaacaaggatatccaggaattgaactcagctctgcaccaagcagacctaatagacatctacagaactctccaccccaaatcaacagaatatacatttttttcagcaccacaccacacctattccaaaattgaccacatagttggaagtaaagctctcctcagcaaatgtaaaagaacagaaattataacaaactgtctctcagaccacagtgcaatcaaactagaactcaggattaagaaactcactcaaaaccgctcaactacatggaaactgaacaaaaatgactactgggtacataatgaaatgaaggcagaaataaagatgttctttgaaaccaacaagaacaaagacacaacataccagaatctctgggacacattcaaagcagtgtgtagagggaaatttatagcactaaatgcccacaagagaaagcaggaaagatccaaaattgataccctaacatcacaattaaaagaaccagaaaagcaagagcaaacacattcaaaagctagcagaaggcaagaaataactaaaatcagagcagaactgaaggaaatagagacacaaaaaacccttcaaaaaattaatgaatccaggagctggttttttgaaaggatcaacaaaattgatagaccgctagcaagactaataaagaagaaaagagagaagaatcaaatagacccaataaaaaatgataaaggggatatcaccaccgatcccacagaaatacaaactaccatcagagaatactacaaacacctctacacaaataaactagaaaatctagaagaaatggataaattcctcgacacatacactctcccaagactaaaccaggaagaagttgaatctctgaatagaccactaacaggctctgaaattgtggcaataatcaatagcttaccaaccaaaaagagtccaggaccagatggattcacagccgaattctaccagaggtacaaggaggaactggtaccattccttctgaaactattccaatcaatagaaaaagagggaatcctccctaactcatttgatgaggccagcatcatcctgataccaaagccgggcagagactcaaccaagaaagagaattttagaccaatatccttgatgaacattgatgcaaaaatcctcaataaaatactggcaaaccgaatccagcagcacatcaaaaagcttatccaccatgatcaagtgggcttcatccctgggatgcaagtctggttcaatatacgcaaatcaataaatgtaatccagcatataaacagaaccaaagacaaaaaccacatgattatctcaatagatgcagaaaaggcctttgacacaattcaacaacccttcatgctaaaaactctcaataaattaggtattgatgggatgtatctcaaaataataagagctatctatgacaaacccacagccaatatcacactgaatgggcaaaaactggaagcattccctttgaaaactggcacaagacagggatgccctctctcaccattcctattcaacatagtgttggggtatcccagtctacttctaccacatacttacactcctgatcatgtagttggacctggagcagacattgatcccactcaaataacctttcccggatgcatttgtgtcaaaactccctgcctccctggcacttgctcctgtctccgccatggagagaactatgatgataactcatgccttagagatataggatctggaggaaagtatgcagagcctgtttttgaatgcaatgtcctgtgccgatgcagtgaccactgcagaaacagagtggtccagaaaggtctacagttccacttccaagtgttcaagacgcataaaaaaggctggggacttcgtaccttggaatttataccgaaaggaaggtttgtctgtgaatatgctggtgaggttttaggattctctgaagttcagagaagaattcacttacaaacaaaatccgactccaattacattatagccatcagggaacatgtttataatgggcaggtaatggaaacatttgttgaccctacttatataggaaatattggaagattccttaatcattcttgtgagccaaaccttttgatgattcctgtccgaattgactcaatggtacctaagttggcactttttgcagccaaagatattgtgccagaagaagaactctcttatgattattcaggaagatatcttaatctaacagtcagtgaagacaaagaaaggctagatcatgggaaactaaggaaaccttgttactgtggtgccaaatcatgtactgctttcctgccttttgacagttctctgtactgccccgtagaaaagtcgaacatcagttgtggaaatgagaaggaacccagcatgtgtggctcagccccttctgtgttcccctcctgcaagcgattgacccttgaggttgatgccttccctcccaatggttatggcttatacaacatagtggggaacgcatgggaatggacttcagactggtggactgttcatcattctgttgaagaaacgcttaacccaatggtccccatccctgctggagtatttacaatgggcacagatgatcctcagataaagcaggatggggaagcacctgcgaggagagttactattgatgccttttacatggatgcctatgaagtcagtaatactgaatttgagaagtttgtgaactcaactggctatttgacagaggtccctcacacaacacctggggattatgggaactacaattcaagatga

SEQ ID NO: 131791 - DNA, 4845 bp, Homo sapiens
atggcgattgcaatggcggttcgctgcatccatcagcccatcatctacattaggtttagcgcttccttcaggagctcttttagggcaggcctggtggtgacaaaatctctcagcatttgcttgtctataaagtattttatttctccttcacttatgaagcttagtttggctggatatctctcagaccacagtgcaatcaaactagaactcaggattaagaatctcactcaaagccgctcaactacatggaaactgaacaacctgctcctgaatgactactgggtacataacgaaatgaagacagaaataaagatgttctttgaaaccaacgagaacaaagacaccacataccagaatctctgggatgcattcaaagcagtgtgtagagggaaatttatagcactaaatgcctacaagagaaagcaggaaagatccaaaattgacaccctaacatcacaattaaaagaactagaaaagcaagagcaaacacattcaaaagctagcagaaggcaagaaataactaaaatcagagcagaactgaaggaaatagagacacaaaaaacccttcaaaaaatcaatgaatccaggagctggttttttgaaaggatcaacaaaattgatagaccgctagcaagactaataaagaaaaaaagagagaagaatcaaatagacacaataaaaaatgataaaggggatatcaccaccaatcccacagaaatacaaactaccatcagagaatactacaaacacctctacgcaaataaactagaaaatctagaagaaatggatacattcctcgacacatacactctcccaagactaaaccaggaagaagttgaatctctgaatagaccaataacaggctctgaaattgtggcaataatcaatagtttaccaaccaaaaagagtccaggaccagatggattcacagccgaattctaccagaggtacaaggaggaactggtaccattccttctgaaactattccaatcaatagaaaaagagggaatcctccctaactcattttatgaggccagcatcattctgataccaaagccgggcagagacacaaccaaaaaagagaattttagaccaatatccttgatgaacattgatgcaaaaatcctcaataaaatactggcaaaccgaatccagcagcacatcaaaaagcttatccaccatgatcaagtgggcttcatccctgggatgcaaggctggttcaatatacgcaaatcaataaatgtaatccagcatataaacagagccaaagacaaaaaccacatgattatctcaatagatgcagaaaaagcctttgacaaaattcaacaacccttcatgctaaaaactctcaataaattaggtattgatgggacgtatttcaaaataataagagctatctatgacaaacccacagccaatatcatactgaatgggcaaaaactggaagcattccctttgaaaactggcacaagacagggatgccctctctcaccgctcctattcaacatagtgttggaagttctggccagggcaatcaggcaggagaaggaaataaagggtattcaattaggaaaagaggaagtcaaattgtccctgtttgcagacgacatgattgtttatctagaaaaccccatcgtctcagcccaaaatctccttaagctgataagcaacttcagcaaagtctcaggatacaaaatcaatgtacaaaaatcacaagcattcttatacaccaacaacagacaaacagagagccaaatcatgagtgaactcccattcacaattgcttcaaagagaataaaatacctaggaatccaacttacaagggatgtgaaggacctcttcaaggagaactacaaaccactgctcaaggaaataaaagaggacacaaacaaatggaagaacattccatgctcatgggtaggaagaatcaatatcgtgaaaatggccatactgcccaaggtaatttacagattcaatgccatccccatcaagctaccaatgactttcttcatagaattggaaaaaactactttaaagttcatatggaaccaaaaaagagcccgcatcgccaagtcaatcgtaagccaaaagaacaaagctggaggcatcacgctacctgacttcaaactatactacaaggctacagtaaccaaaacagcatggtactggtaccaaaacagagatatagatcaatggaacagaacagagccctcagaaataacgccgcatatctacaactatctgatctttgacaaacctgagaaaaacaagcaatggggaaaggattccctatttaataaatggtgctgggaaaactggctagccatatgtagaaagctgaaactggatcccttccttacaccttatacaaaaatcaattcaagatggattaaagatttaaacgttagacctaaaaccataaaaaccctagaagaaaacctaggtattaccattcaggacataggcgtgggcaaggacttcatgtccaaaacaccaaaagcaatggcaacaaaagccaaaattgacaaatgggatctaattaaactaaagagcttctgcaaagcaaaagaaactaccatcagagtgaacaggcaacctacaacatgggagaaaattttcgcaacctactcatctgacaaagggctaatatccagaatctacaatgaactcaaacaaatttacaagaaaaaaacaaacaaccccatcaaaaagtgggcgaaggacatgaacagacactactcaaaagaagacatttatgcagccaaaaaacacatgaagaaatgctcatcatcactggccatcagagaaatgcaaatcaaaaccactatgagatatcatctcacaccagttagaatggcaatcattaaaaagtcaggaaacaacagagatcagagagctgggaagatcagtgaaagacttgtgattacctcagaaatgattgaaaatatccaatctgttaaggcatactgctgggaagaagcaatggaaaaaatgattgaaaacttaagacaaacagaactgaaactgactcggaaggcagcctatgtgagatacttcaatagctcagccttcttcttctcagggttctttgtggtgtttttatctgtgcttccctatgcactaatcaaaggaatcatcctccggaaaatattcaccaccatctcattctgcattgttctgcgcatggcggtcactcggcaatttccctgggctgtacaaacatggtatgactctcttggagcaataaacaaaatacaggatttcttacaaaagcaagaatataagacattggaatataacttaacgactacagaagtagtgatggagaatgtaacagccttctgggaggagggatttggggaattatttgagaaagcaaaacaaaacaataacaatagaaaaacttctaatggtgatgacagcctcttcttcagtaatttctcacttcttggtactcctgtcctgaaagatattaatttcaagatagaaagaggacagttgttggcggttgctggatccactggagcaggcaagacttcacttctaatggtgattatgggagaactggagccttcagagggtaaaattaagcacagtggaagaatttcattctgttctcagttttcctggattatgcctggcaccattaaagaaaatatcatctttggtgtttcctatgatgaatatagatacagaagcgtcatcaaagcatgccaactagaagaggacatctccaagtttgcagagaaagacaatatagttcttggagaaggtggaatcacactgagtggaggtcaacgagcaagaatttctttagcaagagcagtatacaaagatgctgatttgtatttattagactctccttttggatacctagatgttttaacagaaaaagaaatatttgaaagctgtgtctgtaaactgatggctaacaaaactaggattttggtcacttctaaaatggaacatttaaagaaagctgacaaaatattaattttgcatgaaggtagcagctatttttatgggacattttcagaactccaaaatctacagccagactttagctcaaaactcatgggatgtgattctttcgaccaatttagtgcagaaagaagaaattcaatcctaactgagaccttacaccgtttctcattagaaggagatgctcctgtctcctggacagaaacaaaaaaacaatcttttaaacagactggagagtttggggaaaaaaggaagaattctattctcaatccaatcaactctatacgaaaattttccattgtgcaaaagactcccttacaaatgaatggcatcgaagaggattctgatgagcctttagagagaaggctgtccttagtaccagattctgagcagggagaggcgatactgcctcgcatcagcgtgatcagcactggccccacgcttcaggcacgaaggaggcagtctgtcctgaacctgatgacacactcagttaaccaaggtcagaacattcaccgaaagacaacagcatccacacgaaaagtgtcactggcccctcaggcaaacttgactgaactggatatatattcaagaaggttatctcaagaaactggcttggaaataagtgaagaaattaacgaagaagacttaaaggagtgcttttttgatgatatggagagcataccagcagtgactacatggaacacataccttcgatatattactgtccacaagagcttaatttttgtgctaatttggtgcttagtaatttttctggcagagtgggctcctgcgtggcccaagcctcctgacgagcaccgccccctgctccacggcacccagtcccatagaccgcccaagggctga

SEQ ID NO: 131792 - DNA, 3282 bp, Homo sapiens
gttgcttcacagtcttcccttctatctgattcagtggaccaagtaaatgactctctggtaactgcagaggctatttcctggaatgaatcaacgagtgaaacgaataactctatggtgactgaattcatttttctgggtctctctgattctcagggactccagaccttcctatttatgttgttttttgtattctatggaggaatcgtgtttggaaaccttcttattgtcataacagtggtatctgactcccaccttcactctcccatgtacttcctgctagccaacctctcactcattgatctgtctctgtcttcagtcacagcccccaagatgattactgactttttcagccagcgcaaagtcatctctttcaagggctgccttgttcagatatttctccttcacttctttggtgggagtgagatggtgatcctcatagccatgggctttgacagatatatagcaatatgcaaacccctacactacactacaattatgtgtggcaacgcatgtgtcggcattatggctgtcgcatggggaattggctttctccattcggtgagccagttggcctttgccgtgcacttacccttctgtggtcccaatgaggtcgatagtttttattgtgaccttcctagggtaatcaaacttgcctgtacagatacctacaggctagatattatggtcattgctaacagtgaaatacaaactaccatcagagaatactacaaacacctctacgcaaataaactagaaaatctagaagaaatggataaattcctggacacatacactctcccaagactaaaccaggaagaagttgaatctctgaatagaccaataacagaagctgaaattgtggcaataatcaatagcttaccaaccaaaaagagtccaggaccagatggattcacagccgaattctaccagaggtacaaggaggaactggtaccattccttctgaaactattccaatcaatagaaaaagagggagtcctccctaactcattttatgaggccagcatcattctgataccaaagccaggcagagacacaacaaaaaaagagaattttagaccaatatccttgatgaacattgatgcaaaaatcctcaataaaatactggcaaaacgaatccagcagcacatcaaaaagcttatccaccaagatcaagtgggcttcatccctgggatgcaaggctggttcaatatacgcaaatcaataaatgtaatccagcatataaacagagccaaagacaaaaaccacatgattatctcaatagatgcagaaaaggcctttgacaaaattcaacaacccttcatgctaaaaactctcaataaattaggtattgatgggacgtatttcaaaataataagagctatctatgacaaacccacagccaatatcatactgaatgggcaaaaactggaagcattccctttgaaaactggcacaagacagggatgccctctctcaccactcctattcaacatagtgttggaagttctggccagggcaattaggcaggagaaggaaataaagggtattcaattaggaaaagaggaagtcaaattgtccctgtttgcagacgacatgattgtatatctagaaaaccccattgtctcagcccaaaatcttcctaagctgataagcaacttcagcaaagtctcaggatacaaaatcaatgtacaaaaatcacaagcattcttatacaccaacaacagacaaacagagagccaaaccatgagtgaactcccattcacaattgcttcaaagagaataaaatacctaggaatccaacttacaagggacgtgaaggacctcttcaaggagaactacaaatcactgctcaaggaaataaaagaggatacaaagaaatggaagaacatgccatgctcatgggtaggaagaatcaatatcgtgaaaatggccatactgcccaaggtaatttacagattcaatgccatccccatcaagctaccaatgactttcttcacagaattggaaaaaactactttaaagttcatatggaaccaaaaaagagcccgcattgccaagtcaatcctaagccaaaagaacaaagctggaggcatcacgctacctgacttcaaactatacgacaaggctacagtaaccaaaacagcatggtactggtaccaaaacagagatatagatcaatggaacagaacagagccctcagaaataatgccgcatatctacaactatctgatctttgacaaacctgagaaaaacaagcaatggggaaaggattccctatttaataaatggtgctgggaaaactggctagccatatgtagaaagctgaaactggatcccttccttataccttatacaaaaatcaattcaagatggattaaagacttaaacgttagacctcaaaccataaaaaccctagaagaaaacctaggctttaccattcaggacataggcatgggcaaggacttcatgtctaaaacaccgagagaggcactcttatgcattgttggtgagaatacaaaatggagcaaagaccccagtgctttatccacacctccaacaagctgcagtcgaccacaaagaagaaacaagtctgtctcccatgggtcctacccacaccccctgctgttcaccatgaatgatagagtcaacagtgtgaaaacgaccatactgccaaaagcaacctacaaattcaatgcaattcccatcaaaataccaccatcattcttcacagaactagaaaaaacaaggctaaaattcacatggaaccaaaaaagagcccacatagccaaagcaagactaagcaaaaagaataaatctagaggcatcacattactcgacttcaaactatactataaggccatagtcaccaaaacagcatggtactggtataaaaataggcatatagaccaatggaatagaatagagaacccagaaataaagccaaatactttcagccaactgatctttgacaaagcaagcaaaaacataaagtggggaaaggacaccctattcaacaaatggtgctggtataattggcaagccacatgtagaagaatgcaactggatcctcatctctcaccttataaacaaatcaactcaagatggttcacagacttaaatctaagacctgaaaccataaaaattctagaagataagattggaaaaacccttctagacattggcttaggcaaagacttcacaatcaagaacccaaaagcaaacacaacaaagataaatagatgggacttaattaaactgaaagccttctgcacatcaaaataa

SEQ ID NO: 131793 - DNA, 2883 bp, Homo sapiens
atgaccggacaggcgcagaccaccaaccagctcatttcacttacactgttcacaagtaagaccatgaatggaaaaaagtcaatggcaaaaatcccacatcctgctaaagttggttatgtggacacttttctagcgagcgagtctgccttcaagctggaaagatccaaaattgacaccctaacatcacaattaaaagaactagaaaagcaagagcaaacacattcaaaagctagcagaaggcaagaaataactaaaatcagagcagaactgaaggaaatagagacacaaaaaacccttcaaaaaatcaatgaatccaggagctggttttttgaaaggatcaacaaaattgatagaccgctagcaagactaataaagagaaaaagagagaagaatcaaatagacacaataaaaaatgataaaggggatatcaccaccgatcccacagaaatacaaactaccatcagagaatactacaaacacctctacgcaaataaactagaaaatctagaagaaatggatacattcctcgacacatacactctcccaagactaaaccaggaagaagttgaatctctgaatagaccaataacaggctctgaaattgtggcaataatcaatagtttaccaaccaaaaagagtccaggaccagatggattcacagccgaattctaccagaggtacaaggaggaattggtaccattccttctgaaactattccaatcaatagaaaaagagggaatcctccctaactcattttatgaggccagcatcattctgataccaaagccgggcagagacacaaccaaaaaagagaattttagaccaatatccttgatgaacattgatgcaaaaatcctcaataaaatactggcaaaccgaatccagcagcacatcaaaaagcttatccaccatgatcaagtgggcttcatccctgggatgcaaggctggttcaatatacgcaaatcaataaatgtaatccagcatataaacagagccaaagacaaaaaccacatgattatctcaatagatgcagaaaaagcctttgacaaaattcaacaacccttcatgctaaaaactctcaataaattaggtattgatgggacgtatttcaaaataataagagctatctatgacaaacccacagccaatatcatactgaatgggcaaaaactggaagcattccctttgaaaactggcacaagacagggatgccctctctcaccgctcctattcaacatagtgttggaagttctggccagggcaatcaggcaggagaaggaaataaagggtattcaattaggaaaagaggaagtcaaattgtccctgtttgcagacgacatgattgtttatctagaaaacctcatcgtctcagcccaaaatctccttaagctgataagcaacttcagcaaagtctcaggatacaaaatcgatgtacaaaaatcacaagcattcttatacaccaacaacagacaaacagagagccaaatcatgggtgaactcccattcacaattgcttcaaagagaataaaatacctaggaatccaacttacaagggatgtgaaggacctcttcaaggagaactacaaaccactgctcaaggaaataaaagaggacacaaacaaatggaagaacattccatgctcatgggtaggaagaatcaatatcgtgaaaatggccatactgcccaaggtaatttacagattcaatgccatccccatcaagctaccaatgactttcttcacagaattggaaaaaactactttaaagttcatatggaaccaaaaaagagcccgcattgccaagtcaatcctaagccaaaagaacaaagctggaggcatcacactacctgacttcaaactatactacaaggctacagtaaccaaaacagcatggtactggtaccaaaacagagatatagatcaatggaacagaacagagccctcagaaataatgccgcatatctacaactatctgatctttgacaaacctgagaaaaacaagcaatggggaaaggattccctatttaataaatggtgctgggaaaactggctagccatatgtagaaagctgaaactggatccctttcttacaccttatacaaaaatcaattcaagatggattaaagatttaaacgttagacctaaaaccataaaaaccctagaagaaaacctaggcattaccattcaggacataggcgtgggcaaggacttcatgtccaaaacaccaaaagcaatggcaacaaaagccaaaattgacaaatgggatctaattaaactaaagagcttctgcacagcaaaagaaactaccatgagagtgaacaggcaacctacaacatgggagaaaattttcacaacctactcatctgacaaagggctaatatccagaatctacaatgaactcaaacaaatttacaagaaaaaaacaaacaaccccatcaaaaagtgggcgaaggacatgaacagacacttctcaaaagaagacatttatgcagccaaaaaacacatgaagaaatgctcatcatcactggccatcagagaaatgcaaatcaaaaccactatgagatatcatctcacaccagtgcagctggaagcccttctcttcctaacccctgtccatgaggagtcgtgtcacctggtcccccgagatgggattgtagcaggagggcatgtgttaagcccgtttcaagagatactcttcttgctcttgcagctgcttgctctcatctctgagctgcccttctcaggctgctcttgccttacccagatgcaacaaatagtatcagtggactcagaggaccaaagtgatggaagagtcatggacgaatggagcctgagacctgaatcattgctaaaagatgaactacttagaaatgttgttcgataa

SEQ ID NO: 131794 - DNA, 3213 bp, Homo sapiens
atgtcaagtgaatgggagtggttgaggtgctcagaagttaaaggtcagagagacgtgaggccagggtgtttggggtgggactttcgtgtgtatattgttgaggacacccaggatgaggacagaacttggagtgtcaaggaagcctgtgagctggtccttagagttcaggaaatgatcatcacaagggtggtagatgctgcaccacaccacacctattccaaaattgaccacatagttggaagtaaagctctcctcagcaaatgtaaaagaacagaaattataacaaactgtctctcagaccacagtgcaatcaaactagaactcaggattaagaatctcactcaaagccgctcaactacatggaaactgaacaacctgctcctgaatgactactgggtacataacgaaatgaaggcagaaataaagatgttctttgaaaccaacgagaacaaagacaccacataccagaatctctgggacgcattcaaagcagtgtgtagagggaaatttatagcactaaatgcctacaagagaaagcaggaaagatccaaaattgacaccctaacatcacaattaaaagaactagaaaagcaagagcaaacacattcaaaagctagcagaaggcaagaaataactaaaatcagagcagaactgaaggaaatagagacacaaaaaacccttcaaaaaatcaatgaatccaggagctggttttttgaaaggatcaacaaaattgatagaccgctagcaagactaataaagaaaaaaagagagaagaatcaaatagacgcaataaaaaatgataaaggggatatcaccaccgatcccacagaaatacaaactaccatcagagaatactacaaacaactctacgcaaataaactagaaaatctagaagaaatggatacattcctcgacacatacactctcccaagactaaaccaggaagaagttgaatctctgaatagaccaataacaggctctgaaattgtggcaataatcaatagtttaccaaccaaaaagagtccaggaccagatggattcacagccgaattctaccagaggtacaaggaggaactggtaccattccttctgaaactattccaatcaatagaaaaagagggaatcctccctaactcattttatgaggccagcatcattctgataccaaagccaggcagagacacaaccaaaaaagagaattttagaccaatatccttgatgaacattgatgcaaaaatcctcaataaaatactggcaaaccgaatccaacagcacatcaaaaagcttatccaccatgatcaagtgggcttcatccctgggatgcaaggctggttcaatatacgcaaatcaataaatgtaatccagcatataaacagagccaaagacaaaaaccacatgattatctcaatagatgcagaaaaggcctttgacaaaattcaacaacccttcatgctaaaaactctcaataaattaggtattgatgggacgtatgtcaaaataataagagctatctatgacaaacccacagccaatatcatactgaatgggcaaaaactggaagcattccctttgaaaactggcacaagacagggatgccctctctcaccgctcctattcaacatagtgttggaagttctggccagggcaatcaggcaggagaaggaaataaagggtattcaattaggaaaagaggaagtcaaattgtccctgtttgcagacgacatgattgtttatctagaaaaccccatcgtctcagcccaaaatctccttaagctgataagcaacttcagcaaagtctcaggatacaaaatcaatgtacaaaaatcacaagcattcttatacaccaacaacagacaaacagagagccaaatcatgggtgaactcccattcacaattgcttcaaagagaataaaatacctaggaatccaacttacaagggatgtgaaggacctcttcaaggagaactacaaaccactgctcaaggaaataaaagaggatacaaacaaatggaagaacattccatgctcatgggtaggaagaatcaatatcgtgaaaatggccatactgcccaaggtaatttatagattcaatgccatccccatcaagctaccaatgactttcttcacagaattggaaaaaactactttaaagttcatatggaaccaaaaaagagcccgcattgccaagtcaatcctaagccaaaagaacaaagctggaggcatcacactacctgacttcaaactatactacaaggctacagtaaccaaaacagcatggtactggtaccaaaacagagatatagatcaatggaacagaacagagccctcagaaataatgccgcatatctacaactatctgatctttgacaaacctgagaaaaacaagcaatggggaaaggattccctatttaataaatggtgctgggaaaactggctagccatatgtagaaagctgaaactggatcccttccttacaccttatacaaaaatcaattcaagatggattaaagatttaaacgttagacctaaaaccataaaaaccctagaagaaaacctaggcattaccattcaggacataggcgtgggcaaggacttcatgtccaaaacaccaaaagtaatggcaacaaaagccaaaattgacaaatgggatctaattaaactcaagagcttctgcacagcaaaagaaactaccatcagagtgaacaggcaacctacaacatgggagaaaattttcgcaacctactcatctgacaaagggctaatatccagaatctacaatgaactcaaacaaatttacaagaaaaaaacaaacaaccccatcaaaaagtgggcgaaggacatgaacagacacttctcaaaagaagacatttatgcagccaaaaaacacatgaagaaatgctcatcatcactggccatcagagaaatgcaaatcaaaaccactatgagatatcatctcacaccagttagaatggcaatcattcaaaagtcaggaaacaacagggacaacacaaaggaagcactgctgtgtaacaacttggtggctgaagtcttggaggccaaacaggctcagaagcttcaaggcaaagcagccgtcctcagcctctcaaaaatctatgcgatcacagagacaaatgctgagacacccaacaggaagatgaaaattaaactgaagagacccatgaccaaattgcacccaagcatccaaatgttggtg

SEQ ID NO: 131795 - DNA, 2561 bp, Homo sapiens
atgaaggcagaaataaagacgttctttgaaactaacaagaacaaagacacaacataccagaatctctgggacacatttaaagcagtgtgtagagggaaatttatagcactaaatgcccacaagagaaagcaggaaagatctaaaattgacaccctaacatcacaattaaaagaactagaaaagcaagagcaaacatattcaaaagctagcagaaggcaagaaataactaagatcagagcagaactgaaggaaatagagacacaaaaaacccttcaaaaaattaatgaatccaggagctggttttttgaaaagatcaacaaaattgatagaccactaacaagactaataaagaagaaaagagagaagaatcaaatagactcaataaaaaatgacaaaggagatatcaccactgatcccacagaaatacaaactaccatcagagaatactataaacacctctacgcaaataaactagaaaatctagaagaaatggataaattccttgacacatacaccctcccaagactaaaccaggaagaagttgaatccctgaatagaccaataacaggctctgaaattgaggcaataattaatagcttacccaccaaaaaaagtccaggaccagatggattcacagctgaattctaccagaggtacaaggaggagctggtaccattccttctgaaactattccaatcaatagaaaaagagggaatcctccctaactcattttatgaggccagcatcatcctgataacaaagcctggcagacacacaacaaaaaagaattttagaccaatatccttgatgaacattggtgcaaaaatcctaaataaaatactggcaaaccgaatccagcaacacatcaaaaagcttatccaccatgatcaagtgggcttcatccctgggatgcaaggctggttcaacatacgaaaatcaataaatgtaatccagcatataaacataaccaacgacaaaaatcacatgattatctcaatagatgcagaaaatgcctttgacaaaattcaacaacgcttcatgctaaaaactctcaataaattaggcattgatgggatgtatctcaaaataataagagctatctatgacaaacccacagccacccaaaatctccttaagctgataggcaacttcagcaaagtctcaggatacaaaatcaatgtacaaaaatcacaagcattcttatacaccaataacagccaaacagagagccaaatcatgactgaactcccattcacaattgcttcaaagagaataaaatacctaggaatccaacttacaagggacgtgaaggacctcttcaaggagaactacaaaccactgctcagtgaaataaaagaggatacaaagaaagggaagaacattccatgctcatgggttggaagaatcaatatcatgaaaatggacatactgcccaaggtgatttatacattcaatgccatccccatcaagctacctatgactttcttcacagaagtggaaaaaactactttaaagttcatttgcaaccaaaaaagagcccgcattgccaagtcattcctaagccaaaagaacaaagctggaggcatcacgccacctgacttcaaactatactacaaggctacagtaaccaaaacagcatgctactggtaccaaaacagagatatagaccaatggaacagaacagagccctcagaaattatgcagcatatctacaactatctgatctttgacaaacctgacaaaaacaagcaatggggaaaggattccctatttaataaatggtgctgggaaaactggctagccatatgtagaaagctgaaactggattccttccttacaccttatacaaaaattaattcaagatggattaaagacttaaatattagacctaaaaccataaaaaccctagaagaaaacctaggcagtatcattcaggacataggcatgggcaaggacttcatgtctaaaacaccaaaagcaatggcaacaaaagccataattgatgaatgggatctgattaaactaaagagcttctgcacagcaaaagaaaccaccatgagagtgaacaggcaacctacagaatgggagaaaattttcgcaacctactcatctgacatagggctaatatccagaatctacaatgaactcaaacaaatttacaagaaaaaaaacaaacaaccccatccaaaagtggccaaaggatatgaacagacacttctcaaaagaagacatttatgcagccaacagacacatgaaaaaatgctcatcatcactggccatcagagaaatgcaaatcaaaaccacaatgagataccatctcacaccagttagaatggcgatcattaaaaagtcaggaaacaacaggtgctggagaggatgtggagaaataggaacacttttacactgttggtgggactgtaaactagttcaaccattgtggaagtcagtgtggcgattcctcagggatctagaactagaaataccatttgacccagccatcccattactgggcatacacccaaaggactataaatcatgctgctataacgacacatgcacac

SEQ ID NO: 131796 - DNA, 5044 bp, Homo sapiens
atgacaggatcaaattcacacataacaatattaactttaaatataaatggactaaattctgcaattaaaagacacagactggcaagttggataaagagtcaagacccatcagtgtgctgtattcaggaaacccatctcatgtgcagagacacacataggctcaaaataaaaggatggaggaagatctaccaagcaaatggaaaacaaaaaaaggcaggggttgcaatcctagtctctgataaaacagactttaaaccaacaaagatcaaaagagacaaagaaggccattacataatggtaaagggatcaattcaacaagaggagctaactatcctaaatatttatgcacccaatacaggagcacccagattcataaagcaagtcctgagtgacctacaaagagacttagactcccacacattaataatgggagactttaacaccccactgtcaatattagacagatcaacgagacagaaagtcaacaaggatacccaggaattgaactcagctctgcaccaagcagacctaatagacatctacagaactctccaccccaaatcaacagaatatacatttttttcagcaccacaccacacctattccaaaatcgaccacatagttggaagtaaagctctcctcagcaaatgtaaaagaacagaaattataacaaactatctctcagaccacagtgcaatcaaactagaactcaggattaagaatctcactcaaagccgctcaactacatggaaactgaacaacctgctcctgaatgactactgggtacataacgaaatgaaggcagaaataaagatgttctttgaaaccaacgagaacaaagacaccacataccagaatctctgggacgcattcaaagcagtgtgtagagggaaatttatagcactaaatgcctacaagagaaagcaggaaagatccaaaattgacaccctaacatcacaattaaaagaactagaaaagcaagagcaaacacattcaaaagctagcagaaggcaagaaataactaaaatcagagcagaactgaaggaaatagagacacaaaaaacccttcaaaaaatcaatgaatccaggagctggttttttgaaaggatcaacaaaattgatagaccgctagcaagactaataaagaaaaaaagagagaagaatcaaatagacacaataaaaaatgataaaggggatatcaccaccgatcccacagaaatacaaactaccatcagagaatactacaaacacctctacgcaaataaactagaaaatctagaagaaatggatacattcctcgacacatacactctcccaagactaaaacaggaagaagttgaatctctgaatggaccaataacaggctctgaaattgtggcaataatcaatagtttaccaaccaaaaagagtccaggaccagatggattcacagccgaattctaccagaggtacaaggaggaactggtaccattccttctgaaactattccaatcaatagaaaaagagggaatcctccctaactcattttatgaggccagcatcattctgataccaaagccgggcagagacacaaccaaaaaagagaattttagaccaatatccttgatgaacattgatgcaaaaatcctcaataaaatactggcaaaccgaatccagcagcacatcaaaaagcttatccaccatgatcaagtgggcttcatccctgggatgcaaggctggttcaatatacgcaaatcaataaatgtaatccagcatataaacagagccaaagacaaaaaccacatgattatctcaatagatgcagaaaaagcctttgacaaaattcaacaacccttcatgctaaaaactctcaataaattaggtattgatgggacgtatttcaaaataataagagctatctatgacaaacccacagccaatatcatactgaatgggcaaaaactggaagcattccctttgaaaactggcacaagacagggatgccctctctcaccgctcctattcaacatagtgttggaagttctggccagggcaatcaggcaggagaaggaaataaagggtattcaattaggaaaagaggaagtcaaattgtccctgtttgcagacgacatgattgtttatctagaaaaccccattgtctcagcccaaaatctccttaagctgataagcaacttcagcaaagtctcaggatacaaaatcaatgtacaaaaatcacaagcattcttatacaccaacaacagacaaacagagagccaaatcatgggtgaactcccattcacaattgcttcaaagaggataaaatacctaggaatccaacttacaagggatgtgaaggacctcttcaaggagaactacaaaccactgctcaaggaaataaaagaggacacaaacaaatggaagaacattccatgctcatgggtaggaagaatcaatatcgtgaaaatggccatactgcccaaggtaatttacagattcaatgccatccccatcaagctaccaatgactttcttcacagaattggaaaaaactactttaaagttcatatggaaccaaaaaagagcccgcattgccaagtcaatcctaagccaaaagaacaaagctggaggcatcacactaccttacttcaaactatactacaaggctacagtaaccaaaacagcatggtactggtaccaaaacagagatatagatcaatggaacagaacagagccctcagaaataatgccacatatctacaactatctgatctttgacaaacctgagaaaaaacaagcaatgggaaaaggattccctatttaataaatggtgctgggataactggctagccatatgtagaaagctgaaattggatcccttccttgcaccttatacaaaaatcaattcaagatggattaaagacttaaacgttagacctaaaaccataaaaaccctagaagaaaacctaggcaataccattcaggacataggcatgggcaaggacttcatatctaaaacaccaaaagcaatggcaacaaaagccaaaattgacaaatgggatctaattaaactaaagagcttctgcacagcaaaagaaactaccatcacagtgaacaggcaacctacagaatgggagaaaattttcgcaacctactcatctgacaaagggctaatatccagaatctacaatgaactcaaacaaatttacaaaaaaaaaaaaaaaacaagcccaccaaaaagtgggcaaaggatatgaacagacacttctcaaaagaagacatttatgctgccaaaaaacacatgaaaaaaatgctcatcatcactggccatcagagaaatgcaaatcaaaaccactatgagatatcatctcacaccagttagaatggcaatcattaaaaagtcaggaaacaacagggacatggatgaagctggaagccgtcactctcagcaaactaacataggaacagaaaaccaaacaccgcatgttctcactcataagtgggagttgaacaatgagaacacacagatgcagagaggggaacaacacaccctggagcctgttggaggagaaggtgaattaagaaaagataatcactcaaccaaaaatgaccagtacgataataggcattttcaactggctgtaggaaatggccttatggctaagaccttcatggtcagtttcttctataaagccagtgcctacgttgtacccacaggagaattgccagatttagatataattcagttaaaacaatttggaaacgcattgtcacatctaacagtaggaacctcagtcactcaaatacaaaatttaaatacaatgggaataattggatcccaagatagcagggaccaactggccacactcaaatgtcaaggtaaaggggacccaaaatatcaatgtgatcctccagttaaagtaggtgctaatggaggtcagataattaatgaagttttagctcaggtccaacttacagtgggtccaaagacaaatggatattggagaatgacagtggattatcataagcttaaccaagatgtgactccaattgtagctgctgtaccagatgtggtttcattgcttgaggttatatcaactcttcaaaaagacttctattgctttttccttctgcaaaatatcacactggtccattatattgatggcattatgctgactgaatccagtgagcaagaagtagcagacacactggacttattgactagtatacgtggactcatggaatgccttatccaccatcatggtatcccacacagcattgcctctgaccaaggccctcactttatggctaaagaattgtgggagtgggctcatgctcatggaattcactggtcttaccatattccccatcatcctgaagcagctggattgatagaatggcggaatgaccttttgaagtcacaattacaacaccaactaggtgacaatgctttgcagggctggggcaaagttctccagaaggccatgtatgctctgaatcagcatccaatatatgttactgtttttcccattgccaggattcataagtcctggaatcaaggggtggaagtagaagtggcatcactcaccatcacccctagtgatccactagcaaaatttttgctttccgttcccacaacattacattctcctggcctagaggtcttagttccagctggaggaatgctgccaccaggagacacaacaatcccattgaactggaagttaatattgccacctggacactttgggctcctcctacctttaagtcaacaggctaagaaggcagttacagtgttggctagggtgattgacccagactatcaggatgaaatcagtctactactccacaatggaggtaaggaagagtatgcatggaattcaggagatccattaggtgtctcttggtattaccatgccctgtcattaaggtcaatgagaactacaacagtgcaatccaggcaggattacaaatggcccagatacctcaggaatgaagatttgggtcatgttaccagggaaaaaaaacacaacctgctgaggtgcttgctgaaggctaagggaatatag

SEQ ID NO: 131797 - DNA, 471 bp, Homo sapiens
ttgctcttcgtgcccgtcgtatgtgctatgattttcctgatggcaattttgacgctcggcaatgtactttctgtcagctcgccggattatatgaccctgaatgctgtcacggattttggccagccgcaaccggatgcgatttgccgtagaagtagtgcgtgcggtgcgcgaaccgtcggcaacgacttcattattatctaccgactgtcgatgctcgacctggtcgaagacggcgggacttttgccgaaacggtagagctggcgcaggcagttgaagcggcgggcgcgaccattatcaacaccggcattggctggcatgaagcacgtattccgaccattgccacgcccgtgccgcgcggcgcatttagctgggtcacgcgcaaactgaaaggccacgtctcgctgccgctggtaaccacaaaccggattaacgatccgcaggttgccgacgatattctctcgagtacgcat

SEQ ID NO: 131798 - DNA, 505 bp, Homo sapiens
gccattacggctgagaatgcaggcggtttcatcgaggataaacagcgcacactctcgcggtgccatatattcccaggcatcttccagcgcagcctgcccgagcgtcagcatcgctttcttacgccgataaatagaagcaaatgtcacgccctgggcctgatgtggtacgttccatgtctcccgtttcatcagcttattgcatcgctcccaggaggttgcaattaagggagatatgccccgaccatcgttgttaaaagcgccactcatatcccgcatcccttatgacaaaaggtgttccggctcgcaattttaagtattaatacacgtaaaagtttcaatatggaacattcattaaagcatatgtttcactatgaaacataatttggggtaattttcttttcccttgcctgatgcacaatggattcatcggcagtcagtggtcgccgtgtcgttgaacatcatccatgccctaccgtaattgctggagcaaaataatgaaaaaatt

SEQ ID NO: 131799 - DNA, 837 bp, Homo sapiens
atgttgtatgtgaatcctagtgtgattggcgcgttcacgatgattacaaccgtttccgcgattctgtttatgttcgtctggacgattatcctttgctcgtaccttgtgtatcgcaaacagcgtcctcatctacatgagaagtcgatctacaagatgccgctcggcaagctgatgtgctgggtatgtatggcgttctttgtgttcgtggtcgtgttgctgacactggaagatgacactcgccaggcgctgctggttaccccgctgtggtttatcgcgctggggttgggctggctgtttattggtggtgcaggcttctggcggcggtgtgacgttattggtggtgtgtttaatcacttccagcagttcgcccgcttcatcgtgctcgctttccattacgctgattggccccattgcctggctgcccatgccttgtttgatcatcgggaagaggatctgctcttctttcatcatgtggctggaaagctcttcatgcagcatggtcagcttttgccttacctcagtatctgcaagacgcacatgtcgaaagcccgcttcgaatttcgctgggaagaccagtttaatctggccctcgacccgtttaccgcccgcgcttatcacgatgaaaccctgccgcaagagtcaggcctgtctcgatcaaatcttcgttggcaaagtcacctcgtgcctggtgaatcctcgcgcctgccacgaaaccaaaatgccaatccttcccgccgtgcagaaaaaaaatctggcggtggtcgaaacattcagaagctcattaatgaagtcactgtagaggagtttgacaagaaactgctgtcacatgcaatacag

SEQ ID NO: 131800 - DNA, 2229 bp, Homo sapiens
tcacagcatcaggggatgagccgggatcgcagagccaagtttggggtccggagtacaaataacgaaaccttttgcgccactggcagccaggctgtcgatcgcgttcaatgttttttcgccatccggcacggcaatcttaataacctcaaaccctaaatccttcccggctttatcggcaaacttccattcggtctggaaccacggctcttccggttgcttcaccagaaaaccgagcttcaggttctccgccatagcggattgtgacataacggctgccagaccaatggctgccagggctttagtaaatttgtgcatggttctctccgttttcagccccaggatgtgatgagccgacatcgaggtgccaaacaccgccgtcgatatgaactcttgggcggtatcagcttgcatgcctgcaggtccgttgcggtatgtcacggtctcccgtttgaccagccggtaaccgagcaggaactggcggatggttaccacattgaatattccggtatgaagttcggtctgttcttcgtgggtgagtacatcgggattgtgaccatctcgcgtccgcgttatgaccaggtaatgtccttcggctggaaaatctgcctgccgctgacgctgatcaacttgctggtaacggcggctgtcattctccaggttcgtagtatctggatgatcggcctgcacgcgttcgccaaatgcgaaacgcgaatgtacccggaagagccggtctatctgccgccccgttatcgtggtagtatcgttattcattccatagcgttttagtgccagccagaacatgccaacaatccccagcacgcccgccgccgccagcatccacaacgaaatccagccgcgaataatgccaataaacaggaagatagcgaatgcgatgatgatattggcgcgagtgccgccgacaatcatataagtcagcaagccaaaggcgaccgtgctgacgaggaaaaacagccacgctttgctgtcctggcgcagaaagtagaccaccagcatcgccgggatgaaaaagtaaaagaagcgttttaacgccacgccggagacttcactggaaaagatctgactgtaggagttaagccggaacagcaaaaagccgttgtgcatgaagaagatgccgacgcttaccagcgcgatacccatcaggatcacccacgtaagattggtctccacgcggttcatggtaaacagcggacggcgcggtacatcagcaacgcgtttgcgtaggcgggttttgtaggtgacatagtaaaccgcgtagaagcagcccgcagaaagcaacgctaaaggctgcaactgcttcgccatccagtcggcaataaacggctgggcgtcgcggttgggatgaataccgtcatcctgcatccattgtggcttgaggtagacctcttccataaaaaagggcagcagcggaacatcaaactctttggcgagtttggggtaaatggcgctaaaggcttcattataacggcgaccatagtttgcaggcagacgtatttgcattaacaatggttcagcgttggcggctttgacatcctgcaaaatctggcgcagcgtttgctcggtttgctgtggctgaaaaccacgcaaaccgtcattgccgcccagttcaaccagcacccaacgcggctgatgcgacgttttactctgccaattatcattcaacaaggcaggccaggccgcgctggcagacattcgatacccggcgctcaggctatcacccagaatcaataacgtgtccgcttcggcggcacggaagttaacaggacaggaacttgctatggttaccccatcaatatcttgtgggctaaggtggggggatatgagaggaagatgcgaaggaggcttttggttggggagaagggcggcaatgagatgtggctgtagttcaggaacagtcagggaagcagataattttggtaaaatatctgggccgccgtattgcaacaagcaataaaacaggcacatccgctcaaacacgtagaagcaacctttgaaagccagcaccagtttattgatgcggtgataacccttaaaccgataatagaaacgcagggaaccagctttattttgttgctccatcccagcctgcaacgtgtagctaaataccataaaaacttcccccatgcgacgatgactgagcggcgttttgccttttttatatttcagttccagttgggcgttatccgccagccacggtaattccttgtccat

SEQ ID NO: 131801 - DNA, 1578 bp, Homo sapiens
gtcctgtggcatatgagcgaaggtatggctgacttttcctaattgactggtcatcaactgccgcatctgttccacaggatggagcaacaaaataaagctggttccctgcgtttctattatcggtttaagggttatcaccgcatcaataaactggtgctggctttcaaaggttgcttctacgtgtttgagcggatgtgcctgttttattgcttgttgcaatacggcgggtaaccgttaagagttcagtgattgcccgtccctgacttgccgtcgcgtcaaggcgcaagacccgcgccgcctgggcattaataaattgcaaattaccctgctcgtcccagctaatcacgccatcatccatactttctaacagggcattaagttgatttaaatgacggttagtttcagcgagcaaactgtccgtcagcagtaaatttccgacctcgcgggcgattgccaacgtcaacggcaaatcagctgcggtagtttgctcaaccggacacgccagcgctattgttcccgtcaatcggcccttgctgtcaaacaacggcgttgcacaaaaggcccagttccagagtacctgtttgaaatgttgatcggccatcgtttgcggatcgccattacggctgagaatgcaggcggtttcatcgaggataaacagcgcacactctcgcggtgccatatattcccaggcatcttccagcgcagcctgcccgagcgtcagcatcgctttcttacgccgataaatagaagcaaatgtcagttgatacgaaccctgctaagtaccctgtgtactccaaaatgtggtccaggattcaagcatcggattgttctgtgcaagagcagtgacctttctaagacattcccagctgcacaatgtccagaggaaagcaaacctcctgtccgcatccgctgcagtttgggccgctgccctcctcctcgctgggtcacaggagactggggccagtcgactctagagatccccgacctggtcgaagacggcgggacttttgccgaaacggtagagctggcgcaggccattgaagcggcgggcgcgaccattatcaacaccggcattggctggcatgaagcacgtattccgaccattgccacgcccgtgccgcgcggcgcatttagctgggtcacgcgcaaactgaaaggccacgtctcgctgccgctggtaaccaccaaccggattaacgatccgcaggttgccgacgatattctctcgcgcggcgatgccgatatggtatcgatggcgcgaccgtttcttgctgatgcggagctgctgtcaaaagcgcaatcgggacgagccgatgagatcaacacttgtattggctgcaatcaggcctgtctcgatcaaatcttcgttggcaaagtcacctcgtgcctggtgaatcctcgcgcctgccacgaaaccaaaatgccaatccttcccgccgtgcagaaaaaaaatctggcggtggtcggtgcgggacctgctgggctggcgtttgccattaacgcggcggcgcgtgggcatcaggtaacattgtttgacgctcatagcgagattggcgggcagtttaatatcgccaaaca

SEQ ID NO: 131802 - DNA, 774 bp, Homo sapiens
tcagggacctgcaggaactgtttcgacaggggtaacataatggaaacctatgctgtttttggtaatccgatagcccacagcaaatcgccattcattcatcagcaatttgctcagcaactgaatattgcacatccctatgggcgcgtgttggcacccatcaatgatttcatcaacacactgaacgctttctttagtgctggtggtaaaggtgcgaatgtgacggtgccttttaaagaagaggcttttgccagagcggatgagcttactgaacgggcagcgttggctggtgctgttaataccctcatgcggttagaagatggacgcctgctgggtgacaataccgatggtgtaggcttgttaagcgatctggaacgtctgtcttttatccgccctggtttacgtattctgcttatcggcgctggtggagcatctcgcggcgtactactgccactcctttccctggactgtgcggtgacaataactaatcggacggtatcccgcgcggaagagttggctaaattgtttgcgcacactggcagtattcaggcgttgagtatggacgaactggaaggtcatgagtttgatctcattattaatgcaacatccagtggcatcagtggtgatattccggcgatcccgtcatcgctcattcatccaggcatttattgctatgacatgttctatcagaaaggaaaaactcctttaacagagggtctggtcaaaccttctgcatttgttcactttatactaataactaaatcatttagtaaataa

SEQ ID NO: 131803 - DNA, 863 bp, Homo sapiens
atgccgtcctgcgtcgcgaaatgcgtcagatggaaggtgcatggctggggagcgatctggtcgatcagggtaaggagcgtctgaatcgtctgggcttctttgaaactgtcgataccgatacccaacgtgttcgggtagcccggaccaggttgatgtcgtctacaagatgcgtaagcctcggtggacgtctcttctataatgacttccaggcagatgacgcagacctgtccgactataccaacaagaagatcgaaattatcgacagccatgccgattacttccacatcgatatcatggacggtcactttgtccccaatctgacactctcaccgttcttcgtaagtcaggttaaaaaactggcaactaaaccgctcgactgtcatctgatggtgacgcggccgcaggattacattgctcaactggcgcgtgcgggagcagatttcatcactctgcatccggaaaccatcaacggccaggcgttccgcctgattgatgaaatccgccgtcatgacatgaaagtggggctgatccttaacccggagacgccagttgaggccatgaaatactatatccataaggccgataaaattacggtcatgactgtcgatcccggctttgccggacaaccgttcattcctgaaatgctggataaacttgccgaactgaaggcatggcgtgaacgagaaggtctggagtacgaaattgaggtggacggttcctgcaaccaagcaacttacgaaaaactgatggcggcaggggcggatgtctttatcgtcggcacttccggcctgtttaatcatgcggaaaatatcgacgaagcatggagagttatgaccgcgcagattctggctgcaaaaagcgag

SEQ ID NO: 131804 - DNA, 893 bp, Homo sapiens
atgcgtaagcctcggtggacgtctcttctataatgacttccaggcagatgacgcagacctgtccgactataccaacaagaagatcgaaattatcgacagccatgccgattacttccacatcgatatcatggacggtcactttgtccccaatctgacactctcaccgttcttcgtaagtcaggttaaaaaactggcaactaaaccgctcgactgtcatctgatggtgacgcggccgcaggattacattgctcaactggcgcgtgcgggagcagatttcatcactctgcatccggaaaccatcaacggccaggcgttccgcctgattgatgaaatccgccgtcatgacatgaaagtggggctgatccttaacccggagacgccagttgaggccatgaaatactatatccataaggccgataaaattacggtcatgactgtcgatcccggctttgccggacaaccgttcattcctgaaatgctggataaacttgccgaactgaaggcatggcgtgaacgagaaggtctggagtacgaaattgaggtggacggttcctgcaaccaagcaacttacgaaaaactgatggcggcaggggcggatgtctttatcgtcggcacttccggcctgtttaatcatgcggaaaatatcgacgaagcatggagagttatgaccgcgcagattctggctgcaaaaagcgagcaatggggccaacaggtgtatgccattgtacaaaataccgaccaggcgcaggcagttatgccttatggtccaaaatgtctttatgttcttgcgcaaaacgacgcgctgcaacgcactgaaaattacgccgaaagcattgctgccctgctgaaagataaacaccccgctatgttgctgttggccgcgacgaaacgtg

SEQ ID NO: 131805 - DNA, 2057 bp, Homo sapiens
aagggcggaccggtatccgagcgggttcaagacttttgttatcgcattggctcgattctgctggtgctgttaatggggcttgcacttttcaatgatttctctcggttatgagagttagttaggaagaacgcataataacgatggcgatgcaaaaagttgctcatagcgtcgctgctgtttagcagcgccaccgtatacggtgctgaagggttcgtagtgaaagatattcatttcgaaggccttcagcgtgtcgccgttggtgcggccctcctcagtatgccggtgcgcacaggcgacacggttaatgatgaagatatcagtaataccattcgcgctctgtttgctaccggcaactttgaggatgttcgcgtccttcgtgatggtgatacccttctgtgtctcgtgcaagaacgtccgaacattgccagcattactttctccggtaacaaatcggtgaaagatgacatgctgaagcaaaccctcgaggcttatggtgtgcgtgtgggcgaatccctcgatcgcacccccattgccgatatcgagaaaggtctggaagacttctactacagcgtcggtaaatatagcgccagcgtaaaagctgtcgtgaccccgctgccgcgcaaccgtgttgacctaaaactggtgttccaggcaggtgtgtcagctgaaatccagcaaattaacattgttggtaaccatgctttcaccaccgacgaactgatctctcatttccaactgcgtgacgaagtgccgtggtggaacgtggtaggcgatcgtaaataccagaaacagaaactggcgggcgaccttgaaaccctgcgcagctactatctggatcgcggttatgcccgtttcaacatcgactctacccaggtcagtctgacgccagataaaaaaggtatttacgtcacggtgaacatcaccgaaggcgatcagtccaagctttctggcgttgtagtgagcggcaaccttgccgggcactccgctgaaattgagcagctgactaagatcgagccgggtgagctgtataacggcaccaaagtgaccaagatggaagatgacatcaaaaagcttctcggtcgctatggttatgcctatccgcgcgtacagtcgatgcccgaaattaacgatgccgacaaaaccgttaaattacgtgtgaacgttgatgcgggtaaccgtttctacgtgcgtaagatccgttttgaaggtaacgatacctcgaaagatgccgtcctgcgtcgcgaaatgcgtcagatggaaagtgcatggctggggaacgatctggtcgatcagggtaaggagcgtctggatcgtctgggcttctttgaaactgtcgataccgatacccaacgtgttccgggtagcccggaccaggttgatgtcgtctacaaggtaaaagagcgcaccaccggtagcttcaactttggtattggttacggtactgaaagtggcgtgagcttccaggctggtgtgcagcaggataactggttaggtacaggttatgctgttggtatcaacgggaccaaaaacgattaccagacctatgctgaactgtcggtaaccaacccgtacttcaccgtagatggcgtaagcctcggtggtcgtctcttctataatgacttccaggcagatgacgccgacctgtccgactataccaacaagagttatggtacagacgtgacgttgggcttcccgattaacgaatataactcgctgcgtgcaggtctgggttatgtacataactccctgtccaacatgcagcctcaggttgcgatgtggcgttatctgtactctatgggtgaacatccgagcacctctgatcaggataacagcttcaaaacggacgacttcacgttcaactatgcttgcccctataacaagcttgaccgtggttacttcccgacagatggttcacgtgtcaacctgaccggtaaagtgaccattcctggatcggataacgaatactacaaagtgacgttagacacggcgacttatgtgccgatcgatgacgatcacaaatgggttgttctggggcgtacccgctggggttatggtga

SEQ ID NO: 131806 - DNA, 366 bp, Homo sapiens
tgattcgatcctcctcgcacagcatacccgccatcgtaacggtgtccatacagtacttgccggattcgtcgaagtgggcgaaaccctcgagcaggcagtcgcgcgggaagtgatggaagagagcggaattaaagttaaaaacttgcgttacgtgacttctcagccgtggccgtttcctcagtctttaatgaccgcgtttatggcggaatatgacagcggcgacatcgtgatcgacccgaaagaattgctcgaggcgaactggtatcgctatgacgatttgccgttactcccgccgcccggcaccgtagcgcgccgtctgatagaagatacggtggcgatgtgtcgggcagagtatgagtgatgatt

SEQ ID NO: 131807 - DNA, 2265 bp, Homo sapiens
ttaatgacatctaaagtaatgaatgctttcagagattttcaatttactttgctgaaaaccattagaggaatcactatctgtggcagctatagtgttacaaaatgtatttcttatataataagacttcaaagttgaaattttaatggctttcgacgccatcatggtggcggtgccaacttcataaacctgcaaaatagccggcgcgttgccggtacgaaatgcggcaatccccgcgcttaaattctgttcgtagttgcctttataggtcggtacaattttgtaatccgggttttcggcgttaaaacgttgggccagagaatccacctctttacccagttccccttccatagaatgccagaacggaatggtcgtcactgcctgtgcattccccattaacgccagtccgagcgccagtgctgaagttctcaccgcttcattcgccagcagcgcatcaccagtatcggaaagcactacatggccgttttccagcacgtagccgcgatccgccagctttagcgcctggttggcgttctgctcgacgagaaagatagtcatcccctgctcgcgcagctgctcgatggtgtcgaaaatttggaccatcgccagcatctgctgttcaccgccggacatggtgcccgcccgctgatacgcgctcatgcagacgtggaagagaactgcgaccatcccttcatccttattgtgcatccatccatccatcccatcatttatttgtccatccatccatccactatccgtggggaacgcctgatgacgcagatcccactcatcaagcattttctcgctggcgtcacaggcctcaagcttactcagcagatgcgcttttgcgagaacgtctgcctcccactcatcgccaccgcgggcaatcgccagactcactaacatcgcttccatattggcgcgggcgtcgaaaatatcgagcagctcctgctctgacatagacgccacccgataccctttttgattcaccaccgtgaccagccgttccgccaccagttgcgaaagagcttcccgtaacggcccaacgccaagtgcataacgcgatgtcagcaaactcattcgtaatttttcatccggtagaaaattaccgcgaataatatcgttcttcagccagcgatagccatccagagacgtaatggctgcgtccatagcgtagtttccattgtgatgcacacatttgttcatccagcgtccaccacattcccaccacacaccatcacagcagcgctggcaagccatcaacatgtgtccaagccatagggtgttgccatcaatagcagctgcagcctcaaactccaccatttcaatttgcttcctgcaaggctttgttgatatgttcccgctggcctgggcagggatctccatgttctttatgcgctttatgctcggcttctcggaagcgccatcattcccggcgaacgcccgaattgtcgccgcctggttcccgacgaaagaacgtggtactgcctccgccatcttaactcggcgcgatatttctcgcaagctgaatatattagcttccagcatcccggtgttgttaccctcactactacttccgaggttccaggttccttcgttatttgccactgcagtacctgtcagcgcagcacctctcataatcgccccgtcagtttgattattaaagaccccgccagccgacatcatccgccctgttacactgccactattattgaatacccccgcgttctgcacgattttattgatggttccggtgttgttcactaacgaactatcagcaccagcattcatggtaatttgcgcagtcatttctccggcattattgaggattccaccgctaacatcgacgttattcgtcatcaccccggcatttttaatgacggcacccttgtcaagttttactaagttattgatgatgccaccgctggtattttccagaagaccgcttgataccgtaatttgatcaccggaaagcgttccgctattaacaacattcccagccagcttatcagtcacagcagcagatttatttagcgttacagtttctccgcttcgtgtaatcgtatcgccaccggtatagatcagtgaggtgaaatcatctgtattattgtactcattccccgattggcacacgccgaaagtgcagattgtaccatagttaacaattgttcctgtgccatcgttataaaacgcctgaacagtaccaacattgatattgataacacccgtctggtcgttgatagcagatacatgctcataaacagccat

SEQ ID NO: 131808 - DNA, 1041 bp, Homo sapiens
atgttggtgggggaaccgggtaccgcaaaatctcttctttctgaattactggcaaccgctattagcggcgatgccgggttaaccatccagggcggggcatctaccaccgaagatcaaatcaagtatggctggaactacgccctgcttatcaatcatggtccgtcaacggaagcgctggtccctgccccgctttatcagggaatgcgcgacggcaaaatcgtccgtttcgaagagataacgcgtacaccgctggaagtgcaggactgtctgttagcttcagcactggcgctcggactggcgttaatggggaatgcacaggcagtgacgaccattccgttctggcattctatggaaggggaactgggtaaagaggtggattctctggcccaacgttttaacgccgaaaacccggattacaaaattgtaccgacctataaaggcaactacgaacagaatttaagcgcggggattgccgcatttcgtaccggcaacgcgccgacgtattttgcaggtcatataatgcaagcctgcggcgttgctctttccgctactatctactttattcgccgcaaagtggttagtttaagcgatcagaaactcaatatcgccatgacctttgtcggctcaatgagcggcgcactgctggtgcaatacgttcaggctgatgtcttacggcagattttgcccattctggtaatttgtatcggcctctatttcttgctgatgccaaagctaggtgaagaagaccgccagcgccggatgtacggtttacccttcgcgttaatagccggtggctgcgtcggtttttatgatggattctttggcccggctgccgggtcgttttacgcgctggccttcgttacgctgtgcggatttaacctcgccaaagccacggctcacgccaaattactcaacgcaacgtcaaacatcggcggtttactgctgtttattctcggcggcaaagtgatttgggcgacgggctttgtcatgctggtggggcagttcctcggcgcgccgcatggggttccgacttgtgtttag

SEQ ID NO: 131809 - DNA, 1731 bp, Homo sapiens
tgtagagtttgattcagaccttctatattttcccgcttatccgtgccccatctcccattttccctcacccacgccgtcaccgccttgtcatctttctgacaccttactatcttacaaatgtaacaaaaaagttatttttctgtaattcgagcatgtcatgttaccccgcgagcataaaacgcgtgaattcgcgcattcggtacaacaagagagataaacgatgaaaccgttacattatacagcttcagcactggcgctcggactggcgttaatggggaatgcacaggcagtgacgaccattccgttctggcattctatggaaggggaaccgggtaaagaggtggattctctggcccaacgttttaacgccgaaaacccggattacaaaattgtaccgacctataaaggcaactacgaacagaatttaagcgcggggattgccgcatttcgtaccggcaacgcgccggctattttgcaggtttatgaagttggcaccgccaccatgatggcgtcgaaagccattaaaccggtgtatgacgtgtttaaagaggcagggattcagttcgatgagtcgcagtttgtgccgacggtttcaggttactactccgacagcaaaacgggccacttactctcccagccattcacgcagatcaacggttcaaaccattcaacgactcactgcgctttgattaccgtctggcggagcaggatattgttggctctgtggcctggtccaaagccctggtcacggtaggcgtgttaaccgcagaagagcaggcgcaactggaagaggcgctgaacgtgttgctggaagatgttcgcgccaggccacaacaaatccttgaaagcgacgccgaagatatccatagctgggtggaaggcaaactgatcgacaaagtgggccagttaggcaaaaagctgcataccgggcgtagccgtaatgatcaggtagcgactgacctgaaactgtggtgcaaagataccgttagcgagttactgacggctaaccggcagctgcaatcggcgctggtggaaaccgcacaaaactatcaggacgcggtaatgccaggttacactcacctgcaacgcgcccagccggtgacgttcgcgcactggtgcctggcctatattgagatgctggcgcgtgatggtatccgaactcgaggtgtaatactgtctccttttacccgggcaatttaccccctaaaaaaaagggtccacccaccgcaatgggccccacggcgaaaaatcacaacttgcaaaagcgaggcgggccccaccagccggaaaggccggataacactgaggaaacggccacggctgagaagtcacgtaacgcaagtttttaactttaattccgctctcttccatcacttcccgcgcgactgcctgctcgagggtttcgcccacttcgacgaatccggcaagtactgtatggacaccgttacgatggcgggtatgctgggcgaggaggatcgaatcatcgcgacggatggcaacaataatgcagggggcgatttgcgggtagtaacgctcacggcaatggctgcacagcatcgcccattcggttttgctcggatacatttcatgcccgcagtaaccacagtatttatgcgatcggtaaaactccgccagttgtacgcctcgtccggccagttgaaacagcccaacatcgagatcaatgacctgacgtaccgaccccatatcgtgacgccgctgctgttgtactaa

SEQ ID NO: 131810 - DNA, 1605 bp, Homo sapiens
atgatgaagctgattaatcgcagtaagcaatcacctattggtcgccgcgcttgcgatgttgcgctggcagctcacttgcaaacatatggcgactatgggcgaagcaagatgaaagagacttatacggtgaaggttgacagcgatgtctcatatgtcctgaaaccaaccagcagaggggagcaggctgaccaagccttctctctgggcatcgggatctgcttcatcgaactgcagggctgcagcgtccgggagaccaagagtcgaagctttgacctgcttcacaccccatcgctgcttcagagctgggcggccgctctgcaggaagcagtaaccgagaccctgtctgactacgaggtggctgagaagatctggtctaatcgggccaaccggcagtgtgcggactgtgggtcctcccgcccagattgggctgctgtcaatttgggggtggtcatctgcaagcagtgtgcagagcctgaagctggacaccgagtgtcttgggagtatgagatagtcagagccccagctcctgtctgtgggggagccatcacggtgttcgtgcagtccatagcgcttctcaatgtactgcaacgactggagcagaggcggcagcaggcttcagagcgggaggctccaagcatagaacagaggttacaggaagtgcgagagagcatccgccgggcacaggtgagccaggtgaagggggctgcccggctggccctgctgcagggggctggcttagatgtggagcgctggctgaagccagccatgacccaggcccaggatgaggtggagcaggagcggcggctcagtgaggctcggctgtcccagagggacctctctccaaccgctgaggatgctgagctttctgactttgaggaatgtgaggagacgggagagctctttgaggagcctgcccccaagccctggccacgagggccctcccctgccctgcacacgtggtatttcagctatcagcatagggtagagcaggactcgggaaaccagacaacggaggaggaaagagcaaaagatcacacaaaggaaacgaaaatatcaaacataccccggaaccacaaccactcacacaagcaggagacagagcaagaagacgtcgaacaatacactgaaggggacaagaagcgcaacaaggacaagaacaagggaaaactaacggaaaaagcagagacgccagagggaatagagaaaaaacaagctgagggagctcaggaggtcccccggggagacagcgaggggaggccggttggggaacgcgagagcccttcatctgaggacgatgacatgaatgaggacacagtagagaggattgttcgctgcatcatccagaatgaagccaatgctgaggccttgaaggagatgctgggggacagtgaaggagaagggacagtgcagctgtccagtgtggatgccacctccagcctgcaggacggagccccctcccatcatcacacagtgcacctgggctctgcagccccttgcctccattgcagccgcagcaagaggcctccacttgtccgtcagggacgctccaaggaaggaaaaagccgcccccggacaggggagaccactgtgttctctgtgggcagg

SEQ ID NO: 131811 - DNA, 637 bp, Homo sapiens
atctgcaccgcgtcagtgctcgccgggctatatccagcaaaggcagtacccgcgaaacagcgagtgatgtcgtagccactttgggagtgcagtgatgatgaagctgattaatcgcagtaagcaatcacctattggtcgccgcgcttgcgatgttgcgctggcagctcacttgcaaacatatggcgactatgggcgaagcaagatgaaagagacttatacggtgaagttgaaaggcgtaaaagtctgggtggaggtggtgaaccgaaaggcgagctacgtggccacagcgatgaccggcatgcgccgtctccgctccctgcccgggcaggttggttgaaaaagattttgaatggcccgaacgggcaactggagagagctatggatgatattttggtaacgtcagacctgaccagtcgctacaaaatttcacgcaaaaccctttggtcatggcaaagtgcagacacaatgcctcggggcttcgtatgcccgttcccaccccctgactggcccggcaaccctaaccgctggcgctctgagtcaatcaaagagtgggaggataaaaagaagataaattaactgaagggctctccgatgatctcttcaagatggctctgccaaacgcggagccagtgtttct

SEQ ID NO: 131812 - DNA, 1101 bp, Homo sapiens
atgatgaagctgattaatcgcagtaagcaatcacctattggtcgccgcgcttgcgatgttgcgctggcagctcacttgcaaacatatggcgactatgggcgaagcaagatgaaagagacttatacggtgaaggttgaaggcgtgaaagtctgggtggaggtggtgaaccgaaaggcgagctacgtggccacagcgatgaccggcatgcgccgtctccgctccctgcccgggcagctggacggcggcttggtggagggttgtgtggtccacgagagtgaaccgactaacaccgacgaccagggactaatggggcgggcggggcacccgccaaaggaccgcgcgtctgtggctgacccgtgccacgatatatggatcctcgacgagccttttaccgcgattgacgttaacggtgtcgatcgtctgacccagcgtatggcgcagcatacggagcagggggggattgtgattctgactacccaccagccgctcaacgttgctgaaacgtttcgccatagcgccgaaatcgccaacccgctgtggttcttcctgattgtaattaccctttttccgctcagtatcggtccggagccgcaactgctggcgcgtattgcaccgggcattatctgggttgctgcgctgctttcatccttgctggcgctggaacgactgttccgtgacgatttgcaggacggcagtcttgaacaattgatgttgttgccgttacccttgcccgccgttgtgctggcgaaggtgatggcgcactggatggtaaccggtctgccgttactcatcctttcgccactggtagcaatgctactgggaatggatgtttatggctggcaagtgatggcgctgacgctgctgctgggaacgcctacgcttggctttctcggtgcaccgggcgtggcgctgacagtgggacttaagcgcggtggtgtgctgctcagcatactggtgttaccgctgactatcccattactcatctttgccaccgccgcgatggacgcggcttctatgcatttgcccgttgacgggatttgctgtaaaccggcatacgcctccgtccgatcacggcatgccgcgaacgcgttgattacctag

SEQ ID NO: 131813 - DNA, 369 bp, Homo sapiens
atggcctggctggcaactcaggaaaacggcgagcaggtcgagcatgaagagacgccgtatccgctggtcgatgatctggagcgtttttatggtcatctggaacaaacgctgctggcaaccggttttatccgtgaaaaccatccggggcaggtgatgaataaattgcgccgtctgtttacccgtgcgcgcccggaaagccaggagttgaatatcctgcgcgggattctggcttctattgagcagcagaataaagggcctacagtgaacagaaccgtaggtcggataaggcgttcacgccgcatccgacagccgttgcctgatgcgacgcgtaatgcgtcttatcaggcctacagtgaacagaaaccgtag

SEQ ID NO: 131814 - DNA, 766 bp, Homo sapiens
caacgtaggtttgcggtccggtagacacaatggtgacaggttccgcactttcacgcagcgttttcgccatcagctctaccgcggtacagttttgcggtgcgaatgtcggttccggtaatgccgggccgtcgagaccgctttcgccgtgcacattgtccgcgataatcaactcacgcattaacggttttaccgcgcccgcctgctaccggaatatcggtgcgattaagcaaggtcagcatacgcagaacattgcgtaaggttttttgtggtgtgtggtttccggcggaagacgtaattgctttgacatcaagctctggtgaggcgagggcgagaactattgcgatagcgtcgtcatgacttgggtcgcaatctaacagaattggcagtgccattgttgctccttgaggtgtgcttctttgcgacaagggtaacgccaggatgtaacagatacgaggggcgaaacgataaagcgtgagatggcgcgcaattgggtatgcgcgccagagtgattaatgcaggattttcgcgaggaagtcttttgcgcggtccgatttcggatcatcgaagaaagcgtctttcggcgagtattcgacaattttaccctcgtccataaagatcacccgattcgcctctttacgggcaaagcccatttcgtgggtcaccaccatcatggtcattccttcgttcgccagttccaccatcacgtccagtacttagttgatcatctccggatacagcgcagatgtcggttcgtcaaacagcatcg

SEQ ID NO: 131815 - DNA, 837 bp, Homo sapiens
  misc_feature (1)...(837): n = a,t,c or g
atgagtggaggaatcctcagagcacctcagacaccgcggggtagcccttcctcggcgtcatgctgtaggcactccttgcgcctcgtgacggcagcaccgctggtgtgtggtcctcgggtttgtccggcgccagcggctctggacttgccgcctgttgttgctgttgacgtgcccgcagcgcaccatcggagcctcaggtcctgccagcgatgcgctcagcccgataccccaagccatccaagtccaggtgatgtcacccctccgcctgaccaacacagtaaggtccaagttcctctgagccttcttgggccgtggccccagggaaagcaggtgacccacatcacagtgccgagtgggcaaggaactcgaccccgagtaaggaccaagcatgacggagaccacatacccatctgtgtaacggcctatcagggcaaagtgctgctggttgggcagtcaccaaatgctgaactttcggctcgcgccaaacagattgctatgggcgtagacggtgccaacgaagtgtataacgagattcgtcagggccagccgattggtctgggcgaagcatctaacgatacgtggatcaccaccaaagtgcgttcgcagctcttaaccagcgacctggtgaaatcgtccaacgtgaaagtgaccaccgaaaacnggcctacaacgatacaaaccgtaggtcagataaggcgtttacgccgcatccgacatgttttccctcaaatcagaacaacagcgccagcccgccgacaatcacaccagacactgccaccatcgcacctgtcagccataaggctttcgccgggacgctttgcgcagcataatcagtga

SEQ ID NO: 131816 - DNA, 3978 bp, Homo sapiens
atgggctgctatgacgacatcgagcaggctgacgcgtttgtgctgtggggcgcaaacatggcggaaatgcacccgatcctctggtcgcgcatcactaaccgtcgtctctctaaccagaacgtcaccgtggcggtgctttctacctaccagcatcgtagcttcgagctggcggataacggcatcatctttacgccgcaatctgacctggtgatcctgaactacatcgccaactatatcattcaaaacaatgcgataaatcaggacttcttcagcaagcacgttaacctgcgcaaaggggcgacggacatcggctacggtttacgtccgacccatccgctggaaaaagcagcgaagaatccgggttctgacgcctccgaaccgatgagctttgaagattacaaagccttcgttgccgagtatacgctggaaaaaactgccgaaatgaccggcgtgccgaaagaccagttagaacaactggcgcagctgtatgccgatccgaacaagaaagtcatctcctactggacgatgggcttcaaccagcatactcgtggcgtgtgggctaacaacctggtctacaacctgcacctgctgaccggcaaaatttcccagccgggttgcgatggcgcgtacgtgaaagtgaagcctggtgcgcaaacagcaattgttaatggtcagcctctggcactgcaagtaccggtagtgatgaaagacaataaagcctgggtttctgacacctttattaacgatgttttccagtccgggctggatcaaacctttcaggtagaaaagcgccctcacccacttaatgcgctaactgcggacgaaattaaacaggccgttgaaattgttaaagcttccgcggacttcaaacccaatacccgttttactgagatctccctgctaccgccagataaagaagctgtctgggcgtttgcgctggaaaacaaaccggttgaccagccgcgcaaagccgacgtcattatgctcgacggcaaacatatcatcgaagcggtggtggatctgcaaaacaacaaactgctctcctggcaacccattaaagacgcccacggtatggtgttgctggatgatttcgccagtgtgcagaacattattaacaacagtgaagaatttgccgctgccgtgaagaaacgcggtattactgatgcgaaaaaagtgattaccacgccgctgaccgtaggttatttcgatggtcaagatggcctgaaacaagatgcccggttgctcaaagtcatcagctatcttgatgtcggtgatggcaactactgggcacatcccatcgaaaacctggtggcggtcgttgatttagaacagaaaaaaatcgttactcggtccgctacgttgttgccttcatcatcagttacgccctgcataacggataaagactggcaaaccaccagctttggcagattatcatcctgcatatcaagaaatgctttcacggtcagcgaactggcattgatggcagataaatccgccgccagcggcaatacggctgaaggtcggacttccgccatggcagaaaacaggatcgtgttatcgatcagatcgattttggcatcaaagacaccgtcgaaattctgcatatgggggcgtgagtatcaactgcaaccgaatgttgagtgggatgcgcactatctacacggcgatggctggctgggcgagtggcaatgtgtctcgcacagcgatgatagtttgtgtctggtgtatgaacatcgcagcggtgtctatcactatcgggtaagtcaggcgtttcatttaacggcggatacgctgacggtgacgctctctgtcaccaatcaaggggcagagacgctgccatttggtaccggctggcatccttattttccgttgtcgccgcaaacgcggattcaggcacaggcgagcggttactggctggagcgggagcagtggctggcggatcgtccgccgcttcctcaaaccctgtttgccgcctgtcagcatctgctggcgatgttcgttgcggtgatcacgccagcgctattaatctgccaggcgctgggtttaccggcacaagacacgcaacacattattagtatgtcgctgtttgcctccggtgtggcatcgattattcaaattaaggcctggggtccggttggctccgggctgttgtctattcagggcaccagcttcaactttgttgccccgctgattatgggcggtaccgcgctgaaaaccggtggtgctgatgttcctaccatgatggcggctttgttcggcacgttgatgctggcaagttgcaccgagatggtgatctcccgcgttctgcatctggcgcgccgcattattacgccgctggtttctggcgttgtggtgatgattatcggcctgtcgctaattcaggttgggttaacgtccattggcggcggttacgcagccatgagcgataacaccttcggcgtcagctcggtaccatgtcttcccggcgacgatggaactgtgcatctcgccttcggttttgcgctgattgttggcatccccgtggggatgattgccgggattacgcgccataagtggcaggataacttgatcaacgccatcgccttactgggcttttcaatcccggtgttctggctggcgcttctgttgacgctgttttgttcactcacgctagggcgtttcgatctgctctacgaagtgaaaccgattaccggttttgcgttgattgatgcctggctttcggactcaccatggcgggatgaaatgatcatgagcgcaatccgccatatgatattgcccgtgatcaccctgtcggttgcgccaacaactgaagtgatccgcctgatgcgtatcagcactatcgaagtgtatgaccagaactatgtaaaagcggcggcgacccgcggtttgtcgcgctttactattttgcgtcgccacgttctgcataacgcgttaccgccggttattcctcgcctgggcttacagttttccaccatgctgacgctggcgatgatcaccgaaatggtttttagctggccgggtttaaagaatcgcattccccgctctaacgcctgtgcgcccttctgtgccacaggctccgcctgtcctggcctgccgcgccgtctaacttccgtcatacctacggttaactccgacctacaagcgtcacgcaaaacagagttcctgttcaggaatactttcaacatcacagttgtcactgccgccgcgatcgatggtcagaaaatcggtgacgcgctgccaggcgaaaagtgggtgatgccagacgttacgatgcgtacagtcttgctcaagaatctcaaccagcgccaaatcgtggtaacgctccaccaggccattgttaatatggaaaaaatcccgttgctgcgagcgggccgtctgattcattcgtacaaccccgggctggcttgcgaaacttatatggctcaagtctatggctggatgaccgttggcttgttgctgaccgcatttgttgcctggtatgcggctaattccgcggccgtgatggagctgttgttcactaaccgtgtctttttaatcggtctgatcatcgcgcaattagcattggttattgtgttatcagcgatgattcaaaagctgagcgcaggtgtaacgacgatgctctttatgctttattcggcgctgacgggtcttacgctttccagtatattcattgtctataccgctgcttctatcgccagtactttcgtcgttactgccgggatgttcggcgcaatgagcctgtacggttacaccacgaagcgcgatttaagtggctttggcaatatgctgtttatggcgttaatcggcattgtgctggcatcgctggtcaacttctggttgaaaagcgaagcattgatgtgggcagttacctacatcggcgtgattgtctttgtcggattgacggcgtatgacacgcagaaactgaaaaatatgggtgagcagattgatacccgcgacacgtatcccgcgtgctgttaa

SEQ ID NO: 131817 - DNA, 1590 bp, Homo sapiens
atgcttatcgccgaaggattaatgaccgccaaaaatatcacggtgattaccaacagtctcccggcagcgtttgccctttccgaaaataaagacattactctggtcgtctgtggtggcacggtccgccataaaacgcgctcgatgcatggttccattgccgagcgttcattacaggatattaatgccgatttaatgtttgtcggtgctgatggtattgatgcggttaatggtattacgacctttaatgaaggttattctattagcggtgcgatggtcacagccgctaataaagtgattgccgttctcgattcatcgaaatttaaccgtcgcggttttaatcaggtactaccaatcgaaaaaattgacattattattaccgatgatgctgtgtcagaggtggataaactggcattgcagaagacgcgggatacctcactggtgtatgtcttatccctggccgatttcttccgtaccgcctcaaccattggtgagcgtgatggtacgcaggttgagatgatcctgtttgccggatttgtttatctcgttattagtcttagcgcgtcgttgttggtgctgaccgactgctcaaccgaagtgaaaaaaggcgaagtggtggtggtttgcggcccgtctggttccggcaaatcaacgctgattaaaaccgtcaacggcctcgaaccggtgcagcaaggtgaaatcaccgtcgatggtatcgtggttaacgacaagaaaaccgatctggcaaagctgcgttcccgcgtcgggatggtattccagcatttcgagctgttccctcatctgtcgattatcgaaaacctgaccctggcgcaggtgaaagtgcttaaacgcgataaagcgccggctcgtgaaaaagccctgaaactgctggagcgtgtcgggctttctgctcacgccaataagtttccggcgcactattccggcggtcagcagcagcgtgtggcaatcgctcgcgcgttgtgtatggatcctattgcgatgctgtttgacgaaccgacatcggcgctggatccggagatgatcaacgaagtactggacgtgatggtggaactggcgaacgaaggaatgaccatgatggtggtgacccacgaaatgggctttgccgtaaagtggcgaatcggaagcacacaacaaggagcacaattgcactgcaatcgctggctacatgtacgtaagcatctgctcgtggcttactacaatctggttggcattaagcctggcaaagaatcgtacatgaggctaaacgaaaaagcccttgatgatttttgtcagagcctggtcgattacttgtctgccggacatttcagtatttatgagcgcattcttcataagctggaaggcaacgggcaactcgcgcgcgccgcgaagatttggccgcaactcgaagccaatactcaacagattatggattactacgattccagtctggaaaccgccatcgatcatgataattaccttgagtttcaacaggttttatctgacatcggcgaggcgctggaagcggcatttgtgctggaagataagctgattctgctggtgcttgacgccgcccgcgtcaaacatcctgcttga

SEQ ID NO: 131818 - DNA, 639 bp, Homo sapiens
ttaaccttcagtgccagtttttttatcgtggcgtttgtacctgttgtcggatgcggcgtgaacgcgatatccgcgctggggttctgtacactgtaggcggttctgttcactgtaggcctgataagacgcattacgcgtcgcatcaggcaacggctgtcggatgcggcgtgaacgccttatccgacctacggttctgttcactgtaggcctgataagacgcattacgcgtcgcatcaggcaacggctgttattcggccttgttacctttattctgcaggctgctgtaagccgaaagtgcttaagttcctgtccaacgtccgtgtggggagactctgatgaggtcctccgtggtatgcctcgggggtacggcgccagagtgctcatcacttgggtgcgcggagaaatcgggacgttcttggccgcgtaaggtggcccacactttagggagctggacagtgccccgcgagagttaagagtgtccacaggagtggcgagtctccttggtgtttgtggttgttgctgtgttgccttgtacttgtgtttggtttttggacgaccacggccttcctttaccttctggcttgccaccagggcctgggacgtcgaacgtgggccagggactccttgggcgtgcaccat

SEQ ID NO: 131819 - DNA, 1580 bp, Homo sapiens
atgcgaatgcagccgcaggagcagcaaacggcaaggcttatcgtcgccagcctgcttagccactgccgcgatttgcttggcagccaaatccagaccgcctcacgcagccaggcactatttgaagctattcgcgattatatcgacgaacgctatgcctccgcgcttacccgcgaatctgttgcacaggcgttttatatttcgccaaattacctctcgcacctgtttcaaaaaacgggggccattggttttaacgaatacctgaatcacacgcgactggagcacgctaagacgttattgaaaggctatgacctgaaggtaaaagaagtggcgcacgcctgcggctttgtcgacagcaactacttctgccgtctgtttcgtaaaaacaccgaacgctcgccgtcggaatatcgccggcacaggcggttacatgacaacaggatatgccaatttaaaactcccacggataaccctgaaaatccggaccgatatctgacatttcgccgcatcgataaagagacatccagtctccctaaaaaagtggctccatcatgcaaacgattatccgtgtcgagaagctcgccaaaaccttcaatcagcatcaggcgctgcatgcggttgatgctgattgaagggcgacgttcatctttcattcatccggacaaagacgtggacggtttccatccttacaacgtcggtcgtctgtgccagcgcgcgccgcgtctgcgtccctgcaccccgcgcggtatcgtcacgctgcttgagcgttacaacattgataccttcggcctcaacgccgtggtgattggcgcatcgaatatcgttggccgcccgatgagcatggaactgctgctggcaggttgcaccactacagtgactcaccgcttcactaaaaatctgcgtcatcacgtagaaaatgccgatctattgatcgttgccgttggcaagccaggctttattcccggtgactggatcaaagaaggcgcaattgtgatgatgtcaggcatcaaccgcggtgtggcaaccgatgcctcatgttttccgctggtgccatttgcaaaccgggtgagcggcaatcgttttgtctggcaggggcgtgagtatcaactgcaaccgaatgttgagtgggatgcgcactatctacacggcgatggctggctgggcgagtggcaatgtgtctcgcacagcgatgatagtttgtgtctggtgtatgaacatcgcagcggtgtctatcactatcgggtaagtcagggcgtttcatttaacggcggatacgctgacggtgacgctctctgtcaccaatcaaggggcagagacgctgccatttggtaccggctggcatccttattttccgttgtcgccgcaaacgcggattcaggcacaggcgagcggttactggctggagcgggagcagtggctggcgggtgagttttgcgagcagctaccgcaggaactggattttaaccagcccgcgccgttgccgcgccagtgggtgaacaatggttttgccggatggaatggtcaggcccgcatcgagcagccgcaggaaggttatgccatcacactggactagggatctcgat

SEQ ID NO: 131820 - DNA, 1765 bp, Homo sapiens
ttgcacgtcattctcagacgaaccgatgactggatggatggccgccgcagtcgtcacactgatgatacggatgtgcttctccgtatacaccatgttatcggagagctgccaacgtatggttatcgtcgggtatgggcgctgcttcgcagacaggcagaacttgatggtatgcctgcgatcaatgccaaacgtgtttaccggatcatgcgccagaatgcgctgttgcttgagcgaaaacctgctgtaccgccatcgaaacgggcacatacaggcagagtggccgtgaaagaaagcaatcagcgatggtgctctgacgggttcgagttctgctgtgataacggagagagactgcgtgtcacgttcgcgctggactgctgtgatcgtgaggcactgcactgggcggtcactaccggcggcttcaacagtgaaacagtacaggacgtcatgctgggagcggtggaacgccgcttcggcaacgatcttccgtcgtctccagtggagtggctgacggataatggttcatgctaccgggctaatgaaacacgccagttcgcccggatgttgggacttgaaccgaagaacacggcggtgcggagtccggagagtaacggaatagcagagagcttcgtgaaaacgataaagcgtgactacatcagtatcatgcccaaaccagacgggttaacggcagcaaagaaccttgcagaggcgttcgagcattataacgaatggcatccgcatagtgcgctgggttatcgctcgccacgggaatatctgcggcagcgggcttgtaatgggggcaaatccagttgtgcaccacgcgatgaccgtaaagttcgcgtgatggcagccgattatgaaaatcagctcgacgagttttccctcgatgcgcccattgtcgcacatgaaaactatcaatgggctaactacgttcgtggcgtggtgaaacatctgcaactgcgtaacaacagcttcggcggcgtggacatggtgatcagcggcaatgtgccgcagggtgccgggttaagttcttccgcttcactggaagtcgcggtcggaaccgtattgcagcagctttatcatctgccgctggacggcgcacaaatcgcgcttaacggtcaggaagcagaaaaccagtttgtaggctgtaactgcgggatcatggatcagctaatttccgcgctcggcaagaaagatcatgccttgctgatcgattgccgctcactggggaccaaagcagtttccatgcccaaaggtgtggctgtcgtcatcatcaacagtaacttcaaacgtaccctggttggcagcgaatacaacacccgtcgtgaacaatgcgaaaaccaggtatccccccaacgtatcacgacggctaaactggccgcctctgtcggcgtttccgaagcggcactgtttcgccacttccccagtaagacccgcatgttcgatagcctgattgagtttatcgaagatagcctgattactcgcatcaacctgattctgaaagatgagaaagacaccacagcgcgcctgcgtctgattgagttgctgcttctcggttttggtgagcgtaatcctggcctgacccgcatcctcactggtcatgcgctaatgtttgaacaggatcgcctgcaagggcgcatcaaccagctgttcgagcgtattgaagcgcatctgcgccaggtattgcgtgaaaagagaatgcgtgagggtgaaggttacaccaccgatgaaaccctgctggcaagccagatcctggccttctgtgaag

SEQ ID NO: 131821 - DNA, 1830 bp, Homo sapiens
atgagttctttaagtcaggctgcgagcagtgtggaaaaacgcacaaatgctcgttactggatagtggtgatgttgtttatcgtcacatccttcaactacggcgaccgcgctacgctctctatcgccggttcggaaatggccaaacatatcggccttgatcccgtgggaatgggctatgtgttctctgctttctcatgggcttatgttatcgggcagatccctggcttcgtcgatatctttagtggattcggcattatcgttgccctgtttacgctgcgcttcctggtcgggcttgctgaagcgccatctttccccggacaaagtcgcatagttggggactggtttccggcgcaggacaggggaacgggagtgtcgatttttactccgttcatacttcgcaagggtgatcttcggccgatttgggtggttatcttgatggcaggtcagctgcatgcgctaatgtcgactctagaggataccccattctctaacaaagcgggaatgcgcttgcgcagatggattaacgcggcggtaatgcggttaaacccactggcttgcctagcgaccagatccaaccaggttaattggttactcctgacaggtaacatcagtgtgtacccagtgggcagcagcgaaccaacacgccggcggtcaacacccatcaacagcactccacactttaataaaacaatcctgcccatcaatgcacgatattctcccaccctaccgtccagtgacgggacccggtggacaacacgtatagacgataaacccacagttggccataaattcgcccgctactgggatgtggagctgcgtgagatccctatgcgccccggtcagttgtttatggacccgaaacgcatgattgaagcctgtgacgaaaacaccatcggcgtggtgccgactttcggcgtgacctacaccggtaactatgagttcccacaaccgctgcacgatgcgctggataaattccaggccgacaccggtatcgacatcgacatgcacatcgacgctgccagcggtggcttcctggcaccgttcgtcgccccggatatcgtctgggacttccgcctgccgcgtgtgaaatcgatcagtgcttcaggccataaattcggtctggctccgctgggctgcggctgggttatctggcgtgacgaagaagcgctgccgcaggaactggtgttcaacgttgactacctgggtggtcaaattggtacttttgccatcaacttctcccgcccggcgggtcaggtaattgcacagtactatgaattcctgcgcctcggtcgtgaaggctataccaaatcaacccaacctgccagaggatctccacccgcaaataattgccaagcccagccagaaacgcctgatcgagcagtaatccatccaactgacgggtacgaaagcgcggcgacaataatcgttctttcaccacctacggcgtcagattcggatccagcacatcgggaccaacgcgttgtaaaaacggatgcgtggtcagttgttccggggtcaacatctgaatatccgaggcgctataaagcagaatggttttgtcagccgtttgcagttttacccgcaatactcgcgtggtctgcggctctttggcggtatcaaccacgcgccagacgccgtaaagctgattatggctgtagagcgttaaattctttgaaaaatgagttaacaacgccttaccacgcgtttcacatgggtaacgtgttgaccattagtggtgaatggttaagggtccacatgaaaggacattccgtatcagtcttgatgtcaccagtattcgttttcttgatgaagacgaaatgcaacgtctga

SEQ ID NO: 131822 - DNA, 1281 bp, Homo sapiens
atggtgccgctgctgctcactcaaggcatcgtactgttccaggatacctcactggtgtatgtgttatccctggccgatttcttccgtaccgcctcaaccattggtgagcgtgatggtacgcacgttgagatgatcctgtttgccggatttgtttatttcggtattagtcttagcgcgtcgttgttggtgctgaccgactgctcaaccgaagtgaaaaaaggcgaagtggtggtggtttgcgggccgtctggttccggcaaatcaacgctgattaaaaccgtcaacggcctcaaaccggtgcagcaaggtgaaatcaccgtcgatggtatcgtggttaacgacaagaaaaccgatctggcaaagctgcgttcccgcgtcgggatgatacccttgaagtcaaagctatcattaaaaggtgtccgatttacttacttgggggggaaacctgggaaacttgcggtgccggtaccactcggttatgtagtgatggcgcaggatctacagcttgcggggtgtgaatacagcttttccgcgataaaaattgcagcaggcggtcagtttcttcccgtgattggcgccattctgaacataaccgataatgtcatatatgaccaggagattgagttcacattcggtcgcctatccttttgcggattgcctcgttggcccaaaggggaagtagagcgaatctgggcctgcggttatcgcgaggaagtccctgttattgcggtaaacaaccgttgcctgatgcgacgcgtaatgcgtcttatcaggcctacagtgaacagaaccgtaggtcggataaggcgttcacgccgcatccgacagccgttgcctgatgcgacgcgtaatgcgtcttatcaggcctacagtgtacagaaccccagggcggatatggcgttcacgccgcatccgacaacagggcgctatgccgtgaccgcaatgcttgacgttgcgctcaactctgaagcgggcccggtaccgttggctgatatttccgaacgtcagggaatttccctttcttatctggaacaactgttttcccgtctgcgtaaaaatggtctggtttccagcgtacgtggaccaggcggtggttatctgttaggcaaagatgccagcagcatcgccgttggcgaagtaattagcgccgttgacgaatctgtagatgccacccgttgtcaggctaaaggcggctggcagggcggcgataaatgcctggaccacgcgctgtggcgtgatctgagcgaccgtctcaccgggtttctcaccacattactttag

SEQ ID NO: 131823 - DNA, 1169 bp, Homo sapiens
  misc_feature (1)...(1169): n = a,t,c or g
gttgaataaagagaaactggatcggtggttgaaagatggcatcaccacgccgggtggaaaactcccttcagaaagagagctgggagaactgctgggcattaaacgtatgacgctgcgccaggcgttgttgaacctcgaggcagaatccaaaatcttccgtaaggatcgtaaggggtggttcgtgacccagccgcgatttaattacagtccggagctgtcggcgagctttcagcgggccgcaattgagcaagggcgagagccttcctgggggtttaccgagaaaaaccgtaccagcgatattcccgagacgctcgcgccactgattgcagtgacgccatcaactgaactctatcgcatcaccggctggggggcgctggaaggacataaagagtttaaaatggataagaagcaagtaacggatttaaggtcggaactactcgattcacgttttggtgcgaagtctatttccactatcgcagaatcaaaacgttttccgctgcacgaaatgcgcgacgatgtcgcattccagattatcaatgacgaattatatcttgatggcaacgctcgtcagaacctggccactttctgccagacctgggacgacgaaaatgtccacaaattgatggatttatccattaacaaaaactggatcgacaaagaagaatatccgctatccgcagccatcgacctgcgttgcgtaaatatggttgccgatctgtggcatgcgcctgcgccgaaaaatggtcaggccgttggcaccaacaccattggttcttccgaggcctgtatgctcggcgcggatggcgatgaaatggcgttggcgcaagcgtatggaagctgcaggcaaaccaacggataaaccaaanctggtgtgcggtccggtacaaatctgcttcgtacctgaagtgggctttgcggtagataaagacggtatcaccattacggtggacgacgatggtcctggcgttagcccggaagatcgcgaacagattttccgtccgttctatcgtaccgatgaagcacgcgatcgtgaatctggcggtacaggtttggggctggcgattgttgaaaccgccattcagcagcatcgtggctgggtgaaggcagaagacagcccgctgggcggtttacggctggtgatttggttgccgctgtataagcggagttaa

SEQ ID NO: 131824 - DNA, 976 bp, Homo sapiens
ccgcgctttttgcccgtgaagcgccggtgacgcttgagattggttttggcatgggggcgtcgctggtggcaatggctaaagatcgccctgagcaggacttcctcggcattgaagtgcattcaccgggcgttggtgcgtgcctggcttctgcgcatgaagaaggtttaagcaacctgcgcgtgatgtgtcacgatgcggttgaagtgctgcataaaatgattcctgacaattcattgcgcatggtgcagctctttttccctgacccgtggcacaaagcgcgccataataaacgccgtatcgttcaggtgccgtttgccgaactggtaaaaagcaaactgcagctggggggcgtattccatatggcgaccgactgggaaccttatgcggaacatatgcttgaagtgatgtcttctattgacggttataaaaacctgtcagagagcaatgattacgtaccgcgtccggcatcacgtccggtgacgaaatttgaacaacgtggtcatcgtcttggtcacggagtatgggacttaatgttcgagagggtgaaataatggcaaagaaccgtagccgtcgtctgcgtaaaaaaatgcacatcgacgaattccaggaattaggattttcggtggcatggcgattcccggaaggtacatcggaagaacagattgataaacccgttgatgattttattaacgaggttatcgacccgaacaaactggcctttgacggcagcggttatctggcctgggaaggtctgatctgcatgcaggaaatcggcaaatgcaccgaagaacatcaggcgattgtgcgtaagtggctggaagagcgcaaactggatgagtttccggttgggccctttcccggggaaaaaaccaaccgggggttggttgcgaagcaggcgcccgtcgacacgcccgagaagcgcgcatcggtgatgagcgacaccgtcttgccccacgagatatgctttagcgcggag

SEQ ID NO: 131825 - DNA, 4332 bp, Homo sapiens; identical to SEQ ID NO: 119129

SEQ ID NO: 131826 - DNA, 3129 bp, Homo sapiens
atgtggtatgtcggcgcgacctgtgccgatctggtcggctactggctttatgatgtggaaggcggctggcgctggatgctgggtagcgcggcgatcccctgtttgttgattttgattggtcgattcgaactgcctgaatctccccgctggttattacgcaaagggcgagtaaaagagtgcgaagagatgatgatcaaactgtttggcgaaccggtggctttcgatgaagagcagccgcagcaaacccgttttcgcgatctgtttaatcgccgccattttccttttgttctgtttgttgccgccatctggacctgccaggtgatcccaatgttcgccatttacacctttggcccgcaaatcgttggtttgttgggattgggggttggcaaaaacgcggcactagggaatgtggtgattagcctgttctttatgctcggctgtattccgccgatgctgtggttaaacactgccggacggcgtccattgttgattggcagctttgccatgatgacgctggcgctggcggttttggggctaatcccggatatggggatctggctggtagtgatggcctttgcggtgtatgcctttttctctggcgggccgggtaatttgcagtggctctatcctaatgaactcttcccgacagatatccgcgcctctgccgtgggcgtgattatgtccttaagtcgtattggcaccattgtttcgacctgggcactaccgatctttatcaataattacggtatcagtaacacgatgctaatgggggcgggtatctcgctgtttggcttgttgatttccgtagcgtttgccccggagactcgagggatgtcactggcgcagaccagcaatatgacgatccgcgggcagagaatggggacgctggaaggcgtcgaaattcgctctctttatcaactctatcctgacttcaatatcgatattgccgccgagcaggaggcgctgtctcgcgccgatctgatcgtctggcagcatccgatgcagtggtacagcattcctccgctcctcaaactttggatcgataaagttttctcccacggctgggcttacggtcatggcggcacggcgctgcatggcaaacatttgctgtgggcggtgacgaccggcggcggggaaagccattttgaaattggtgcgcatccgggctttgatgtgctgtcgcagccgctgagttattggcctttccacttatgtaaaaactggatcgacaaagaagaatatccgcaatccgcagccatcgacctgcgttgcgtaaatatggttgccgatctgtggcatgcgcctgcgccgaaaaatggtcaggccgttggcaccaacaccattggttcttccgaggcctgtatgctcggcgggatggcgatgaaatggcgttggcgcaagcgtatggaagctgcaggcaaaccaacggataaaccaaacctggtgtgcggtccggtacaaatctgctggcataaattcgcccgctactgggatgtggagctgcgtgagatccctatgcgccccggtcagttgtttatggacccgaaacgcatgattgaagcctgtgacgaaaacaccatcggcgtggtgccgactttcggcgtgacctacactggtaactatgagttcccacaaccgctgcacgatgcgctggataaattccaggccgataccggtatcgacatcgacatgcacatcgacgctgccagcggtggcttcctggcaccgttcgtcgccccggatatcgtctgggacttccgcctgccgcgtgtgaaatcgatcagtgcttcaggccataaattcggtctggctccgctgggctgcggctgggttatctggcgtgacgaagaagcgctgccgcaggaactggtgttcaacgttgactacctgggtggtcaaattggtacttttgccatcaacttctcccggccggggggtatcgatattggcgcgaaatacgagatctacaaattaattaaccaactcgtccagcagggtattgccgttattgtcatctcttccgaattacctgaagtgctcggccttagcgatcgtgtactggtgatgcatgaagggaaactaaaagccaacctgataaatcataacctgactcaggagcaggtcttcgtgatgattgcagctatcatcgcaatcatgctgttctttacctggaccaccgatggtgcctacttaagcgcccgtaacgtctccaacctgttacgccagaccgcgattaccggcatcctcgcgccctgcgtgatgtacccgggccccctctgtggcatgttatccgatattgaccggtttagcattctcggacagtgtggctgtcagcggtatttattccgatggcattcttcggcggttctactgggggcaatttatcgccagttctctatcaccatcgtttcggcaatggcgctttctgttctggtggcattgattcttacccctgcgttatgtgcaacgctgcttaaacccgtctctgctgagcatcacgaaaataagggcggtttcttcgcgttaaccactacaccaacagcgtcggcgaaaatcctcggatccacaggacgatatttactgatctatgcgctgattgttgcaggaatggtggtgttgtttttacgtcttccgtcttccttcttacctgaagaggatcagggtgtctttctgaccatgattcagttacccgctggcgcgacgcaagagcggacgcaaaaagtgttggatcaagttacggattactatctgaagaacgagaaagcgaacgttgaaagtgtctttacggttaacggctttagcttcagcggccaggcacaaaacgccggtatggccttcgtcagtctgaaaccgtgggaagagcgtaatggtgacgaaaacagtgcggaagcggtaatccatcgtgccaaaatggaattgggcaagatccgcgacggtttcgtcattccattcaatatgccagccattgttgaactgggcacggcaacgggtttcgactttgaggtaaatgatccggctgggctgggtcccgatgccctaaacaaggcccgtaaccagttgcttggtatggcgggcaagatctggcagttaagtagcgtgtgcctaattgctggaagaaccgggcgttaa

SEQ ID NO: 131827 - DNA, 3944 bp, Homo sapiens
  misc_feature (1)...(3944): n = a,t,c or g
tgcttatcccggtcgtttatttcgagaataacccgacaaggaacgccagccgccacgacgtttggtggaatgtcttttgtgacgatactacccgcgccaataacagaattatccccgatggtgacgcctggattaataaccacatgactttcgatccagacgttattgccaatcgttatcggaaaagagtacatgtcgccgttttttctcaatatatggtgtacagggttgtgccgtacagaaagancataaacggcggaacgctgacggtgacgctatctgtcaccaatcaaggggcagagacgctgccatttggtaccggctggcatccttattttccgttgtcgccgcaaacgcggattcaggcacaggcgagcggttactggctggagcgggagcagtggctggcgggtgagttttgcgagcagctaccgcaggaactggattttaaccagcccgcgccgttgccgcgccagtgggtgaacaatggttttgccggatggaatggtcaggcccgcatcgagcagccgcaggaaggttatgccatcatcatggaaacgacgccacctgcaccgtgttatttcatctttgtttccgaccctgcgtttgataaaggatatgcgtttgatttcttctgtctggaaccgatgagccatgcgccggatgatcatcatcgcccggaagggggtgatctcattgcgctagcaccaggggaatcaacaacttcagagatgtcgttgcgggcctacaacgatacaaaccgtaggtcagataaggcgtttacgccgcatccgacatgttttccctcaaatcagaacaacagcgccagcccgccgacaatcacaccagacactgccaccatcgcccctgtcagccataaagctttcgccgggaacgctttgcgcagcataatcagtgacggcaaactcactgccgggagcgtcatcaacaatgccagcgccggagcggttcccatacctgccagcatcatcgtttgtacaatcggaatttctgctgccgtgggaatgacaaacaagcatcctgctaccgccatcgacaccacccacatcatgctgttatcgacagcaccatcggcatgggggaataaccagacgcgagcggcacccaacaccagcttgttagcggcatatcgtttcctgattgatagccgtgataccgagactgacagccgcctcgacggtttgagtgatgcattcagcgtattccgctgtcacagcatcatgaactgcgtcagtgtatgtccgaaggggctgaacccgacgcgcgccatcggccatatcaagtcgatgttgttgcaactcccaccaaacgtcgaaaagttcgctggtgcgtacctcatccagtttgcgctcttccagccacttacgcacaatcgcctgatgttcttcggtgcatttgccgatttcctgcatgcagatcagaccttcccaggccagataaccgctgccgtcaaaggccagtttgttcgacgacggctacggttctttgccattatttcaccctctcgaacattaagttccatactccgtgaccaagacgatgaccacgttgatcaaatttcgtcaccggacgtgatgccggacgcggtttgtataatcgccaatagaagacatcacttcaagcatatgttccgcataaggggcaaatccagttgtgcaccacgcgatgaccgtaaagttcgcgtgatggcagccgattatgaaaatcagctcgacgagttttccctcgatgcgcccattgtcgcacatgaaaactatcaatgggctaactacgttcgtggcgtggtgaaacatctgcaactgcgtaacaacagcttcggcggcgtggacatggtgatcagcggcaatgtgccgcagggtgccgggcctacagtgaacagaaccgtaggtcggataaggcgttcacgccgcatccgacagccgttgcctgatgcgacgcgtaatgcgtcttatcaggcctacagtgaacagaaccgcctacagtgtacagaaccccagggcggatatggcgttcacgccgcatccgacaacagggacaaacgccacgataaaaaaatggcactgaaggttaaatacccgactaaatcagtcaagggcgagtttgaggtgaaggaagacatgaaactgacatctaaagggcgctatgccgtgaccgcaatgcttgacggtgcgctcaactctgaagcgggcccgcatttcgagctgttccctcatctgtcgattatcgaaaacctgaccctggcgcaggtgaaagtgcttaaacgcgataaagcgccggctcgtgaaaaagccctgaaactgctggagcgtgtcgggctttctgctcacgccaataagtttccggcgcagctttccggcggtcagcagcagcgtgtggcaatcgctcgcgcgttgtgtatggatcctattgcgatgctgtttgacgaaccgacatcggcgctggatccggagatgatcaacgaagtactggacgtgatggtggaactggcgaacgaaggaatgaccatgatggtggtgacccacgaaatgggctttgcccgtaaagtggcgaatcgggtgatctttatggacgaggaacaccaacaggagcacaatgcacggcaatctgtagatgcgaccaggcatgagacgcttcgcagtgagtatatcgccctgtgctctaaagacttcctcgaaaaaccgagtgaagggtcgatcgtggtcaatggccagacgatcaatctggtgcgcgacaaagacggtcaactcaaagtcgccgataaaaatcaactgcgcttactgcgcacacgcctgacgatggtattccagcacttcaatctctggagccatatgacggtgctggaaaacgtcatggaagcgccgattcaggtgttgggcctgagcaagcaggaagcgcgcgagcgggcggtgaagtatctggcaaaagtcgggatagacgaacgtgcgcaggggaaatatccggtgcatctttccggcggtcagcaacagcgtgtttctatcgcgcgggcgctggcgatggaaccggaagttttactgtttgatgaacctacctcggcgctcgatcctgaactgacctgggacgacgaaaatgtccacaaattgatggatttatccattaacaaaaactggatcgacaaagaagaatatccgcaatccgcagccatcgacctgcgttgcgtaaatatggttgccgatctgtggcatgcgcctgcgccgaaaaatggtcaggccgttggcaccaacaccattggttcttccgaggcctgtatgctcggcgggatggcgatgaaatggcgttggcgcaagcgtatggaagctgcaggcaaaccaacggataaaccaaacctggtgtgcggtccggtacaaatctgctggcataaattcgcccgctactgggatgtggagctgcgtgagatccctatgcgccccggtcagttgtttatggacccgaaacgcatgattgaagcctgtgacgaaaacaccatcggcgtggtgccgactttcggcgtgacctacactggtaactatgagttcccacaaccgctgcacgatgcgctggataaattccaggccgataccggtatcgacatcgacatgcacatcgacgctgccagcggtggcttcctggcaccgtcgtcgcccggatatcgctgggactttcgcttgcgcttgtgtggggatcgtccggcaacgctgctgctggaatccgcagatatcgacagcaaagatgatttaaaaagcctgctgctggtagacagtgcgctgcgcattacagctttaggtgacactgtcacaatccaggcactttccggcaacggcgaagccctcctggcactactggataacgccctgcctgcgggtgtggaaagtgaacaatcaccaaactgccgtgtgctgcgcttccccccttccactgctggatga

SEQ ID NO: 131828 - DNA, 2178 bp, Homo sapiens
atggacgaagcaccggatgccgatgatctgatgctggctgaaacaccgcggacgaagatgctgccgaagccgccgcgcagcgtggaatctgaaatcgggcgcacgactgacccggtacgcatgtacatgcgtgaaatgggcaccgttgaactgttgacgcgcgaaggcgaaattgacatcgctaagcgtattgaagacgggatcaaccaggttcaatgctccgttgctgaatatccggaagcgatcacctatctgctggaacagtacgatcgtgttgaagcagaagaagcgcgtctgtccgatctgatcaccggctttgttgacccgaacgcagaagaagatctggcacctaccgccactcacgtcggttctgagctttcccaggaagatctggacgatgacgaagatgaagacgaagaagatggcgatgacgacagcgccgatgatgacaacagcatcgacccggaactggctcgcgaaaaatttgcggaactacgcgctcagtacgttgtaacgcgtgacaccatcaaagcgaaaggtcgcagtcacgctaccgctcaggaagagatcctgaaactgtctgaagtattcaaacagttccgcctggtgccgaagcagtttgactacctggtcaacagcatgcgcgtcatgatggaccgcgttcgtacgcaagaacgtctgatcatgaagctctgcgttgagcagtgcaaaatgccccgagaaaacttcattaccctgtttacggcaacgaaccagcgatacctggttctacgcggcaatgcgatgaccagccgtggcaatcgtggcgacagcgccatcctgcgcggcttacttgatgccatcaacattctcaatccacacgccgaagtggatgtgatgagccgctatccggtcagttcttcctggctgctcaaccgcccggtaatgggcgatccgctgttcctgcaaatgaaacaacacaacagcgcggcgggcgttgtcgggcgcgttaaaaaagtcctccgtcgccgctaccagcatcaggtattgctctcacgcgtcaccgacactggcaagctgcgcaatatcgccatcgcccagggattcaccgacttcgtgcgcctgctgtcaggttacgacgccattatccaggtcggcggatcgttttttgtcgatctctatggcgtgccgcagtttgaacatgcactttgcacgtttatggcgaaaaagccgctgtttatgattggtcacagtgttggcccgttccaggatgagcaatttaaccaactggcgaactacgtttttggtcactgcgacgcgctgatcctgcgcgaatcggtcagctttgatctgatgaaacgcagcaatatcaccaccgcaaaagtggaacatggcgtcgataccgcgtggctgaggatccccaagcatggcgacatgacgcatatggcggtagcattgttcagggttcagccggggctgcgcattgcgtgcccccaccggcgtggctgttcggtgtgccccggcggagtgacgtccggccatccggtcaatcccctgctcggtgcaaaggtccttcccggtgaaaccgacatcgccctgcccggcccgctgccgttcatcctctcccgcacctacagcagttaccggacaaaaacgctcgcgccggtggggagcctcggccccggctggaaaatgcctgcggatatccgcttacagctgcgcgataacacactgatactcagtgataacggcggcagaagcctgtattttgagcacctgtttcccggtgaggacggttacagccgcagcgagtcactgtggctggtgcgcggcggcgtggcgaaactggatgaaggtcaccggctggccgcactctggcatgcgctgccggaagaactccgcttaagtccgcatcgttatctggcgacaaacagtccgcatgggccgtggtggctgctcggttggtgtgagcgggtgccggaagcggatgaggtgctgcctgcgccgctgccgccgtaccgggtactgaccgggctggtggaccccttcgggcgacacagacgtttcaacgcgaacgccggtgaattcacggcgaatcacggcgtgacgatgtgctggcgtacttcggctgtactacaccagccagggcagagacccgcacagcattccgcggacgacgtcgcttctatactccggtaa

SEQ ID NO: 131829 - DNA, 811 bp, Homo sapiens
atgcaagttgatggcggcgaaggtgtactgttgattatcaaaaattacaccggcgatattcttaactttgaaacagcgaccgagttactgcacgatagcggcgtaaaagggaattctacccccctctacgagactcaagcttgccagtatcagatgcagttcccagtcagagggatctttctaaagcacaaatccaattatgggtacgagacaggattgtctaaatcgcacaacctaaatattcaaaaaaatgaatatttaattcaaggaacagaaacgaggcaacaagatgtttgtagaagcattgaaacgccagaacccggcgctgatttccgccgcactaagcctgtggcagcagggcaagatcgccccggacagctgggtgatcgacgtggatcagatactggaaaacgtaacgcccccagcaagtatttaaatgcggtgtgtcatatgcgcaccaccaaactccctgatccaaaagtgaatgccaatgccggtagtttcttcaaaaaccctgttgtatctgccgaaacggttaaagcattactgtcacaatttccaacagcaccaaattacccccaggcggatggttcagtaaaactggcagcaggttggcttatcgatcagtgccagctaaaagggatgcaaataggtggggctgcggtgcaccgtcaacaggcgttagttctcattaatgaagacaatgcaaaaagcgaagatgttgtacagctggcgcatcatgtaagacagaaagttggtgaaaaatttaatgtctggcttgagcctgaagtccgctttattggtgcatcag

SEQ ID NO: 131830 - DNA, 1219 bp, Homo sapiens
tcagacagtcggctgaattttgctcagcagtgcgcggtattgatccagatcgctgctttccagctgctgctgtactttagcggcgaatttttccagacggcgtttgcctagcagttctgcgttcggcagttctacttccggaatagtcagcttcatagtacgttcaatgttgcgcagcagacgacgctcgcggttctcaacgaacagcagcgcgcggccagcacgacccgcacgaccggtacgaccgatacggtgaacgtaagactcagaatccatcgggatatcgtagttaactaccaggctgatacgctcaacgtccaggccacgggctgcaacgtcggtcgcaatcaggatgtccagacgaccatctttcaggcgttccagtgtctgttcacgcagcgcctggttcatgtcaccgttcagcgcggcgctgttgtagccgttacgctcaagagcttcagccacttccagagtcgcgtttttggtacgaacgaagataatcgccgcatcaaaatcttccgcttccaggaaacgtaccagtgcttcgtttttgcgcataccccagacagtccagtagctctggctgatgtcagggaccgggtagtcacgctggactgaatgcgcacttcctgcggctctttcataaagcggcgggtaatgcgacgaatcgcttccggcatggttgcagagaacagagcggtctgatgaccttccgggatctgcgccataatggtttcaacgtcttcgatgaagcccatgcgcagcatttcgtcagcttcatccagaaccagaccgctcagtttagagaggtccagagtgccacgtttcaggtggtccagcagacggcccggagtaccgacaacgatctgcggcccctgacgcagggcgcgtaattgcacgtcataacgctggccgccgtacagagcaaccacatttacgccgcgcatgtgtttagagaaatccgtcattgcttcagcaacctgtaccgccagttcgcgggtcggtgccagcaccagaatctgtggtgctttcagctcaggatcaagattctgcaacagaggtaaagagaatgctgcagtttttccgctccccgtctgggccatacccagaacgtcgcggccattcagcagatgtggaatacactctgcctgaattggagatggtttttcgtaacccagatcgttaagggcttcaaggataggagccttcaggcccagat

SEQ ID NO: 131831 - DNA, 1488 bp, Homo sapiens
atgcgcctgatgccacaggtgagcgcgtggagtaaaggaagcgctgtgggctttgaccacggctcgtggggcgtgctgattaagatgtatcctgacgctgatatcccgatggtgcagttgagtatcgacagtagcaaacctgccgcctggcatttcgaaatggggcgcaaactggcagcgctgcgagatagcttacagatcccgttgcagcgcacgtccggcacggaccgatataacgatattgccgcgcgcagcaggcagcaggctaccaatgccatcggctttcggcagcgcgatcacttccacatcttcagtccagaaagaggtcggcagcggttcgacgttgtgccagtaatcaaccggcagatagaaccacagtttcggcttgttcacgccatccaccagcaaccagcagtttggcacctgagttaccggcacccacgctttgaattgcgggttcactttaaacggatagggatgatcgtcgagaaaaacattgaacagctcgccggagtgaataacacatcgttcatccagagcgtgatttctgccgagcgtgatcagatcggcatttctttaatcttttgtttgcatatttttaacacaaaatacacacttcgactcatctggtacgaccagatcaccttgcggattcaggagactgacatgctttacaaaggcgacaccctgtaccttgactggctgcggcagctgcatgctagaaacagaagagtacaaaaaggaaagaaacgaaaaataaactacaccaaatcagtgactgaaggcgggcgaatccagtctgtgctgcttaaagtttatagcgacgatgattttctttatccgggccaggagagcggttttgccctcaatgtgttgccggagattgtcgccgaaatccagaatctgccagtgctgcatttagccggacttacccatttcccttgcctgctttgggatgaggctgtcggaaaagttttgccgacaccgaatcttcacacgctgatacaggcacgggatcaactggcgaaatctggtattgcacttgagcaactgaacgcgccttcagcgaccagctgcacttcgctgccattactggcgcaatacggtgtgactcatgccgaacccggtcatgcgctgacgggcactattccggcaaaccagcagggcgatcagcctgaacgtatcgcgatgctctggttaagtgaaatctcccatcatttccgtggcgacagctactgctacggcggcggttactatcgtcgtggtcatgcgcaacatgcgttggtgtttacgccagaaaatcaaaagattactgaaaccaatctcaaaactgtggatgacagcagtatcgactacaccctgccgctggcaggcgagtttccgatttttgtcacccgtagcgatgtggtgctggtgtccggtattcatcgtggcgaaccggaaatcgtcggtcgttatgacagtcttggaaactctctgggggcgtaa

SEQ ID NO: 131832 - DNA, 1840 bp, Homo sapiens
atgacgcagtatggcggtagcattgttcagggttcagccggggtacgtattggtgcccccaccggcgtggcctgttcggtgtgccccggcggagtgacgtccggccatccggtcaatcccctgctcggtgcaaaggtccttcccggtgaaaccgacatcgccctgcccggcccgctgccgttcatcctctcccgcacctacagcagttaccggacaaaaacgcccgcgccggtggggagcctcggccccggctggaaaatgcctgcggatatccgcttacagctgcgcgataacacactgatactcagtgataacggcggcagaagcctgtattttgagcacctgtttcccggtgaggacggttacagccgcagcgagtcactgtggctggtgcgcggcggcgtggcgaaactggatgaaggtttgcgtaccgtctaccccgacacaggtcgactgaccgaaaccgtaatccgtggtctgtttaaccgcttcatagaaagcggacccacgggctaaactcggcaagcagatgcacattatcgccgctgtcttttcgccagatgcgtaccgcgccctggtcttcagcaaatccactggcggcctagtccgtaggcagacaattcagtctggtaacattgaacgtactatgaagctgactattccggaagtagaactgccgaacgcagaactgctaggcaaacgccgtctggaaaaattcgccgctaaagtacagcagcagctggaaagcagcgatctggatcaataccgcgcactgctgagcaaaattcacggcttcacagacgatccgcgatttttacaggccaccgaagccgtggtcctgacgcgagtcgatgattacccaatgcaacaactgctgcgtgccgttgtagataaacacgccctgctcgcccatcaacaacgggtagaacagaaacgaggcaacaagatgtttgtagaagcattgaaacgccagaacccggcgctgatttccgccgcactaagcctgtggcagcagggcaagatcgccccggacagctgggtgatcgacgtggatcagatactggaaaacggtaagcggctgattgagacggcgcggctttacggcattgaactgtatctgatgaccaagcagtttggtcgtaatccgtggctggcggaaaaattgctggcattaggctacagcggcattgtggcggtggattacaaagaggcgcgagtcatgcgccgcgctggtttgcctgtggcgcatcaggggcatctggtacaaatcccttgtcatcaggttgctgacgccgttgaacagggcaccgacgtcatcaccgtgtttactctcgacaaagcgcgggaagtttctgcggcggcggtgaaggccgggcgaatccagtctgtgctgcttaaagtttatagcgacgatgattttctttatccgggccaggagagcggttttgccctcaaggtgttgccggagattgtcgccgaaatccagaatctgccagggctgcatttagccggacttacccatttcccttgcctgctttgggatgaggctgtcggaaaagttttgccgacaccgaatcttcacacgctgatacaggcacgggatcaactggcgaaatctggtattgcacttgagcaactgaacgcgccttcagcgaccagctgcacttcgctgccattactggcgcaatacggtgtgactcatgccgaacccggtcatgcgctgacgggcactattccggcaaaccagcagggcgatcagcctgaacgtatcgcgatgctctggttaagtgaaatctcccatcattcagaggatccccctgattgcagtgttggatcctga

SEQ ID NO: 131833 - DNA, 922 bp, Homo sapiens
cgagtaaacatgcaggtaggcgaatagggcacgtcgcacgtctcggtgcagagagcaatcggggcagagcaggagcgtagcgcgccgcaggcgcaagagggcgcgttgtcacgtcggagagcagaaggtggcgtgtactaccgggtggagggcgaatgtcctcagataagtgtagggggcacaagacgagcaatgtatccgcaggcggcaggtcgtgaagcgccgcgtagacgaatggcaggacataacgcttgcgcgaggacacatccgtggggctgagggaagaggcgaccggtgaccagtaagttttcgcgctgtttgccggccgcaaagaaccaaagtcttttaggcccaaactgaaagaggttgccgccgtacaatcctctgcagatgaaggggccagcgtggcctataagattaaggatgtggaggggcaagttgagcttgatgcggccttcactttctcatgccaggccgagatgattatttttgaggttatccctgcgttcgttagcttgatggagttgctttagaaggagttaaacatggcttataaacacattggcgtggcaatttccgggaatgaagaagatgccttactggtgaataaagccctggagctcgccagacataatgacgctcaccggacgttaattcatattgatgatggcttaagcgagttgtatccgggtatctacttccctgcaacagaagatattcttcaattgttgaagaataagtcggataacaagctgtataaactgacgaaaaatattcaatggccgaagacaaaactgcgtattgaacgcggagaaatgccggaaacactgctggaaattatgcaaaaagagcagtgcgacctccttgtctgtggtcatcatcaatcatttatcaaccgtttgatgccggcatatcgcgggat

SEQ ID NO: 131834 - DNA, 1656 bp, Homo sapiens; identical to SEQ ID NO: 118743

SEQ ID NO: 131835 - DNA, 728 bp, Homo sapiens
gcaggcgggtaaatactacggcggcgccgttttcgcgccggtctttggtgccatcatgggcggggtattgcgtaccatgaacatcgagccggatgctctgacatcggtcgataaaaatgaatttgtgattaatcacggcgaggggacaggtggcagatcgtaatttgcgcgaccttcttgctccgtgggtgccagacgcaccttcgcgagcactgccagagatgacactcgacagccgtgtggctgcggcggtcgatctctttgtagctagaataggtcatcaggcggacgggcgtcgatatatcccgcaggcgatagcgcaaggtgtggctgccattattgcagaggcgaaagatgaggcgaccgatggtgaaatccgtgaaatgcacggtgtaccggacatctatctcagccagcttaacgagctgttatctgcactggcgggccgctgttaccatgaaccctctgacaatttacgtctcgtgggcgtaacgggcaccaacggcaaaaccacgactacccagctgttggcgcagtggagccaactgcttggcgaaatcagcgcggtaatgggcaccgttggtaacggcctgctggggaaaaagaaagaaaaagcagcaatccagtacaatacgctttgtaaaagctgcacactcactcacccgaaaccccacaatgagagtgatcatacagatgtcgttgttgaagggcagacttttcgtgaataa

SEQ ID NO: 131836 - DNA, 1440 bp, Homo sapiens
atgttgtggcacaaacttccgaaatctatctacttccgccgtggctccctgccaatcgcgctggatgaagtgattactgatggccacaaacgtgcgctcatcgtgactgaccggttccttgtcaacaatggttatgctgatcagatcaactccgtactgaaagcagcaggcggtgaaactgaaatcttcttccaaagaaaaaccgaccccacccttgacatcggtcgtaaggtgcagaactggcaaactccttcaaccagacgtgattatcgcgctgggttggagagaggagaaaggagagcagaggctcaaaactgggatgaatgcctgatgaagggagagttgctctcccagccagatcctttgatttgccagctgctgaggcaccaatcagagctcttagctgaagctcacagcgagatctgtcgacttacagacctggaccaggaacagtgcattacgtttcatatggcggccactaagaagaagccgtgtagttctgatatatccatggcttcaaaatatctggcccagtacgagatcagggtcaaccagccgagcttagattcacgcaaggtccccattgaaagttgctacctgcggaaaagcgctaccaaagtgaagtatcaccccttgtttgaaatacgaaaggttaacacagatgcatttcctaaaattatcaggaatgcaatttatgaagtggaacagcatacgcaggcccctcaaggtttgattgctgcttctgctcttggggtaatttctcttgcctgtcagaaccggattgatgtttgccgattgaataatctacgtggcccggtatcacttttcttaatgactctggctgaatcaggtgaacgtaagagtacggttgataaactgctgatgaagccattatatcaactggaagaggatttatttgaaaaatacacccacgatcttaccgcatggaaaaatgatgaaacaatttttaatattgaaaaaaaagcactgatgtcaaaacttaaatcaaatattcgacccacacggctgtcgagtgtcatctctcgcagtgctcgcgaaggtgcgtctggcacccacggagcaagaaggtcgcgcaaattacgatctgccacctgtcccctcgccttgattaatcacaaattcatttttatcgcccgttgtcagcgcatccggctcgatgttcatggtacgcaatacgccgcccatgatggcaccaaagaccggcgcggaaacggcgccgccgtagtatttacccgcctgcggatcgttgataacaacaaccagcgcgaagcgcggctgactcgcaggcgcaacgcctgcggtataagcaatatatttattgatgtagcgaccgtccggcccgacctttttcgcggtaccggttttaatggcgatacgatagcctttaatcgccgacttcacgccgccgccgaccggtag

SEQ ID NO: 131837 - DNA, 201 bp, Homo sapiens
  misc_feature (1)...(201): n = a,t,c or g
catcacttcatacatggcgatgtcgatactttcgcctttacggtttcacgcactttatgcagtgctgccagcgccgccgtggtgncggtgagcgataaccagtttcgggttgtgctgccacagtacttcatcggtaatgccacgacgggcaaaggccggacctttactggcttcgatgaagatatcggtggtttccattaa

SEQ ID NO: 131838 - DNA, 1263 bp, Homo sapiens; identical to SEQ ID NO: 123202

SEQ ID NO: 131839 - DNA, 933 bp, Homo sapiens
atgccggaattccatcgcccggagatgccagatttcaccattcatgaatatacgccgctgatggattcttcagatatgacgccggaagactggcagcatattgctgaagatattaaagcgcactatgacgactatgatggttttgtcattctgcacggcaccgacacgatggcgtataccgcctctgcgctgtcgttcatgctcgagaatctcggtaaaccggtcattgtgacagggtcacaaatcccgctggctgagttacgctctgacggacaaattaatctgctgaatgcgttgtacgttgcggcgaattatccgatcaacgaagtaacgctctttttcaataaccgattgtatcgcggcaaccgcactaccaaagcccatcaacgctgccagcgcgtcggcattcgccggatcaaagcccatatgcacgttatagatgccaaaaccgagcttatcgcgcagtacgcgggccgcacaaatgttagcggcaatcatcgcttcttcgacgatacggttggcaatgcgacgaggctcggcgacgatatccagcacttcacctttttcaccgagaataaagcggtaatccgggcgatctttaaacaccagctgccagtcaccggtattttccagccagtcagaaacctggtcatacaccagctttgctttggattcgatggtggcggcaaagaattcgatattatcttcaatggtgccatcagcggagagcgtcatgcggcatgccagtaccgggcggacttcattggcgcgcatgatgacgtcgaaacccgtatgatgagcaactatacgctgaagcgtgaactcgccgagtttgccgcgtcgctggttcaaccgggcgaaaccatctttatcgaaaatggcagcagcaatgccctactcgccttagagcacattgattctcgtggcctaaag

SEQ ID NO: 131840 - DNA, 1888 bp, Homo sapiens
atggcggcaacgatgcgcttaagcgatcgcggacctgatgatgccgtcaaccgtcgcatcagcctgctggtactgaacaaacaagccgaacaggccattttgcatgaaaacgccgaaagccagaatgagccagtaagcgccctggaaaaacctgaggttgcaccacagccgaaccgaggtgacagcgtgagcatggatataagcgatttttatcagacattttttgatgaagcggacgaactgttggctgacatggagcagcatttgctggttttgcagccggaagtgccagatgccgaacaattgaatgccatctttcgggctgcccactcgatcaaaggaggggcaggaacttttggcttcagcgttttgcaggaaaccacgcatctgatggaaaacctgctcgatgaagccagagaggacatcatgcaagaacagctcgacgcttataaacagtcgcaagagccggatgccgccagcttttattatatctgccaggccttgcgtcaactggcattagaagcgaaaggcgaaacgccatccgcagtgacccgattaagtgtggttgccaaaagtgaaccgcaagatgagcagagtcgcaccgcgtggattgctgaaggcagcaagctggacaaagccgcgaaaattcgcgcattcaccaactatctgcctggcttcaacatccctatgctgcctcgcgagctttctgacgatctctgctcactgcgcgccaatgaagtccgcccggtactggcatgccgcatgacgctctccgctgatggcaccattgaagataatatcgaattctttgccgccaccatcgaatccaaagcaaagctggtgtatgaccaggtttctgactggctggaaaataccggtcgactggcagcctgaaagtgaagcaattgccgaacaagtccgtttgctagcgcaaatttgccaacgccgcggcgagtggcgtcataaccacgcactggtgtttaaagatcgcccggattaccgctttattctcggtgaaaaaggtgaagtgctggataatcgtcgccgagcccttgtcgcattggccaaccgtatcgtcgaagaagcgatgattgccgctaacatttgtgcggcccgcgtactgcgcgataagctcggttttggcatctataacgtgcatatgggcttggatccggcgaatgccgacgcgcctgcagcgatgatgaaacacccagggctgcatgtcgatgccgaacaagtgctcacgctgggacggtttctgcacactgctaagcccgccaccgcctgccgtgaggaaagatgcatgagcgagccgttaattgtcggcatccggcatcatagtccggcctgcgcccggctggtgaaatcgttaatcgaaagccagcggccacgatacgtgttgattgaaggcccggctgattttaatgaccgggtagacgaactgtttttagcccaccagcttccggtagctatttacagttattgccagtatcaggacggtgcagcccccgggcgtggtgcctggacgccatttgctgaattttcgccggagtggcaggcgctacaagccgcacgtcgcattcaggcacaaacttacttcatcgatttgccttgctgggcgcagagtgaagaagaggacgattcgcctgatacgcaagatgaaagccaggccttactgctgcgtgccacccgcatggataacagcgataccctgtgggatcacttgttcgaagataaagccagcaaactgcattaccctctgcgctggcgcactattttgcccaactgcggggcgacgccttcggcgatgcgctcaatcgtcagcgcgaagcctttatggcccgctggattggatgggcgatgcagcaaaataatggcgacgtgttag

SEQ ID NO: 131841 - DNA, 2300 bp, Homo sapiens
atgaacaaatttattaaagttgcactggtaggtgcagtactggctacgttaactgcatgtactggtcatattgaaaaccgtgataagaactgctcttacgactacctgctgcacccggcaatttctatttctaaaatcattggcggttgcggtcctactgcacacgcttccaccaaaccgcgcaagattgacggtctgggcatcaagcatgttcagttaagcggtgaaggctgggatgcggatcgctgctgggcattctggcaaggttacaaagccccgaaaggcacgcgtaaagtggtgtggccggatctggacgatgcccagcgccaggaactggataaccgcctgatgatcatcgactgggtgcgtgacaccatcaacgcaccggcagaagaattgggaccatcgcaactggcacagcgtgctgttgatctgatcagcaacgtcgcgggcgatcgtgtgacttatcggatcaccaaaggcgaagatctgcgtgacaaggttatatggggctgcacacagtcggacgcggttcagaacgttctccggtattgctggcgctggattacaacccaactggcgataaagaagcgccagtgtacgcgtgcctgcatcaaacagactgcgtttatggactcgatgaagtcggacatgggcggcgcggcaacggttaccggggcgctggcatttgccattacgcgcggactgaacaagcgcgtgaagctgttcctctgcttccgcccggtactggcatgccgcatgacgctctccgctgatggcaccattgaagataatatcgaattctttgccgccaccatcgaatccaaaagcaaaggtggggtaagaccaggtttctgacgggttggaaaattccggtgactggcagcctaaaagtaaagcaatttccgaacaagtccgtttgatagcgcaaatttgccaaccccgcgcagagtggcgtcatacccacgcactggtgtttaaagatcgcccggattcacgctttattttcggtgaaaaaggtgaagtgctggatatcgtcgccgagcctcgtcgcattgccaaccgtatcgtcgaagaagcgatgattgccgttaacatttgtgcggcccgcgtactgcgcgataagctcggtttgggcatctataacgagcatatgggctttgatccggcgaataccgacgcgctggcagcgttgctgaaaacgcacggtctgcatgtcgatgccgaagaagtgctcacgctggacggtttctgcaaactgcgtcgtgaactggacgcgcaaccaactggtttcctcgacagcagcattcgtcgcttccagtcatttgctgaaattagcactgaacccggtcctcactttggcctcgcctcgtaccctatctggatcgagaacgtcgcctgggccgacaccattcgcgttcaaccgaactacccgcaactctcccgccgcaatttgcacgcgctgtcgttaaatattttcaaagatgaaggccgcgaagcgtttctgaaattaatggaaaccaccgatatcttcatcgaagccagtaaaggtccggcctttgcccgtcgtggcattaccgatgaagtactgtggcagcacaacccgaaactggttatcgctcacctgtccggttttggtcagtacggcaccgaggagtacaccaatcttccggcctataacactatcgcccaggcctttagtggttacctgattcagaacggtgatgttgaccagccaatgcctgccttcccgtataccgccgattacttttctggcctgaccgccaccacggcggcgctggcagcactgcataaagtgcgtgaaaccggtaaaggcgaaagtatcgacatcgccatgtatgaagtgatgctgcgtatgggccagtacttcatgatggattacttcaacggcggcgaaatgtgcccgcgcatgagcaaaggtaaagatccctactacgccggttgcggtctgtataaatgtgccgacggctacatcgtgatggaactgcaaagggagcaagtaatgaacaactttaatctgcacaccccaacccgcattctgtttggtaaaggcgcaatcgctggtttacgcgaacaaattcctcacgatgctcgcgtattgattacctacggggggcggcagcgtgaaaaaaaccggcgttctcgatcaagttctggatgccctgaaaggcatggacgtgctggaatttggcggtattgagccaaacccggcttcagtaaatgttgtgaaaatagaagcaatgagggaagaaatgagggacactagttctattgggtaa

SEQ ID NO: 131842 - DNA, 583 bp, Homo sapiens
cctgattacgaattcaatgtccgtacccggaggagggtatgactggaacaaccctgcagataacccccggaatctgcttcccggacaataaagttattcaccaggataatatcgaaatcccggcaggtctttaaaacagttccgtaataaatatccggtttcattcttatatgccagcaatggcagggatttgttcatccttaaatctgtcatgaggttaaaacaaatgagtaaagtctttatttgcgccgctattcctgacgaactggcaacaagggaagaaggcgctgtggctgtagccacagccattgaagctggcgacgaacgccgtgctcgagcaaaatttcactggcaattcctggaacattatccggctgctcaggactgcgcttataaatttattgtctgcgaggataaacctggcataccccgccctgccctcgattcatgggatgctgaatatatgcaggaaaaccgctgggatgaggagtctgcttcttttgtcccggttgagactgaatccgatccgatgaacgtcacttttgacaagctggcacctgaagtacagaacgctgtcatgtaa

SEQ ID NO: 131843 - DNA, 1164 bp, Homo sapiens
ttcaacgagatgccacgatgactcatcactgttgaaaacagccacgaagccagccggaatatctggcggtgcaatatcgggactgtttgctggcagacctgtatgaggcggaatatatgcatcaccttcaccaataaattcattagttccggccagcagattataaatttttatggtccgtggttgttcactcattctgaatgccattatgcaagcctcacaatatagttaaatgcgatgtttttgacggtgttttccgcgttaccatgcagcattaacgctgatagccggtccatgtcaaccaatcgcatcggagtgcgcatgatcaccaataccggcagtatgtccatgcgcgcctgcgcttgcagcagtgccggacagcgagtgggtatgagcaccatctgatgatgtcttccctgcattacgagtctggccactaccgcttgttgtgctcataatccccgcgcttagatttgaaatcgcggtataaccattagggaaaatgctcgtgttcgtgccaccaaatgcaccggaactcttgtgttggtgcgcaccggcactatttgcggtcccgctaatactatgggtatgcgccccggtgttattcgtggatttggttccgtaatcaaacgacgatgtggtttccgtccccaaatcccgactggatgcgctggggctttgggtgtgcgatttaatgcccgcctgttcctgagaaaaaacggggccgaccactgggcgggcttgcccttaatcgtccagccacgccatatcagggatcacgcctgacggataagcaactgcaagtttcgggtatgcagatttgtcaaaagtctgcccctgcatcagggcataaccagacggaacggtatctgatggccacgggattggtgcaccgactggataaatctctgcaggaggatgagccgaggtgtaaagctgcgcccacggcgaccagtttgcgtcggtcgtatcccgtcgtcaaggaataaatgccggagcatgagctccgcttgaaccactccagccgatgagtaactcgctttcgccaacgactgtcatccctttcaggtgaatgatatttccatacgctgttggatatccgttgttatacacctcgtataactcaagacctgctgccccctgcgtattgtctgtcagcgcggt

SEQ ID NO: 131844 - DNA, 576 bp, Homo sapiens
tacgaattcgagcgtccgacccggagatctcggcggctgacagagccttgaagaacccggcattaccagcttcggccttgacccgttcccgggccattaattatcgccagtcttgtgctgcccacgctacggacagcacaagatgtgcattcagcctcgccgttctgacggggctgtgttagcattaccccttcgtgaatccaccttccagcgtttcagagcctgccaatgagttatcaggtcttagcccgaaaatggcgcccacaaacctttgctgacgtcgtcggccaggaacatgtgctgaccgcactggcgaacggcttgtcgttagggcgtattcatcatgcttatcttttttccggcacccgtggcgtcggaaaaacctctatcgcccgactgctggaccacgacccatactttgaggatgattgtagttcatcaatgggtatgcgccccggtgttattcgtggatttggttccgtaatcaaacgacgatgtggtttccgttcccaaatccgtactggatgcgctggcgctgtgggtgtgcgatttaatgccgtcctgttcctgagataa

SEQ ID NO: 131845 - DNA, 3273 bp, Homo sapiens; identical to SEQ ID NO: 124943

SEQ ID NO: 131846 - DNA, 3021 bp, Homo sapiens
atgagtgaactcccattcacaattgcttcaaagagaataaaatacctaggaatccaacttacaagggatgtgaaggacctcttcaaggagaactacaaaccactgctcaaggaaataaaagaggatacaaacaaatggaagtacattccatgctcatggttaggaagaatcaatatcgtgaaaatggccatactggccaaggtaatttatagattcaatgccatccccatcaagctaccaatgactttcttcaaagaattggaaaaaactactttaaagttcatatggaaccaaaaaggagccgcatcgcgaagtaatcctgagccaaagaacaagctggaggatcacattactaattcaactatatacaggctcagtaccaaaagctgctcggtgtctgggctgaagcagacactgctggcggagtccgaggctctgaccagctacagccaccgggtgttctcggcctgggacttcggtctctgcggggacgtccacgtgcggctgcgccagcgcatcatcttgtacgaattaaaggggcaggtgcctgcattgctgctggatgacggtactttgctgacggaaggcgtagcgattatgcagtatcttgccgacagcgtccccgaccgccagttgctggcaccggtaaacagtatttcccgctataaaaccatcgaatggctgaattacatcgccaccgagctgcataaagagttaaagttttcttttcattggagcacgacctcgcacaaaggactcggcatgaaactcgtcggtagctacaccagcccgtttgtacgcaaactttctattctgttgttagaaaagggcataactttcgaatttattaatgaactgccctataacgcggacaacggcgtggcgcaatttaacccgttaggaaaagtgccggtgctggtgaccgaagagggcgaatgctggtttgattcgccgatcatcgctgaatatattgaattaatgaatgtcgctccggcgatgttgccgcgcgatccgctggagtcgttgcgggtgcgcaaaattgaggcactggcggatggcattatggatgccgggctggtatcggtgcgtgaacaggcgcgtccagcggcgcagcagtctgaagatgaattgttacgccagcgggagaaaatcaaccgcagtctggatgtgctggaaggatcgggcggttgcccggcatccaacgccattcatggccatatcaatgattttctggtgcgtaccgggttgagaagcggtattctacaaataagactttccaaactgctcaatgacatgaatgtttcaaccctagtagagatgaaacgcacgacatctgacaaaggaatgtttctacacgaagagatattactggtcttagctattgactctgtagcacagcatagtattccccatattttccacccggaaatatactcagagcaaacgagaaatggtaccgagctgaccgagaaactgcgccatgcctgcggagctgccgtcgagtgtgtcatttccgatacctgtatcgcgggtatggctgaagccgctgcttgcgaagaaaaattcagcagtggggatgttgcccgccgcgtcactgacaaaacccatgaccggagtgacaataccgccgccaataatggtcataacgatgaaggacgaaccatatttggtgtcctggccgagattcttaatgcccagcgagaagattgttgggaaattttcatgagcaccatgcaatccggcatcgtcaagtggtttgacgacggcaagggcttcggcttcatcacccccgccgacggcggcaaggacctgttcgcccatcacagcgaaatcaagaacaacggcggcttccgcactctggccgaaggcgcccagcccgcgccctgcgcgggctttgtgctttctgggcctgccgtcgacaatccacctcttatgtccgcactgcccgttgccgccccgaaggccctgaccgcttaccgccccttctgggccaagcgtttcggccccgcacccttcctgcccatgagccgggcggagatggagcagctcggctgggacagctgcgacgtcatcatcgtcacgggcgacgcctacgtcgaccatcccagcttcgggggatcctctagagtgaccacagcagcaagctgcaccgcccctaaggcaaaaaccggccgggcccctgttgaccctaatatcgacgaactgaaacagtaccataatccgcgctacggtcgtgttccggttggcggcaactattacgcggaaacgaaaatgagcacttacgaaaaggaaactgaggtaatgaaaaaattcagcggcattattccaccggtatccagcacgtttcatcgtgacggaacccttgataaaaaggcaatgcgcgaagttgccgacttcctgattaataaaggggtcgacgggctgttttatctgggtaccggtggtgaatttagccaaatgaatacagcccagcgcatggcactcgccgaagaagctgtaaccattgtcgacgggcgagtgccggtattgattggcgtcggttccccttccactgacgaagcggtcaaactggcgcagcatgcgcaagcctacggcgctgatggtatcgtcgccatcaacccctactactggaaagtcgcaccacgaaatcttgacgactattaccagcagatcgcccgtagcgtcaccctaccggtgatcctgtacaactttccggatctgacgggtcaggacttaaccccggaaaccgtgacgcgtctggctctgcaaaacgagaatatcgttggcatcaaagacaccatcgacagcgttggtcacttgcgtacgatgatcaacacagttaagtcggtacgcccgtcgttttcggtattctgcggttacgatgatcatttgctgaatacgatgctgctgggcggcgacggtgcgataaccgccagcgctaactttgctccggaactctccgtcggcatctaccgcgcctggcgtgaaggcgattctggcgaccgctgcgacgctgaataa

SEQ ID NO: 131847 - DNA, 708 bp, Homo sapiens
atggctgtgccggataacgttaccgatccgctgatgtcactggaagtctatggtcgcgtattcttgcagattggtgtcgctactgccgttattgcagtactgatgctgctgaccgcgccgaaactgcaccgcatgacgcaggatgacgctgcagacaaagcggcgaaagcagccgtagcacaaaaggagttaccgatgaaattgttctacaaaccgggtgcctgctctctcgcttcccatatcaccctgcgtgagagcggaaaggattttaccctcgtcagtgtggatttaatgaaaaaacgtctcgaaaacggtgacgattacttttccgttaaccctaaggggcaggtgcctgcattgctgctggatgacggtactttgctgacggaaggcgtagcgattatgcagtatctttgcgacagcgtccccgaccgccagttgctggcaccgggaagcaagcagaagccgggaagccgcgaaagatgcgagaaagtgcgaccccctccccagatccccggtcccccgtcgaaatccctgtcggccggtcaaaccctagacaatggaagctccacgttttcatcctcattctcccccacaagtccggtcgcgggttcccctcggcccgggaccccggcgccagccccggagtcggagcctgcacgatacgccccctcccgccggggcaggatgacaaacggatatcggtga

SEQ ID NO: 131848 - DNA, 1149 bp, Homo sapiens
  misc_feature (1)...(1149): n = a,t,c or g
ttacattgtggttttcaatgcgttatccgcagcgtgacgctccagcgccagttcaatcaaacgtgtgatcagatcggtgtaacccagaccgctggcttgccacagcttcggatacatactgatattagtgaagccaggcagggtgttgatctcgttgatcancacttcgttctctggggttaaaaacacgtctacacgcgccatgcctgcgcatcccaacgtttgataagcctgaacggcaatcgcccggatcttatcgttgatttctggcgcaatggctgccggaactaccactttcgcgccatcttcgtcaatgtacttggtgtcgtaggcatagaaatcgctggtgagtacgatctctccacaggtgctggcttgcggattgtcgttgcccagaactgcgcattcgatctcacgacctttgatcccttgctcaacgatcactttatgatcgaactcgaacgccagatcgacggcaattgcgtactgttcttcactggttactttgctgacaccaacagaagagccctgattagccggttttacaaacagtggtaaccccagtttagactccacttcggctatgaaattgctgaaggaaatcgtcctgaaatggttatccccctcttcacgacgctgcatctgctgctggatgtccggatgattttcctgttgccatgcctcataagcggccatatccaccacttcaccggattcacgttgatgcgctcggtaatgtccattacgacgataccagggtgatctcaaaggggccgaaaggctgggcgaatctgaacaccaaagataccaacgtctgggaaggtgattaccagatggtgggtcgccagggtcgcggtaaagcggacctcctgtctgccgggttctgacacctggagcgtggtaggtagcgaaattattcatgaccgcgaagaacaagttgcggagatctggaacgcccgctttaaggtgggtccggtaccgatcttttatagcccctatttgcagttgccggtgggtgacaaacgtcgctctggtttcttgatcccgaacgccaagtacaccaccaccaactactttgagttctacctgccatattactggaacatcgcgccaaatatggatgccaccatcacgccgcattatatgcat

SEQ ID NO: 131849 - DNA, 2112 bp, Homo sapiens; identical to SEQ ID NO: 129868

SEQ ID NO: 131850 - DNA, 1857 bp, Homo sapiens
atgttgttgtcagctatttcaagtacagccaaaaactggaccacagtgcagatgtcccatcaacagcatagtcttctccggttgatcagcattttccgaaaggccacggtcgctgaccggggttggcaccagccactcgaaggtctacgcctgggcggttcaatgctgatgcaggggctgattagcgccgagcagctggcacaggcgctggcagagcaaaacggcgtggcgtgggaatccatcgatgcctggcagatcccttcctcgctgattgccgaaatgccggcctccgtggcgctgcattatgcggtactgccgctgcgtctggaaaatgacgagttaattgtcggcagtgaagatggtattgacccggtttcgctggcggccctgacgcgtaaagtcggacgcaaagtgcgttacgtcattgttctgcggggacaaattgtcacagggttacgtcactgctcactttttgctaaccatcgaaatcgaacgcagccacgaacggtgcgaattcctctcaccgacgattatcgtcgcctggttctcagggaaagcaggtccactgtggcctgtgaggacgagagctctgggcaggctcggacactggcagaccctggtcctggctggccaaggcagcaggaggctgacccgcggctgattgagtccctctcccagatgctgtccatgggcttctctgatgaaggcggctggctcaccaggctcctgcagaccaagaactatgacatcggagcggctctggaaaccatccagttattcaaagcatcccccgccgttgtgaccacttttgcccacctcttctgcgtgcccctcttctgtctcatagttgtgttaagcttgcgtagaattgcaggtctctgtacaggccagtttctctgccttcttccaggatcaggggttagggagcgacttatcgacaacacagaagttatcctggtactcgactgtggcgcgaccaatgtcagggccatcgcggttaatcggcagggcaaaattgttgcccgcgcctcaacgcctaatgccagcgatatcgcgatggaaaacaacacctggcaccagtgtgccaccatccgcggtatcgccgtcaccacctttggtgtggatggcgctctggtgtggttgaaagaaaatcatccagaactgctggaacgcgcgcacgcctggctctttatatcgtcgctgattaaccaccgtttaaccggcgaattcactactgatatcacgatgaccggaaccagccagatgctggaaatccaagcaacgcggattcaggtccgcaaatttgacaagccaccggtagtccacgccgactcgtccgtcgtctggtggaagcgggtgaacagattgcttgctggcaaacttgccatcgtcattgatgattttgggtatcgcccgcacaacgaaaaccaggtgctggcgatgccttccgctatctccgtcgctgtattacccgattcaccgcacgccagagagatggcgaccaaagcgcataacagcgggcacgaagtgttgattcatctcccgatggcaccgttgagtaaacagccgctggagaaaaatacgctacgcccggagatgagcagcgacgaaattgagcgcattattcgtagtgcggtcaataacgtgccctatgccgtggggatcaacaaccacatgggcagcaagatgacctctaacctgtttggtatgcagaaagtgatgcaggcgctggagcgttacaatctttacttcctcgacagcgtaaccatcggtaatacccaggcgatgcgcgccgcgcaaggcactggcgtgaaggtgatcacacggaaggtattcctcgacggattcgcaaaatga

SEQ ID NO: 131851 - DNA, 2243 bp, Homo sapiens
atgatacgccacatccggcatggtatgcggatgtggcgtatgctgataagacgcgccagcgtcgcatcaggcaaccgctcgggcgttagatgttggatgcggcgtaaccgccttatccaacctacgggtggagcacttcacagcggtgtaggcctgataagacgcgccagcgtcgatcaggcaaccggcttgggcgttagatgtcggatgcggcgtaaccgcctatccgacctacggggtggagcacttcacagcggtgtaggcctgataagagcgccagcgtcgcatcaggcaaccggctcggacgttggatgtcggatgcgcgtaaccgccttatccaacctacggggtggagcacttcacagcgacgcgccagcgtcgcatcaggcaaccggcttgggcgttgatgtcggatgcggcgtaaccgccttatccgacctacggggtggagcactcacagcggtgggtgccgcacttcacagcggtgtaggcctgataagacgcgccagcgtgcatcaggcaaccggctcgggcgttggatgtcggatgcggcgtgaccgcttgtctgacctacggggtgccgcacttcacggcagtttagcgaactacccgttgtcaattttctcttccgccttccagacgcggtacttcacatctacttgtctggcgtatacaccacgatcggcagcttgctgttgtaacgcagcatccagcatcgcccagatacgcggtcaatgcgggtgtgaaccaaaaaatggtagcgcgtgcgttgaatggctggatgtgcaacctgaagatcgcgtactggatctgttctgcggtatgggcaactttacactgccattggcgacacaagctgccagtgtggtcggtgtagaaggtgttccggcgctggtggaaaaaggccagcagaatgcgcgtcttaatggcttacagaatgtgacgttttatcacgaaaatcttgaagaagatgtcacaaagcagccgtgggcgaaaaacggcttcgataaagtgttgctggacccggcgcgagcaggtgccgcaggtgttatgcagcaaattataaaactggaacctattcgtatagtttatgtatcctgtaaccctgcaacgctggctcgggatagcgaagcgttattaaaagcaggatataccattgcgcgactggcgatgctgggtattgttccccacacggggcctctggggtcgcgggggccttttcgacgcttaatagtgtcgcagtgcccattcggggggtcggggctcaaggagaggccgcacgggatattacggtcagcgtaccggtcaccggagaactggacgacggcactgcgaagcagtcattcagcactgcagcccgtcgggggattatttctgacagatttgtagaagaattttgcagttttggcgcgaaagatggctgtagtacaccgggatctgcccgacgaacgcgggaaggacattggcagcttgccggacgggttgtaatcgccaacaatacatcggcaattgcattaccgccttcagtccccgcaaaccaggttccagaatcgcatcagcctgctgatcttctttcaccagcgccagcggacgccgttcatcagcaccagcaccagcggtttaccggtggctttcagcgccgaatcaagtcacgttggctttgcggaatagtgatatcggtccggctggagcttcccaccaccacatcgattgtttcgccgtctgcaccgcttcatcaatcatctcttgcggcgaaccggatcgactttgaccgcttcttcatactgattcaggaaatcgataatgctttgtcactggtaacgttcgcccctttggcatacagcactttaccgtttcaccgacggcaatttttaatcccgtggcccaaccaccgcaatggtggccgattttttccagcggtaacgttcgagaccggtttttcagcaacaccaagctttcgcgccccttcagcgctcttacggtgcagcgctttcgcatggtatcaccggtcaatctttcggcccaaatggctgtatgggtcgttaaacaacccccatatcatatttaaccgtcagtacatggcgggcagcatcgtccagctctgccatcgtcactttgccgatttaatcaacccaggcagattaggctcggacctgctaatcttgactcgaaaaagaaacaaggatccgttaaaaatccttaatgctgagaatgttctcacgcaaacaacatcatggacataa

SEQ ID NO: 131852 - DNA, 1347 bp, Homo sapiens
ttaatttgcgctagcgttaaacttcgccgcttcgggctgtttgccccagccttgccactgatgctggaagtaaacgatcagcgtgctctggctgatgctttcgcttaatacttcaaagaagcgattagcataaacaggttctatcggtttcttcggtttgcacagcttcacgccacggaacggattacgcggtgcatcaggcacagcgtttttcggcggtgtagaagtatcaacctgcggttcattcagcaagctgctggctttcaccagcgtaatgtctggcggcaggttataaaccatctgttgcaacacgcgtaccgttgcagggtgaggatgcccaatggcaatggtcgaaccgttgcgacgcgccaggtcaattgcgcgattaaattgcacacggatgtccgcttcattttgcgaatcgtcgaggaataccttccgtttgatcaccttcacgccagtgccttgcgcggcgcgcatcgcctgggtattaccgatggttacgctgtcgaggaagtaaagattgtaacgctccagcgcctgcatcactttctgcataccaaacaggttagaggtcatcttgctgcccatgtggttgttgatccccacggcatagggcacgttattgaccgcactacgaataatgcgctcaatttcgtcgctgctcatcttaggtgcagcatcggtcgacgagcggaaccttaaggggcacgggttcgcggctaacctgtcatagacctgcggaaacggagagcgtatctttgaaacagctattatcctggttcgccggccatttgctttcttcacggatattcgcccgttaaatggacctgtcgggattcggcttggatgcttaactctgttgctgttgatttttgtaatctccagctttattggtacgtcgctttcgtcgttcattcttaaacgttcggtaaaactggccttagcaggcgcgccgttaatactggctgtgagtgcgttggtactgacgttgtggggaagcgataaaatcgttgctaccggcgtggcgattatctgggggctaacttttgcattggttcccgtcggttcgccgttgatgttgtccggcacattgatgttgctgactgcattgttggttaccaacgcttcccaataattgctctgattattacgttccatcgccacgatggcctcgcgtatatgttgtttattgttttcatctgacaacattaacttttcccacgcttcatctgataatgacgcctgtggcgtgcaaattttacgtaaatcttgtaataccgtggttttctcttttgcggactgcagtgagctaaaaggcgactcggcgtatacgatgcctggcat

SEQ ID NO: 131853 - DNA, 1875 bp, Homo sapiens
atgctacgcattcactgcatgcagcattggtacaacctgagcgatggcgcgatggaagatgctctgtacgaaatcgcctccatgcgtctgtttgcccggttatccctggatagcgccttgccggaccgcaccaccatcatgaatttccgccacctgctggagcagcatcaactggcccgccaattgttcaagaccatcaatcgctggctggccgaagcaggcgtcatgatgactcaaggcaccttggtcgatgccaccatcattgaggcacccagctcgaccaagaacaaagagcagcaacgcgatccggagatgcatcagaccaagaaaggcaatcagtggcactttggcatgaaggcccacattggtgtcgatgccaagagtggcctgacccacagcctggtcaccaccgcggccaacgagcatgacctcaatcagctgggtaatctgctgcatggagaggagcaatttgtctcagccgatgccggctaccaaggggcgccacagcgcgaggagctggccgaggtggatgtggactggctgatcgccgagcgccccggcaaggtaagaaccttgaaacagcatccacgcaagaacagaacgggcatcagcatcgcatacatgacaggcagcatacgggccagggtggagcacccatttcgcatcatcaagcgacagttcggcttcgtgacagcccgataccggggttgcttgaacacgatcacaaatggggatgttttcccgctggcaacctggttcgggggaccatactcagaaagaaaccactggcaggatatgttaaaactggaagcagcggcgcaacgatttggcgatgggcatctcaatgaacgtatccactttgatgagggttcgagctttgaacgacttggcgtcgcatttaaccagatggcggacaatatcaacgccttaattgccagcaaaaaacagcttattgacggtatcgctcacgaactgcgaacaccgttagtgcgcctgcgttatcgactggagatgagcgataacctgagcgccgccgaatcccaggcgttgaatcgtgatatcagtcaacttgaagctttaattgaagagctgctgacttatgcccgactcgatcgcccacaaaacgagcttcatcttagcgaaccagacctgccgttgtggctgtcaacgcatctggcagatattcaggcagtaacgcccgataaaacggtacggataaaaacgctcgtgcaaggccattatgcggcgttggatatgcgcttaatggagcgcgtgctggataatttgctcaataacgccctgcggtactgccattcaacggttgaaaccagcctgctactgtcggggaatagagcgacattaattgttgaggatgatggcccagggattgccccagaaaaccgggaacatatctttgaaccttttgttcgcctcgatcccagccgggatcgctcaaacggcggctgcgggctggggctggcaattgtccactctatagcactggcaatggaccacttcagcgcgcaatttgctgcgcacagccaacataactacacggccgggtacccagccatgtgccagcaacgttttcgtctttccagttatggtcattcaccgttggtgcatgtatacatcgttccatgtacatcatatcgagatcaaggtgcccgtttgatccgaaaacgaaaacagccaccatgttgggcattacgtcattcgtcatggagaggtgtcaattattcattctgtcaagggcatttaccagtggtcaacccacatgctattatccaacagcatcatccaacacatggttctcttcaactcgtcattgtcaagtcatcaatctccactcaaattcaatgcacatttccttaa

SEQ ID NO: 131854 - DNA, 1272 bp, Homo sapiens
atgagtaaacttttggatcgctttcgctacttcaaacaaaagggcgaaacctttgccgatggtcacggacaggtgatgcatagcaaccgcgactgggaggacagctatcgccagcgttggcagttcgacaaaatcgtgcgttccacccacggtgttaactgtacaggctcctgtagctggaaaatctacgttaaaaatggtctggtgacctgggaaatccaacagaccgactacccgcgcactcgccctgacctgcccaatcatgaacctcgcggctgcccgcgtggcgcaagttactcctggtatctttacagcgctaaccgcctgaaatacccgctcattcgtaaacgactgattgaactgtggcgcgaagccctcaagcaacacagcgatccggtactggcgtgggcatcgattatgaacgatccgcaaaagtgcctgagctacaaacaagtgcgtgggcgcggcgggtttatccgctccaactggcaggaactaaaccagctgattgccgccgctaacgtctggaccatcaaaacctacggcccggatcgcgttgccggtttctcgccgatcccggcgatgtcgatggtttcttacgccgccggaacgcgttatctgtcgctgcttggcggcacctgtttaagtttctacgactggtattgcgacctgccgcccgcctcgccgatgacctggggcgagcaaaccgacgtaccggaatctgccgactggtataactccagctacatcatcgcctgggggtctaacgtaccgcagacacgtacgccggacgcccacttctttaccgaagtacgctacaaaggcactaaaaccatcgccattacccctgactactctgaagtggccaaattgtgcgaccagtggctggcaccgaaacaaggcactgatagcgccctggcgatggcaatgggccatgtgattttaaaagagtttcatctcgataatcccagcgactactttatcaactactgccgccgctacagcgacatgccgatgctggtaatgctggagcctcgcgacgatggtagctacgttcccgggcgcatgatccgcgcatctgacctggtggatggactgggcgaaagcaacaatccgcagtggaaaaccgtagcagttatacccgagttcagcgaagcggactttatagaactcatcaaggttattggaatagatccccaggaaacgcatcctttcaatcagcgggttagatttgtccgccgcttcctgaagcacgcgttcattgaacgataa

SEQ ID NO: 131855 - DNA, 1988 bp, Homo sapiens
  misc_feature (1)...(1988): n = a,t,c or g
atgaacgacagtgaatttcatcgcctggctgatcaactctggctgaccattgaagaacgcctggacgactgggatggcgacagcgatatcgactgcgaaatcaacggcggcgtactgaccattacctttgagaatggcagcaaaatcattatcaaccgccaggagccgctgcaccaggtatggctggcaaccaaacagggcggctaccattttgacctgaaaggcgatgagtggatttgtgatcgcagcggcgaaaccttctgggatttgctggaacaggcggcgacgcagcaggcgggtgaaacaatcaccgggtttcgggtctataccctgcaacttaacgcccagttaagactcggtttccttcggctcccctattcggttaaccttgctacagaatataagtcgctgacccattatacaaaagttcccgaagccaccaatccatctctggaaagttctgtggatgtcaagctcagtgccaaccgcctgaaatacccgatgatgcgcaaacgcctgatgaaaatgtggcgtgaagcgaaggcgctgcatagcgatccggttgaggcatgggcttctatcattgaagacgccgataaagcgaaaagctttaagcaggcgcgtggacgcggtggatttgttcgttcttcctggcaggaggtgaacgaactgatcgccgcatctaacgtttacaccatcaaaaactacggcccggaccgtgttgctggtttctcgccaattccggcaatgtcgatggtttcttacgcatcgggtgcacgctatctctcgctgattggcggtacttgcttaagcttctacgactggtactgcgacttgcctcctgcgtctccgcaaacctggggcgagcaaactgacgtaccggaatctgctgactggtacaactccagctacatcatcgcctgggggtcaaacgtgccgcagacgcgtaccccggatgctcacttctttactgaagtgcgttacaaagggaccaaaactgttgccgtcacaccagactacgctgaaatcgccaaactgtgcgatctgtggctggcaccgaaacagggcaccgatgcggcaatggcgctggcgatgggccacgtaatgctgcgtgaattccacctcgacaacccaagccagtatttcaccgactatgtgcgtcgctacaccgacatgccgatgctggtgatgctggaagaacgcgacggttactacgctgcaggtcgtatgctgcgcgctgctgatctggttgatgcgctgggccaggaaaacaatccggaatggaaaactgtcgcctttaataccaatggcgaaatggttgcgccgaacggttctattggcttccgctggggcgagaagggcaaatggaatctggaatccattgcgcngcattgaaaatccgcattttcgcagcgtaaaacacaatccggtgctggtgcgccaattgcccgttaaaaacctgacgttagtcgatggcaacacctgtccggtggtcagcgtttatgatttggtactggcgaattacggcctcgatcgcgggctggaagatgaaaacagtgcgaaagattacgctgaaatcaaaccgtacaccccagcctggggtgagcaaattaccagggtgccgcgccagtatattgaaaccatcgcccgtgaatttgccgataccgcccataaaacgcatgggcgctcgatgattatcctcggcgcaggtgttaaccactggtatcacatggacatgaactaccgcgggatgatcaatatgctgatcttctgcggttgtgtcgggcaaagcggtggcggctgggcacactatgtcggccaggaaaaactgcgcccacaaaccggctggttgccactggcctttgcgctcgactggaaccgaccaccgcgccaaatgaacagcacctcgtttttctacaatcattccagccaatggcgctatgaaaaagtctctgctcaggagttactttccccgctcgccgatgcca

SEQ ID NO: 131856 - DNA, 5728 bp, Homo sapiens
  misc_feature (1)...(5728): n = a,t,c or g
atgtaccctctcccttttacggggaagggtgcaagcccccaatcaccaaattttatttcgcaactatatgtggtcgtagggcctctgttctgcataaccgtttcagtcaacgacctcgactcttttggtcagggcgtggcgcgacataacggcaaaacgctatttatccccggattattgccgcaggaaaacgcggaagttactgttactgaagataaaaaacagtatgcccgcgctaaagtcgtacgccggttaagcgatagcccggaacgcgaaacgccacgctgtcctcattttggcgtatgcggtggctgtcagcaacaacacgccagcgtggatttacagcagcgaagcaaaagtgcggcactcgcccgattaatgaaacacgatgtctctgaagtgatcgccgatgttccctggggctatcgccgtcgcgcgcgtttaagtctgaactacttaccgaaaacacagcaacttcagatggggtttcgcaaagcgggctccagtgacattgtcgacgtcaaacaatgccccattttagcgccccaacttgaagcattgctgcccaaagtcagggcatgtctgggcagcttacaagctatgcgccatcttggtcatgttgaactggtacaggcaaaccagcggcacgctgatgattttgcgccataccgcaccgctaagttcggcagatcgcgaaaaactggaacgcttttcgcattctgaaggcctggatctgtatctcgcccccgatagtgagatactcgaaaccgtctctggtgagatgccctggtatgactcaaacgggttgcgcttaacttttagcccgcgcgattttattcaggtcaatgcgggtgtgaaccaaaaaatggtagcgcgtgcgttggaatggctggatgtgcaacctgaagatcgcgtactggatctgttctgcggtatgggcaactttacactgccattggcgacacaagctgccagtgtggtcggtgtagaaggtgttccggcgctggtggaaaaaggccagcagaatgcgcgtcttaatggcttacagaatgtgacgttttatcacgaaaatcttgaagaagatgtcacaaagcagccgtgggcgaaaaacggcttcgataaagtgttgctggacccggcgcgggagcacgggatcaacgttctgaattctatggccatttcgggcaacgacaatccgcaagccagcacctgtggagagatcgtactcaccagcgatgtctatgcctacgacaccaagtacattgacgaagatggcgcgaaagtggtagttccggcagccattgcgccagaaatcaacgataagatccgggcgattgccgttcaggcttatcaaacgttgggatgcgcaggcatggcgcgtgtagacgtgtttttaaccccagagaacgaagtggtgatcaacgagatcaacaccctgcctggcttcactaatatcagtatgtatccgaagctgtggcaagccagcggtctgggttacaccgatctgatcacacgtttgattgaactggcgctggagcgtcacgctgcggataacgcattgaaaaccacaatcggaaaatatcgcaatgcctcttcaacgcctggcaacattgcctatgcgttgtttgtgctgttttgcttttgggctggggcgcaattgctgaacctgttagtgcatgcgcccggcgtctatgagcgtttaatgcaggtccaggaaacaggtcgcccacgggtggaaattggtttaggtgtcggcaccattttcgggctgatcccgtttttatggtggcgctatggctgcactggcgacatcgccgccactgatttcgaattattgtgggaattagctacccatgccgggcaaatcatggaccgcgatgcattgctgaaaaatttacgcggcgtcagttatgacggactggatcgtagcgtggacgtggctatttcgcggttaagaaaaaaactgctcgataacgccgcagaaccttatcgcattaaaactttttacctgttattgtttgtctgcttccttgtgatgtctctgctggttgggctggtgtacaaatttaccgccgaacgcgcgggcaaacagtcgctggatgatttgatgaacagttcgctgtatctgatgcgcagcgaattgcgtgagatccccccacacgactggggtaaaactctgaaagagatggatttaaatctctctttcgatctgcgtgtcgagccactgagtaaataccatcttgatgatatttccatgcaccgactgcgtggcggcgaaattgtcgccctggacgatcagtacacgttaatgcagcgtatcccgcgcagccactacgtgctggcagttggtcctgttccttatctttattatctccatcagatgcgattgctggatatcgccctgatcgcttatattgctatttccctcgccttaccggtgtatatctggatgcgtccgcactggcaggatatgttaaaactggaagcagcggcgcaacgatttggagaagggcctctcaatgaacgtatccactttgatgaggacgaaggacgaacaagggcagagggaccgcgggcgcggccagcggagccgcgggtaagaggaccggggcgcccaaaccaggccgaagacggacgcaggccgcggaccgagctaaagagacgctggcaggcctggagtctgccaacccaagccaagggccagcaacagttgagcgagctgcgcgccaacgaatcccgtctgcgtaacagcattgcccgtgcggaagccgcggcgaaagcgcgtgcagaacgagaagcacgtgaggcccaggcggttcgcgaccgccagaaagaagcgacgcgcaaaggcaccacctacaaaccgaccgaaagcgaaaaatcgctgatgtcccgtaccggtggtctgggcgcgccgcgtggtcaggcattctggccggttcgcgggccgacgctgcatcgctatggcgaacagctacagggtgaattacgctggaaaggtatggttatcggtgcttctgaaggtactgaagttaaagcgattgccgacggtcgggtgattctggctgactggctgcaaggctacggtctggtggtggtggttgagcatggtaaaggcgacatgagtctttacggctataatcagagcgcactggtgagcgttggttcgcaggttcgcgcgggccagccgattgcactggtgggcagcagtggcggtcagggtcggccttcactctatttcgaaattcgccgccaggttttgtttccatttcgtcgtaacgttcttgcatttgccgctctgttggcgctctcctcccccgtacttgctggcaaacttgccatcgtcattgatgattttgggtatcgcccgcacaacgaaaaccaggtgctggcgatgccttccgctatctccgtcgctgtattacccgattcaccgcacgccagagagatggcgaccaaagcgcataacagcgggcacgaagtgttgattcatctcccgatggcaccgttgagtaaacagccgctggagaaaaatacgctacgcccggagatgagcagcgacgaaattgagcgcattattcgtagtgcggtcaataacgtgccctatgccgtggggatcaacaaccacatgggcagcaagatgacctctaacctgtttggtatgcagaaagtgatgcaggcgctggagcgttacaatctttacttcctcgacagcgtaaccatcggtaatacccaggcgatgcgcgccgcgcaaggcactggcgtgaaggtgatcaaacggaaggtattcctcgacgattcgcaaaatgaagcggacatccgtgtgcaatttaatcgcgcaattgacctgncgcgtcgcaacggttcgaccattgctgttattgctgacggcgttgtgcataccctgcggtcggagatcggtcaaataccagggcaaaccatcaaaccactgttcgtcgccatctgcgcctgttaccagacaacttccctgcggccagcacaaccggatgtcggcgaatttatgcgcctttccggtatcgtccacccgccagacgggaatacgctcaattccgcgataaggacgcagcagtgcatatcgcgttgcccgtgctttaccaaagcgaatcacccgatcttctctggcaacaaggcgcagaaccggattccaagtgcgattttgatcatgtacgttgacagcgtagtactgacgacttcagcgggcaagggcgaaacctttgccgatggtcacggacaggtgatgcatagcaaccgcgactgggaggacagctatcgccagcgttggcagttcgacaaaatcgtgcgttccacccacggtgttaactgtacaggctcctgtagctggaaaatctacgttaaaaatggtctggtgacctgggaaatccaacagaccgactacccgcgcactcgccctgacctgcccaatcatgaacctcgcggctgcccgcgtggcgcaagttactcctggtatctttacagcgctaaccgcctgaaatacccgctcattcgtaaacgactgattgaactgtggcgcgaagccctcaagcaacacagcgatccggtactggcgtgggcatcgattatgaacgatccgcaaaagtgcctgagctacaaacaagtgcgtgggcgcggcgggtttatccgctccaactggcaggaactaaaccagctgattgccgccgctaacgtctggaccatcagaacctacggcccggatcgcgttgccggtttctcgccgatcccggcgatgtcgatggtttcttacgccgccggaacgcgttatctgtcgctgcttggcggcacctgtataagtttctacgactgctacatcatcgcctgggggtcaaacgtgccgcagacgcgtaccccggatgctcacttctttactgaagtgcgttacaaagggaccaaaactgttgccgtcacaccagactacgctgaaatcgccaaactgtgcgatctgtggctggcaccgaaacagggcaccgatgcggcaatggcgctggcgatgggccacgtaatgctgcgtgaattccacctcgacaacccaagccagtatttcaccgactatgtgcgtcgctacaccgacatgccgatgctggtgatgctggaagaacgcgacggttactacgctgcaggtcgtatgctgcgcgctgctgatctggttgatgcgctgggccaggaaaacaatccggaatggaaaactgtcgcctttaataccaatggcgaaatggttgcgccgaacggttctattggcttccgctggggcgagaagggcaaatggaatcttgagcagcgcgacggcaaaactggcgaagaaaccgagctgcaactgagcctgctggctgtgaagatacgcttcttcagtcatctctactatcagattggcctgacggtattccagcacacgctcgacattggggccatcgtttccttcgacgatgacgagtggtgcggtaacgtgcaacgcatcttcaacaggatcatgcttttgtcgatcgtactgcggccacgtacaatccccttccacgacctggcgcagattttccgtcagtttcgcaacgtcaaatgtctctggtgcgcctttgaaggggcgcaattgatgcgcatccagccagctattgtaatggtgaaaaccatccatcgggagcgtctgaatagcgggcagttccgggtcttgttgcgcgagatattcccagaaggtggttag

SEQ ID NO: 131857 - DNA, 1869 bp, Homo sapiens
atgggaaggacctgcttccacaattcaattaccacgatcctgaatggtcgaaatgatcgacgcataggtagacggacgaccgataccgcgtttttccagctctttaaccagcgatgcttcactgaaacgggctggcggcttggtaaagtgctgggctggtcgttcaatgttgccgatagttaccgcgccgtgctcatcgcgaatagtacaggcaccttcacacaaacggtcttgcggacaaacgcgtccggtaatttccggcagggtgttggtctggtgagaaagctcgacggcggcgtcgatgtttccggctttcaccagatgaatcccctaatgattttggtaaaaatcattaagttaagacaacaagatgtgcgaactcgatattttacacgactctctttaccaattctgccccgaattacacttaaaacgactcaacagcttaacgttggcttgcacgcattacttgactgtaaaactctcactcttaccgaacttggccgtaacctgccaaccaaagcgagaacaaaacataacatcaaacgaatcgaccgattgttaggtaatcgtcacctccacaaagagcgactcgctgtataccgttggcatgctagctttatctgttcgggcaatacgatgcccattgtacttgttgactggtctgatattcgtgagcaaaaacgacttatggtcgtggtgatgcgtctgttcctctacgcaccggtgggtgacagcgaagcgattcgcgtggtgctggcgattatcgcctttgcctccatcatcttcggtaacctgatggcgctgagccagaccaatatcaaacgtctgctcggttactcatctatctctcacctcggctatctgctggtagcgctgattgcctgcaaaccggcgagatgtcgatggaagcgcagcctcggcgcgttcggcgtggtcagcctgatgtccagcccgtatcgtggcccggatgctgattccctgttctcttaccgcggtctgttctggcatcgtccgatcctcgcggcagtgatgacggtgatgatgctgtctctggccggtatcccgatgacgctgggctttatcggtaagttctacgtgctggcggtcggtgtccaggcacacttgtggtggctggtgggtgccgtggttgtcggttcggcaatcggcctctactactacctgcgcgtggcgtgcgagcgcggtttgctggcgaaagatctctcttcatccattgtgattcgtaccagcgcggcatccgatgcgcgtatgggcggcgctacgcttccggctatgagtaactcgggctcggtaaccagggattacggaacaatgcctgtggtggtggtagcagaacacttcggagcggatgatgaacggctggcgcgtgcgctgatgctttcgcatttgagcgcaatttacatccatacccagttaccgcgtttgtctgcgctgtgtgccgcaacgaccgcagcaatgggggccgccgccgggatggcatggctggtggatgggcgttatgaaaccatctcgatggcgatcagcagtatgatcggcgatgtcagcggcatgatttgcgatggtgcgtcgaacagctgcgcgatgaaggtttcgaccagtgcttcggctgcgtggaaagcggtgttaatggcgctggatgataccgccgtgaccggcaatgaagggattgtggcgcatgatgttgagcagtcgattgccaacctgtgtgcgttagcaagccattcgatgcagcaaacggatcggcagattatcgagattttagaaaaacacggccagataagcgccaggttttggggatcgtgccggatgcgatgctggcgcatattgtccggcatacgggttgtttaa

SEQ ID NO: 131858 - DNA, 1246 bp, Homo sapiens
ttaatcctgacgaaggactttgtgaccataatcgagtaacgcatcagtgactttacgcatcatgcggctttcaggagcaaagcggtgccagtagagcatccgtcgttgaaatagcccaggcgttaagtcaatcagttcaccgctggccagctctttctcgatttgcaggtgcgggatcatacagcaggtggtgccctggcgagcaagttgtacgaacgcttctgaagaattaacgatatggcagggcacgctgcctggaggcagatcgaagttttgctgcaaaaaggcctggtgcatatcgtcaagatggtcaaacgcgaccactggcgctttcagtaatgccgaacgcgttacgccgttagggaaatatttttcggcaaagggttttgagctgacgaacagatagtcgagcgcaccaagtttatcgacaagacaactcggcagcgcctgatgttgaatactcaccgcgccgaccacttcgccgcggcgcagacgttcctgagtgcgggtttcatcttctaccctaatggcgcaatcagccacgttgatgacagcattcaggtcaatcagcaaaagtgtattggctgtaaatcctgcgtggtggcctgtccttttggtacgatgcaaatcgtcctgacacccgtcgcggcaggaaaagtaaaagccacggcgcataaatgcgacctttgtgcggggcccgaaacgggtcctgcttgtgttgagaattgcccgccggacgcgctgcaattggtcactgacgtcgcactctccggcatggcgaaatcccgccgcttgcgcaccgcgcgtcaggaacatcaaccgtggcatgccagtaccgcggcgcaagaaatgccggtaatgagtaaagtcgaacaaatgcaggcaacgcccgcgcgtggcgagccggataaactggcgattgaagcgcgcaaaaccggttttgatgaaatttatctgccatttcgcgccgaccaggcacaacgggaagcctcgcgctgccttaagtgcggcgagcacagcgtttgtgaatggacctgcccgctgcataaccatataccgcagtggattgaactggtgaaagccggaaacatcgacgccgccgtcgagctttctcaccagaccaacaccctgccggaaattaccggacgcgtttgtccgcaagaccgtttgtgtgaaggtgcctgtactattcgcgatgagcacggcgcgctctcccggaggcgcagggctgacgagtgccgccaag

SEQ ID NO: 131859 - DNA, 2415 bp, Homo sapiens
ttactttttcaccacaattaacggttcaatatcactctcttttttgatgaccagtgattcatcaccgcgcaaacacgtcccaccgtagttgccgccaacggtgaaggtacatacctgaatgtatttaccgtccactttcacgcaaccgacaaggtgctgaaagatgacaacctgctggcgctgttcgacatcccgaaaatcctctggccacgtttgcgtctctcctggcagcgtcgccgtcaccatatgatcactggtcgtatggatttctgctataggttgtcgattatggttggcggtgatgaagcggtatttgaacgtgttaaaccgctgtttgaactgctcggtaaaaatatcaccctcgtgggcggtaacggcgatggtcaaacctgcaaagtggcaaatcagattatcgtggcgctcaatattgaagcggagcccacgtatctgcgaaagcgggtaccggtatcgatgaactgcttggacgctatcctgctgcaggcggaagttctggagctgaaagcggtacgtaaaggtatggcgagcggtgcggttatcgaatccttcctcgataaaggtcgtggtccggttgctaccgttctggtacgtgaaggtactctgcacaagggcgatatcgttctgtgtggcttcgaatacggtcgtgttcgtgcgatgcgtaacgaactgggtcaggaagtgctggaagcgggtccgtccattccggtggaaatcctcggcctgtccggcgtaccggctgcgggtgatgaagttaccgttgtacgtgacgagaagaaagcgcgtgaagttgcactctatcgtcagggtaaattccgcgaagttaaactggcgcgtcagcagaaatctaaactcgagaacatgttcgccaacatgaccgaaggcgaagttcacgaagtgaatatcgtcctgaaggcagacgtacagggttctgtcgaagcgatctccgactccttgctgaaactgtctactgacgaagttaaagtgaagatcatcggttctggcgtaggtggtatcaccgaaaccgacgccacactggctgcggcgtccaacgccatcctggaagggctgttcacgttgacgttggatcggtaccgaatcgaggggtctgttctgggaaaaagtcgcatcgtaatcgacaccgttgtatgtcacgccgagttgataataacgatcctgcacccccggataggggtttacccaggcgtagacatgctcgctttcaaagttgccgttggtattgttgtcacaatagacgggaattttaatatcgtcagattcccagatcttatcaccgggtttggcattgcctggtacagcaaacggttgaatcgcttctgatttttctagaagacctggtgaaaactgtgccgtttccagcgcaatattgtcctgcatccatttaccgagccacggcttcaggtcgatgtcatccgcctggagccagacgcgaccattgcttaacaacccctcatcatcgcgcaaatccatgcgcacctgcatcacgccgtgcgatgaagcacgcgatcgtgaatctggcggtacaggtttggggctggcgattgttgaaaccacaatccccagcgtgatggcgacgatttccgcagacaatataaaatcggtacgaatcgccccttttattttgtccttttcaaacttcagcggatcctgcgcagagccagcagcgtctggagaagctggatagcgttgtcgatcccgttgccgcgattgaaaatgctgagatcgtgattgtcggcggcgggaatactttccagttgctcgcaagatgagtttgtcatcgcgcccggattctccaccgacccactggaagaacagcacagcgtagtgtctggtttgttgcataaataccacaaccgggcgcttttgctggtcaaaggcggctgcgcggtaaattgccgctattgcttccgtcgtcacttcccctatgccgaaaatcagggcaacaagcgtaactggcaaactgcacttgagtatgttgctgcgcatccggaactggacgagatgattttctccggcggcgatccgctgatggcgaaagatcacgagctggactggttgctcacacaactggaagatccggttgccgcggcctcccaaagtgctgggaatacaggcgtaagccactgtgcccagctttttctgactatcttctatgtgtggaataagactgattttcattttcacgggcgaatgatgcccggtgaatatgtactttcttccagctttggcatcgcaggtcacgatattcacgaactgccgtctggcggtcgcgatccgctctcctatgatgatccattgcgtcaaatcacccgcatgatccaaaaattcccgaaaccgatcatttcgatggtggaaggtagtgtttgggccatccgccat

SEQ ID NO: 131860 - DNA, 2125 bp, Homo sapiens
atgagatatatgggcagcatcttaccgcattccatacgctccactgcactctgcctgcgcatcgagtccgttacggcttgcgtgctgcagctggtcatccagcgtccacatcaacaaggccggtcaatcacggttcatcccacagcaatccagggcgatacacgccaggcaacagaaccatgtagacgcaacaacggccaagcaaaaagggcacagggaacacattacacaaggccgtataacaccctgtgcaagtacccctcgatgcagctcttccttggtaccgacacctttacgcattacccggactaccctgatccagaatttattccctttcgggaaaacgttgcagctaaactcaatagactcacggcagaacggtattcaaaatcagatcaatttcaggaagcgctttcacgtcagtggcagcgttatggcttaaattctgcggctgaaatgactcctcgccagtggtggctagcagtgagtgaagcactggccgaaatgctgcgtgctcagccattcgccaagccggtggcgaatcagcgacatgttaactacatctcaatggagtttttgattggtcgcctgacgggcaacaacctgttgaatctcggctggtatcaggatgtacaggattcgttgaaggcttatgacatcaatctgacggacctgctggaagaagagatcgacccggcgctgggtaacggtggtctgggacgtctggcggcgtgcttcctcgactcaatggcaactgtcggtcagtctgcgacgggttacggtctgaactatcaatatggtttgttccgccagtcttttgtcgatggcaaacaggttgaagcgccggatgactggcatcgcagtaacttaatgtcgcatcattacccaattgcatggcaacaaagtccgtattgcggaacagaacgtgattcattccccgttgccgcaagggcaacagtggacgcgcgagctggagatggtggtcgaaaacggctgctataccctgaaagacacttttgatgacaccaccattctgggctggatgatccagacggaagatactgaatacagcttaccgcagccggaaattgcaggcgagctgctgaaaatcagcggagcgcgcctggaaaacaaaggccagtttgacggtaaatggctggatgaaaaagatccgctgcaaaacgcctatgtgcaggccaacggtcaggtgatcaatcaggatccttatcattactacaccattaccgagagtgccgagcaggagctaattaaagccaccaacgagctgcacctgatgtatcttcacgcaaccgacaaggtgctgaaagatgacaacctgctggcgctgttcgacatcccgaaaatcctctggccacgtttgcgtctctcctggcagcgtcgccgtcaccatatgatcactggtcgtatggatttctgcatggatgagcgtggcctgaaggtttacgagtacaacgccgactccgcctcctgtcataccgaagcgggcttgatcctcgaacgttgggcggagcagggctataaaggcaacggcttcaataccattacgcgtgatagcagcgaggaagagattctctggctggaaacgatgttaaaccgcgcattgcatatttcgacagaaccttcggcggagtggcgtcccttgttggtagaaaaaataaagcaatttcaaaaaagccaccacttgaaaactgacggtgttgttggcttttcaaccatgaagatctgcaagccaatgcgcaaaccgttcttgaggtactgcgcagtggttccgcttacgacagagtcaccgcactggcggcacgaggcgaaaatcgtcgcagacaaggcgatttgggtagaagcccgcaaacagcagcaaccgctggccagttttcagaatgaggttcagccgagcacgcgacatttttatgatgcgctacagggtgcgcgcacggcgtttattctggagtgcaagaaagcgtcgccgtcaaaaggcgtgatccgtgatgatttcgatccagcacgcattgccgccatttataaacattacgcttcggcaatttcggtgctgactgatgagaaatattttcaggggagctttaatttcctccccatcgtcagataa

SEQ ID NO: 131861 - DNA, 1425 bp, Homo sapiens
atggcccagcagcataacattggcttacatggcgtgcgagagcaggatcttcctcacttgaccaagttctcttccaaaactcacaatataaagcaatttggggaactggtcaaggagattcctttcagctgttatgtggagtcccaaattactagcaggcagatggccccagtggtgtggcaggaccatggacagcgcccaccgggctattctgcgagccagccccaggcgcagaacgtctggatccgcacactgtacgatcgccatcgttttgttacacgcggcacgctgggctggattgaaaccggtgatttcgacaaagtaccgccggatctgcgtttcttcgccgggggcgaccgcagtattcgtggctacaaatacaaatctatcgctccgaaatacgccaacggtgacctgaaaggggcctcgaagttgataaccggatcgctggaataccagtacaacgtgaccggaaaatggtggggcgcggtgtttgtcgatagtggcgaagcggtaagcgatattcgccgcagcgactttaaaaccggtaccggggtcggcgtgcgctgggaatcgccggtcgggccaatcaaactcgattttgccgtaccggtcgcggataaagacgaacacgggttacagttttacatcggactggatattggcaaggtcaccggcggctggcgcgatctcaccttgtctgacgttcgttatgagcagccaggcgtggcggtaaaagcgggcaatctgcatctggctgtcgggcttgagtgcctgtggaacagcagtgtttgtattaatgatctggcgctgaaagacattcaggtcaacatcgacagtggaaccattgataacggtatcctggcgcttattcgccatacccgcgggaatgaaattctctttattcctgcgctgtttattctgttttcacttggcggcgcggtatttggtatgggagaagaggccgtcgcctttgccattatcatcgcaccgctaatggtccggctgggctatgacagtattaccaccgtcctggtgacctatattgccacgcaaatcggttttgccagttcgtggatgaacccgttttgtgtggtcgttgctcaggggattgccggcgttccggtgctttctggctccgggttgcgcatcgtggtgtgggttatcgccactctgattggcctgatctttaccatggtgtacgcctcacgagtgaaaaagaatcctcttctgtcacgcgtgcatgagtccgaccgcttctttcgtgaaaagcaggctgatgttgaacaacgtccgtttacctttggtgactggctggtattgattgtcctgaccgccgtaatggtctgggtgatttggggcgtgatcgttaatgcctggtttattccagaaattgccagccagttcttcaccatgggtctctaa

SEQ ID NO: 131862 - DNA, 509 bp, Homo sapiens
aggatcgtacgaccctgattactatattgcagctcggcacccggggatcagatagttttgataatgattgacgctatttaacacttcacacgggttgtatacggaaaagcattttgctttttgtattcaatttagacagaattttattaatcatttcacggtaatggggtgatgagatgttgcgtaacagggccagaaggctagactacaaaataatgcgttgatgatggaggcactgtggaagcgattaagggatcggacgttaatgtcccggatgcagtatttgcctggatgctggatggtagaggcggcgttaaaccgctggaaaatacagatgtgattgatgaagcgcatccctgttggctccaccttaattatgtacaccatgatagcgcccaatggctggcgacaacaccgctgcttcccaataacgtacgtgatgcgctggcgggcgagagcacgcgtccccgagtcagccgtctcggtgaaggcacgctgattacattgcg

SEQ ID NO: 131863 - DNA, 422 bp, Homo sapiens
gacaacgtaccaagaccaacgcacgtacccgtaagggtccgcgcaaaccgatcaagaaataatcggggtgattgaataatggcaaaggcaccaattcgtgcacgtaaacgtgtaagaaaacaagtctctgacggcgtggctcatatccatgcttctttcaacaacaccatcgtgactatcactgatcgtcagggtaacgcgttgggttgggcaacagccggtggttccggtttccgtggttctcgcaaatccactccgtttgcagctcaagttgcagcaaagcgttgcgctgacgccgtgaaagaatacggcatcaagaatctggaagttatggttaaagggccgggtccaggccgcgaatctactattcgtgctttgaacgccacaggtttccgcatcactaacattattgatgtgactcc

SEQ ID NO: 131864 - DNA, 482 bp, Homo sapiens
ggaaaaaataggcctcggcctgaccgcttttgtgctgataaaaacgcaacatcacagcagcgaatggtattgccgctttgtcacggtggttaccgaaatgccagaagtgctggggttctggcgcatggctggtgaatacgattatctgatgcgcgtccaggttgccgacatgaaacgctacgacgagttttataagcgtctggtaaacagcgtgccggggctgtcggacgtcacttccagcttcgcgatggaacagattaaatacaccacttctttacccatcgaataaatatccagaatcaggtcaggacacaacgcgtgcgattatttgctcaattaagctggtatttccgtcgggaatggcgtcgctatctcggggctgtcgccttgcttgtcattatcgcgatgctgcaactggttccgccaaaagtggttggtattgttgtcgatggcgtgacagaacaacactttactaccgggca

SEQ ID NO: 131865 - DNA, 1629 bp, Homo sapiens
atggtgtctatggcaaggaaaacagggtttactactggggaactagtaggccccaacaatggaccaacgatcggcaattggccagctggcgacagcacctacctgcgaaataccattcttatattgctcagcagtggaatagtacttaggcagcgtagcctgaatatattccgggctggcgtaacggtaattcagctgtaccagacggtcttcatcccgacggtattcaatgctggagttactggtcgctacgttatccagacgtgtatcgtactgaatcccgccacgcaatccccaacgctcggagatacgccacggaggcaatacggtcaagaccgccgtaagtccggtcccggaacaggccagagtagtcagattgcagcagagacgagtcgtagttatagatgtcgctctgatcgcgatacggcacgtacaaatactgcgcgcgcggttccagcgtttggtataacccggagccagcatttccatatcgcgttcaaagaccattttgccgtcaactttgaattgcggcattacgcggttaacggattcgtccagcttggtcgtgtttctggagttataccagtcaagattggtttgctgataatcgcggatgtcgccaggaccacgcttaacgagagtgaactggcagccttgtacgcctgtgtggaagcggcaaaatgtagcaatcaatcgccattgcacattcgctggcagtatcaggaagaaacgcgggaatgcgaattttacgagaacgaactggaagatttgtggttgccgctgctcaatcgcttgcgagtgccgattgaacaggcgttgcgcgatgcgcgtctgaagccgagtcaaatcgacagtctggtgctggttggcggcgcgtcacaaatgccgctggtgcagcgaatcgccgtgcgtctgtttggcaaattaccgtatcaaagttacgatccgagcaccattgtcgcgctgggcgcagcaatccaggccgcctgccgcttacgcagtgaagatattgaagaggtaatcctcactgatatttgcccttactcgttgggcgttgaagttaaccgccagggcgtttccggcattttctcgccgattattgaacgaaacaccactgtgcccgtgtcgcgtgtagaaacttattcaaccatgcacccggaacaggattcaattacggttaacgtctatcagggagaaaaccacaaagttaaaaacaacattctggtggaatccttcgatgtgccgttgaagaaaaccggggcttatcagtcgattgatattcgctttagttatgatatcaacgggttgcttgaagttgacgtgcttctggaagacggcagcgttaagtccagagtgattaaccacagcccggtaacattgagcgcgcacacgattgaagagagtcggacgcggttatccgcattgaaaatttatccgcgcgatatgctcatcaatcgcacctttaaagccaaactggaagagttgtgggcgcgggcgctgggtgacgagcgagaagagatcggccgggtgatcaccgattttgatgcggcgttgcagtcaaacgatatggcccgcgtggatgaagttcggcggcgggcgagcgattatttagccattgagatcccataa

SEQ ID NO: 131866 - DNA, 921 bp, Homo sapiens
tcattcgtcgttcattcgatatttatcatgaacagcaaaaaatatcgctgcataacgagagtattctgctgctggagaaaaatttggcagacgattttgcgttttgttcaccggatacgcgacgactggatatcgatgagctgacagtttgccattacttacaaaatattcgtcagcggcgtcggcgtgctggcagccgtcagcggcaccgcaggagctcggtaccggtagtaagtgttgttctgtcacgccatcgacaacaataccaccacttttggcggaaccagttgcagcatcgcgataatgacaagcaaggcgacagccccgagatagcgacgccattcccgacggaaataccagcagacgcttataaaactcgtcgtagcgtttcatgtcggcaacctggacgcgcatcagataatcgtattcaccagccatgcgccagaaccccagcacttctggcatttcggtaaccaccgtgacaaagcggcaataccattcgctgctgtgatgttgcgtttttatcagcacaaaagcggtcaggccgaggcctattttttccggatccagcagggcgactttgccgataaggataccgtcgtcctccagccgtttcaggcgcttccagcaaggggtggttgtcagattaacggcttcagccagtgcctggactgaatcctcacaatatctcttaagctgctgatcgtcgggattattgtggtttctattttgccgggcgtcatcgaaataatccgtcacaaacgcgccaacgacttgacggttctcacacatgctgaaagacgccagcctcaagaggttgcttacagtatgattccatttatgtgacattcttgaaaaagacaaaacttcttcattcttcacagaattccctatgagggcagttaccatgtgcaggctcat

SEQ ID NO: 131867 - DNA, 1821 bp, Homo sapiens
atgttagataaaattgaccgtaagctgctggccttactgcagcaggattgcaccctctctttgcaggcactggctgaagccgttaatctgacaaccaccccttgctggaagcgcctgaaacggctggaggacgacggtatccttatcggcaaagtcgccctgctggatccggaaaaaataggcctcggcctgaccgcttttgtgctgataaaaacgcaacatcacagcagcgaatggtattgccgctttgtcacggtggttaccgaaatgccagaagtgctggggttctggcgcaactggccccagccgtttatgggcggacaatggcaaaacgatacacccacgttgcgtattccctactatcgcccgctcgaaccgctacaaccaggctttttgcccggccgtgccgagcagcatctcgccgggcagatattttccggcctgacccgcttcgataataatactcagcgcccgattggcgatttagcgcatcactgggaaacctctactgacgggttacgctgggacttttatcttcgttcaaccctacactggcataacggcgatgcagtaaaagcctcacacttacaccagcgattattgatgctgttacaactgccagcactggatcaattatttattagcgtgaagcgtattgaagtcacccatccgcagtgtctgaccttctttttacatcgccctgattactggcttgcgcaccggctggcgagctattgcagccatctggcgcatccgcaattcccactgatcggcacgggtccttttcgcttaacacaattcacagcagagctggtgcgcctggaaagccatgattattaccatttacggatgctagagcccgggaggcggagctgcaaccttcagccacctggctacagaaccactaccagcaaccataaagctgttcagagaaagacaagccccatgtctctccactcgtgctgggaagggcaagcaccctcctatttcaccccaccaggaagcgcggggaggagggtggaaggcaaaggcaacttcaggcaaactgggaaaggcggccaggacctcggggacaccgcataccgccgggcgcacagcccctcacgcgcgccggtgattgaagttcacgcctccgctggcgacaactttcttgttggcgaagattttacccatatgctggtcgatgaggttttaaaacgcgcggatgtcgccaggaccacgcttaacgagagtgaactggcagccttgtacgcctgtgtggaagcggcaaaatgtagcaatcaatcgccattgcacattcgctggcagtatcaggaagaaacgcgggaatgcgaattttacgagaacgaactggaagatttgtggttgccgctgctcaatcgcttgcgagtgccgattgaacaggcgttgcgcgatgcgcgtctgaagccgagtcaaatcgacagtctggtgctggttggcggcgcgtcacaaatgccgctggtgcagcgaatcgccgtgcgtctgtttggcaaattaccgtatcaaagttacgatccgagcaccattgtcgcgctgggcgcagcaatccaggccgcctgccgcttacgcagtgaagatattgaagaggtaatcctcactgatatttgcccttactcgttgggcgttgaagttaaccgccagggcgtttccggcattttctcgccgattattgaacgaaacaccactgtgcccgtgtcgcgtgtagaaacttattcaaccatgcacccggaacaggattcaattacggttaatcactcggtaccatccaggtttcttccagcgccttgtggttcaacgtaa

SEQ ID NO: 131868 - DNA, 648 bp, Homo sapiens
atggcggcagaaaaaatccgcgatattatcggcccagaactggtgaccttacataacctcatacccgaagcattttgcatggaattttcgttttcacccaaacgtattagtggttgctgttcaccgccgttctttcctctcatggccagcgcagcagataccccgtcaactgccaccgcacgcaaaggctttgccgaatacgatcacccaaaccagtatctggttaaaccggcgaccaatattgccgacaatatgatgccagtaatgcagcatccggcgcaggataaagaaacccagcagaagctggcagaacttgagaaaaaaaccggtaagaaaccgaatgtggttgttttcttgctggacgatgtgggctggatggacgtcggttttaacggtggcggcgtggcggtgggtaaccctacaccagatatcgacgccgttgccagccaggggctgattttaacttcggcgtattctcaaccaagctcttccccaacccgcgccaccattctcaccggacaatactccatccaccacggcattctgatgccgccaatgtacgggcaaccgggcgggctgcaagggttaaccacgctgccgcagttgctgcacgatcagggatacgtcactcaggccgtcggatcatag

SEQ ID NO: 131869 - DNA, 413 bp, Homo sapiens; identical to SEQ ID NO: 122730

SEQ ID NO: 131870 - DNA, 1449 bp, Homo sapiens
atgagtggaatcccattcacaattgcttcaaagagaataaaatacctaggaatccaacttacaagggatgtgaaggacctcttcaaggagaactacaaaccactgctcaaggaaataaaagaggatacaaacaaatggaagaacattccatgctcatgggtaggaagaatcaatatcgtgaaaatggccatactgcccaaggtaatttacagattcaatgccatccccatcaagctaccaatgcctttattcacagaattggaaaaaactactttaaagttcatatggaaccaaaaaagagcccacattgccaagtcaatcctaagccaaaagaacaaagctggaggcatcacactacctgacttcaaactatactacaaggctacagtaaccaaaacagcatggtactggtaccaaaacagagatatagatcaatggaacagaacagagccctcagaaataacgccgcatatctacaactatctgatctttgacaaacctgagaaaaacaagcaatggggaaaggattccctatttaataaatggtgctgggaaaactggctagccatatgtagaaagctgaaactggatcccttccttacaccttatacaaaaatcaattcaagatggattaaagacttaaacgttagacctaaaaccataaaaaccctagaagaaaacctaggcattaccattcaggacataggcatgggcaaggacttcatgtctaaaacaccaaaagcaatggcaaccaaagccaaaattgacaaatgggatctaattaaactaaagagcttctgcacagcaaaagaaactaccatcagagtgaacaggcaacctacaaaatgggagaaaatttttgcaacctactcatctgacaaagggctaatatccagaatctacaatgaactcaaacaaatttacaagaaaaaaacaaacaaccccatcaaaaagtgggtgagggacatgaacagacacttctcaaaagaagacatttatgcagccaaaaaacacatgaaaaaatgctcaccgtcactggccatcagagaaatgcaaatcaaaaccacaatgagataccatctcacaccagttagaatggcaatcattaaaaagtcaggaaacaacagggacatagatgaaggtgtaaaccatcattctcagcaaactatcacaaggacagaaaaccagtcactgcatgttctcactcatacgtgggagttcaacaatgagaacacatggacacagggtggggaacatcacacgctggggcctgtcatgggatatgtctttatcagcagtgtgaaaatggaccaatacactaaattggtatcagaagagtggggtgttgctgaaaagatacctgaaaatgtggaaacaattttggaattgggtaacaggcagaggctggaacggtttggagggtttcgaagaaggcaggaaaatgtgtga

SEQ ID NO: 131871 - DNA, 309 bp, Homo sapiens
atgtggaagcaactttggaactgggtaacagacataggttggaacagtttggagggctcagaagaagacaggaagatgtgggaaagtttggaacttcctacagacttgttgaatggctttgaccaaaatgctgatagtgatacgaacaataaagtccaggctcagacagagctgaggaacttcttgggaactggagcaaagaattctatagaaggaaaaagggggaccagcaagcatcagaagacacaagccccacctccaccactaactaattgtaccccggagcagattgtttatcctcatccgtaa

SEQ ID NO: 131872 - DNA, 516 bp, Homo sapiens; identical to SEQ ID NO: 129942

SEQ ID NO: 131873 - DNA, 831 bp, Homo sapiens
atgtggaagcgactttggaaatgggtaacaggcagaggttggaacagtttggagggctcagaagaagacagaaaaatgtgggaaagtttggaacctcccagagacttgttgaatggctttgacaaaaatgctgatagtgatacgagcaataaggtccaggctgaggtgatctcagatggaaataaggaacttattgggaactggagcaaaggtacacagaagtcaagaattgaggtttgggaacctctgcctagatttccgaagatgtatggatatgcctggattcctagacaaaagtttgctgcaggggcagggccctcgtggagaacctctgttaaggcagtgcagaagggaaatgtggggtcgaagccccaccacagagaccctactggggcactgcctagtggagctgtgagaagaggaccaccatcctccagacctcagaatggtagatccactggcagcttgcaccatgtgcctggaaaagccagacctcaacaccagcctgtgaaagcagccaggagggaggccgtgccctacaaagccacaggggtagagctgcccaagaccatgggaacccacctattgcatcagtgtgacctggatattaatatctgcaaattaataaagataatgctccttgtgtctttgtattttcggggtgtgggattactgccatcatttgatggagaagaagttttaactactaagtcagcatgtttccatggtgctacctggttgcaaatctgggatgacataaggcaccagctttctttacaaaccttcaagcttggaggagctgtttcagctgttgtaaatcaagcattgtga

SEQ ID NO: 131874 - DNA, 567 bp, Homo sapiens
atgtgggaaagtttggaacctcctagagacttgttgaatgcctttgtcaaaaatgctgatagtgatatgaacaataaggtccaggctgaggtggtctcagatggagatgaagaacttgctgggaactggagcaaaggtgactctcgttatgttttagcaaagagactggcagcattttgcccctgccctagagatttgtggaactttgaacttgagagagatgatttagggtatctggtggaagaaatttctaagcagcaaagcattcaaaagttttcagaaagcctgagctcctggggcaagaagtttctcttgggaaacaagatggatgagtactttaaagaagaaatagtggctgcaatgggcctaaggctgaaagatggtaaaataaatataacctcacgtgttgcgtttcaaaatgatggcatagaaggcttccccatgtctcatgatttctacactggaaaaagtgaaatcaaggtggacaaccagctttcccacattttgggtctcttggcagagaacttatccctacctcaaacaacaggaagtattgggagtagttga

SEQ ID NO: 131875 - DNA, 1227 bp, Homo sapiens
atgtggaagcaacttgggaactgggtaacagggagagcctggaacagtttggaggactcagaagaagacaggaaaatgtgggaaagtttggaacttcctagagactcgttgaatggctttgacaaaattgctgatagtgatatgaacaataaggcccaggctgaggtggtctcagatggagatgaggaacttgttgggaactggaacaaagtaagtttcgagtccatgatgtgttgctatggtcgtttccaggtctctggcacacagaaccccagaaactcaacaactgcccgaagacagtgcacctggagtggcttcagcccccaaggctggtcccgtggatccaggaagccccctgcattgtacagtaattatagccacgcaacccaccacaccacttgtctccatcagcaggatggtccagagagctgcatcctgggcatcttaccaccccgatgctttcctaaggaccccgggcaccttctccagacccccagggtccacgtgatcatttcctctcagacctatgcccacggcactgcctctaccactggatccaatgaccatgggccctcatacacggatgagccatggctctgccacagactgccccagaatcccggtctccggagatatacgacatccattccttcagatggagtgataaagatttggaacggccacacgtacaccctaccggttctgtttctctggagaatcctgactaatacactcactaaggccatgcgtgtggggacaggaggtgccttgaagccagtcatctgtggaatgtcctttgacaccacccacaagggcacacctccagagacaggaggcaagacttcaggggctgctgccttctggatcgggaagggggtcctggatgaactgctgaccctgatttccttaactcccctgcaggaggttccctattcctcgagtgcatctacaggtgcaggccggctctgcaaggacgaatgtgtgctctgcaggacacgtttgaggtctgagggcctgcttcaggtcaagtcggatctcgttcctgttggccccagggctctgccccctctgcagccaggcctccagctgactgcttctgcatccactgcctgcgtgctggctttcctcacctcgcactgccagggtcccccaccgtcctttcgtggggttctcaggagtcctcagggccaagagaggtttgctcgggcccctgcagacaagcaatga

SEQ ID NO: 131876 - DNA, 900 bp, Homo sapiens
atgagtgaactcccattcacaattgcttcaaagagaataaaatacctaggaatccaacttacaagggatgtgaaggacctcttcaaggagaactaccaaccactcctcaatgaaataaaagaggatacaaacaaatggaagaacattccatgctcatgggtaggaagaatcaataccatgaaaatggccatgctgcccaagaacagggtatcctgtatcccagcctctccagctccagtcacgggtaaaagaggccaaggtacagctcaggccattgtttcagagggtaaaagccccaagcctttgcagcttcactgtgattttgggcctgctggtggacagaaggcaagaattgaggtttgggaacctctgctgcctactgttacatttcccaccttaaaagtccaaggccccaattctttggagaaaatggatgaaggcttgaccccgactgctctgagattggagagggcaccaacatcagggagaagccaggcagtgggggcaggcacttccaagcctgcaggggcaggggggcattcccgggcccccaagtatgcagtgatgcctgagtctgtagcctcagtttcagtttgggcagctgcagctgttcagggaatgagggtggttcctgccttctccatggagtgggaggcccaggtgtgcagccgtgttgctgcagcaacaattggggagttcctgcccgaactaagaaagggcggggctcccacttctcccttgcttctgccagctgcacacaacatgcagccccagctgtacctccctgctacagcctgcgggatggcagcgtcaggctgtctggagtggtcactgtcatcattagcctctttctttctgaatggcagtactcacaatggtgattcgaaggtcttgaaatga

SEQ ID NO: 131877 - DNA, 687 bp, Homo sapiens
tcacagttctagaggcttggagtccaagatcaaggcaccagcaggatcagtgtctggtgagggctcagtttccagttccaagatggcaccttgttgctgcattctcttgaccccttttagccatggctctggaaggagtggctgggatgcagggcaccaagtccctatactgcacacagcacggggaccctgggcccagcccataaaaccattttctccaaggccttgggcctttactccagttcccaacaagttcctcatctccatctgagaccacctcagcctggaccttatgtccacatcactatcaggcgtttggtcaaagccattcaacaagtctctaggaagttccaaactttcccacattttcatgtcttcttctgagccctccaaactattccaacctctgcctgttacccagttccaaagtcgcttccacattttcaggtatcttttcagcagcatcccactgtactggtgccaatttactgtattagtccattttcccgctgctgataaagacatatctgtgactacaattccttgaggataaggtccatagtgctccctctggtgccagcaacccacaccaggaatgtggctgccatcttcaaggccactgacaacttggagaatagaagatgaccacagaactctcttaccaaaattcagcagttttttcttcat

SEQ ID NO: 131878 - DNA, 1128 bp, Homo sapiens
atggtggaaggaaatgcatctacaaccacaactgtgatagacagcaaaaatggatctgtgcccaaatcccccggaaaagtgctgaagaggacagtcacagaagacatagtgacgacgttcagctcccctgcagcctggcttctggtcattgccctgataatcacgtggtcagctgttgccatcgttatgtttgatttagtggattacaaaaacttttcaggcagaggttggaatagtttgaacggctcagaagaagacaggaaaatgtgggaaagtttggaacttcctagagacttgttgaatggctttgaccaaaatgctgatagtgatatgaacaataaggtccaggctgaggtcgtctcagatggagaagaggaacttgttgggaactggagcaaagaattgtatgaagatgaagtgaagtgcaaatcttccaagtctaatagacctaaagccacagtcttcaagagcccacggacaccacctcaacgatggaaccaggaggtcccgttcataagtgaagaaaatccattttccccatccttcacctatggagcatcttgggccatcggacacctcaggaaattcatgatcatgaaagatgaatacatgcttactgggtataaagaggacgagaaagttccatgcaaaggaaatggtaatgaagtgcaaaatgacatggcatatttgcaaatccatcagtggcttagaacagctaaagcacatgggaagggaatgagttggtggggttatggtcagaacagcaacatgatagtctttgtgcttttaaaaaatagttctgagagcgatacagagggcagaatgaaagcagaggccccagctgggaggcagggtgacaaccaaggcagaagtctgaagatcgtgaactgtgccagtggaaagcagagtgaagaggagaatacagatcgaagagattttttggaggaaaaaattgaagatttggagccaaagtcagaagaatccgaggaaacaataacttcacagcaaagatgccacagcattttattaccatcacaaaagtcaattaatgatattttcattgaaatatccacactcgatgattcaacatataaggcgaagagggatgtctttggaaaaggcacttaa

SEQ ID NO: 131879 - DNA, 768 bp, Homo sapiens
atgaactttcggcagctgctgttgcacttgccacgttatcttggagcctcgggttccccgcgtcgcctgtggtggtccccgtccctcgacaccatctcctcggtgggctcttggcgtggtcggtcctccaagtccccggcccactggaatcaggtagtgtcagaggcggagaagatcgtggggtaccccacgtccttcatgagccttcgctgcctgctgagcgacgagctcagcaacatcgctatgcaggtgcggaagctggtgggcactcagcaccctctgcttaccacagccagagacttgttgaatggctttgacaaaaatgctgacagtgatatgaacaataagatccaggctgaggtggtctcagatggagatgaggaacttgttgggaaccggagcaaaggggcggagccctcatggagaacctctggtagggcactgcagaagggaaatgtagggttggagcctccacaagaagtccctactggggcaccgtttagtggagctgtgagaagagggccaccattctccagaccccagaacggtagatccactgacagcttgtaccgtgtgcccagaaaagctgcagccactcaacaccagcccatgaaagcagccaagagggtggctgtaccctgcaaagccacaggggcagagctgcccaagaccatgggagcccaccctttgcatcagcgtgacctgaatgcaagacatggagtcaaaggagattattttggagttttacgatatgactgccctgcttga

SEQ ID NO: 131880 - DNA, 1657 bp, Homo sapiens
atgagtgaactcccattcacaattgcttcaaagagaataaaatacctaggaatccaacttacaagggacgtgaaggacctcttcaaggagaactacaaaccactgctcagtgaaataaaagaggatacaaagaaatggaagaacattccatgctcatgggtaggaagaatcaatatcatgaaaatggccatactgcccaaggtgctagagaaaaacgtattaggaagagatatggaaactatgaaaaaggtccaaatcaaacttctagagataagcactataatgaaaaatgagatgaaaaatgtactggatggaattaactgtgcattagacagtgaacaaatgaaggttttcaacacatactccaatgaagactatgacaggagaaatgacgaagttgaccctgtggctgcttcagctgagtatgaacttgaaaaacgtgtagaaaagctggaacttttcccagtggagctagagaaaggaatgtatggagaggaagacagggtgcagctgggttctcgatgggtcagccacaggaataataagtggcctttaaggatgaggttccagacttcactcagagaaagctatgaggatggtcttggtataagtattattggaatgggtgttggagcagatgctggacttgaaaagctgggaatattcgtcaagacagtaacagaaggtggtgctgctcaacgggatggcagaaaaagtggggtattgctgaaaagacacctgaaaatgtggaagcgactttggaactggacaacaggcagaggttggaacagtttggagggctcagaagaagacaggaaaatgtgggaaaatttggaacttcctagagacttgttgaatggctttgaccaaaatgctgatagtgatatgaacaataaggtccaggctgaggtgtcctcagatggagatgaggaaacttgttgggaactggagtaaagatgacccttgttacgttttagcaaagagactggcgtcattttatccctgccctagcaatttgtggaactttgaacttgagaaagatgatttagggtatctggaggaagaattttctaagcagaaaagcatccaaggggtgacttgggtactgttaaaggcattcagttttataggagaagcagagcataaaagtttggaaaatttgcagcctgactatgccatggaaaagaaaatcccattttctggggagagattcaagccagctgcagaaatttgcataagtagcaaggagcctaatgttaatccccaagaaaatggggaaaatgtctccaaggcatgccagagaactttggagcaggccttcccatcacaggctcagaggcctagggggaaaaaatggttttgttggctaggcccaaagcccttctgctgtgtgcagcctagggacttggtaccctgtgtcccagctgctgtagccatgggtaaaggggccaaggtacagcttgtgccatggcttcagaggggagcaagccccaagccttcgcagcttccatatgatgttgagtctgtgggtgcacagaaatcaagaattgaggtttgggaacctctaaccaagatttcagaagatgtacagaaatgcctgaatgtccaggcagaagtttgctacaggggcagagccctcatggagaacctctgctag

SEQ ID NO: 131881 - DNA, 2791 bp, Homo sapiens
ttatttctttctcccatgctgggattcaatttctgggattccatgcagaaattgaattccttccatttctgtgatgctgaagtgaacataattgtatttccctggtaccttgttagcaaaaatttggattggctggttgtgttcattccagtacactgccagcgtgggcccagtgtgaacttccatgcaattccactctgtgtagaaggccacccaccccacaacagtccccagagtgtgatgttccccttcctgtgtccatgtgttctcattgtttaattcccatctatgagtgagaacatgcggtgtttggttttttgtccttgtgatagtttgctgagaatgacgatttccaatttcatccatgtcccttgtatacgtggctgccttttctgtttttccttcttctgtcgctaatattccaaattcttgttctctatcagacagtatcttatctacatttggtgccacaaaatcatcactggccatcagagaaatgcaaatcaaaaccacaatgagataccatctcacaccagttagaatggcaatcattaaaaagtcaggaaacagcaggtgactctctgaagccatggtctgagttttacattggccactttcagccacaactggagtggctaggacacagggcaccaagtccctaggctgcacacagcacagggaccctcggcccagtccacaaaaccgtttttgcctcctacgtctccaggccttggtggtcacacagatggtggcatctgcttctttgtggctagcaagagaagaccttctagcattccattgttcatcgtggatagacactatagcagtggtgttgagaggtggcagcagcactgctttgctaaaacaccatgctgttttggttactgtagccttgtaagtaatagtttgaaagtcaggtagtgtgatgcctcccagctttgttcttttggcttaggattgacttggcgatgcgggctcttttttggttcccatatgaacttaaaagtaagatttttcccaatcctatgaagaaagtcaatggtagcttgatggggatagcattgaatctataaatttaccttgggcattatggccatttttcacgatattgattcttcctcctacccatgagcatggaatgttcttccatttctttgtatcctcttttatttcggttgagcaagtggtttgtagttctccttgaagaaggtcctttcacatcccttgtaagttggattcctaggtattttattctctttgtagcaattgtgaactgggagttcactcatgatttggctctctgtttgtctgttgttggtgtataagaatgcttggtgatttttgcacattgattttgtaacctgaagacttttgctgaagttgcttaaccagccttaaagaagattttggggctgagacggaagggggttttctacatatacaatcatgtcatctgcaaagaggggacaatttgacttcctcatttcctaattgaataccctttatttctttctcttgcctgattgccctggccagaacttccaacactatgttgaataggagtggtgatttttgcaatctactcatctgacaaagggctaatatccagaatctacaatgaactcaaacaaatttacaagaaaaaaacaacccaatcaacgggctaaggatatgaaaagacccttctcaaaagaagacattgatgcagccaacaaacacatgaaaaaatgctcatcatcactggccatcagagaaatgcaaatcaaaaccacaatgagataccatttcacaccagttagaatggcgatcattaaaaagtcagggaacaacaggtgctggagaggatgtggagaaataggaacacttttacactgttggtgggactgtaaactcattcaaccattgtggaagtcaatgtggcgattcctcaaggatctagaactagaaataccatttgacccagccatcccattactgggtatatacccaaaggattataaatcatgctgctataaagacacatgcacacatatgtttattgcagcactattcacaatagcaaagacttggaaccaacccaaatgtccaacaatgatagactggattaagaaaatgtggcacatatacaccatggaatactatggagccataaaaaggatgagttcatgtcctttgtaggaacatgggtgaagctggaaaccatcattctcagcaaactatcgcaaggacaaaaaccaaacaccacatgttctcactcataggtgggaaatgaacaatgagaacacatggacaaaggaaggggaacatcacccaccagggcctgttgtggggtgcggggagaggggagggatagcattaggagatatacctaatgtaaatgatgagttaatgggtgcagcacaccaacatggcacatgtatacatacgtaacaaacctgcacattgtgcacatgtaccctaaaacttaaattaaaaaaaaaaagttcaaaaaaaaacaaacaaactcctgagtacagtttttgtgctgagctctcaaagagattacagaatgaacaaatcaagattcttccataagactgaagtgctggttaccaactttcctggttaacattcagcaaaagcattttctctctaagtctggaactaggatcaggatattttcttttgtaaaattcacttgttactttcagaccaaagttgtgttttacacaaatcatgcgatcttggcactcctgattgcttggttgaaaaaatatttctgaataaaaaatattttaaatttgccattttt

SEQ ID NO: 131882 - DNA, 1788 bp, Homo sapiens
ttagcgaagtgcatcaggcacgatgaggaaaagattgcaatgagtatggttgaaactgccccgagtaaaattcaggttcgtaatttgaacttctactacggcaaattccatgccctgaaaaacatcaacctggatatcgctaaaaaccaggtaacggcgtttatcgggccgtccggctgcggtaaatcgacgctgctgcgtaccttcaacaaaatgtttgaactgtacccggagcagcgtgcggaaggtgaaattctgcttgatggcgacaacatcctgaccaactctcaggatatcgcactgctgcgtgcgaaagtgggcatggtgttccagaaaccgacgccgtttccgatgtccatctacgacaacatcgcttttggcgttcgtctgtttgagaagctctcccgtgccgacatggacgagcgcgtgcagtgggcattgaccaaagccgcattgtggaacgaaaccaaagataaattgcaccagagcggttactctctctctggtggtcagcaacagcgtctgtcctcctagctcgcatgcctgcaggtctttcatgcggaccacttccgcattgtaccctcgaccgtcggaaccttcctttctggcaatttcatgatcaagtttattgtgtttatcgaacaaggacataaagcgaggattttcgtttttcagacgggatattaaatctcggtattgtttatccggcgctggcgggaaatactgatacagccatgtttcactgatagcgtccccctgacaacgtagatacatccgcatatcgaccggatcagtggagtccgaagtcggataccagtcaaactgaatacgataaccatcgatgggttcaatatagagaatttcgatttgcttcgcttccccactggaaagcgtaatcaccggctcaatgccttttggcgcggcagctttcagatcaccaccaacgaaatcgacggcaaaacgacgcgaatgaacaacggctatatcccgagacatcagcgagaatttgactcctaatttcccttttgaacctccgcctgcaaagactaacgatgaaggatgaatattcgagaaatcagcaatttgctgcaagttacacgctgatacaatcgccgcattttcttccagcgcacggaacaatgtcgctttgttacatttatccgggtcaatggacaagttaataaaggaaggcgcagcgtgataccaggttttaaagcgcattctgtcggagaagatcggcattacgccccacgacccaagcggcacccgactggccatctcttccagcagcgtataggtgtcgatgcctaaacgttcggcaatcagtttttcttcggcacagaaagcatcgcggaaccagcgcatggtgagtccggtaaaaaagcttatagattcagcttgtaccatgccaggaataacatgaggattaacgcgcacgttcatttctgggtctgtcaccggcgcggctaaatttacaactagctgccaaaatgtgctgtcaagaaccgcaggttgtgccggacgcacaacgcctaacccaaggcaaccaagctgcacgtcggctcctccaacgaccaccggattgccgtggcctccttcaaatgataagccgggttccagcgcaaccagaggcgctctaacagctgcgcgctgacgggagccagtttgccgagcagggcgtaaagaataataacgactaccaccacgttcgtttgcaacatactcccacgcattcatcggctgataaccaatgcctgaattggcaaaaatggtttcggcaacaatcat

SEQ ID NO: 131883 - DNA, 465 bp, Homo sapiens
atgtccttgttcgataaacacaataaacttgatcatgaaattgccagaaaggaaggttccgacggtcgagggtacaatgcggaagtggtccgcatgaaaaaacaaaagctacagttaaaagatgagatgctcaaaatcctgcagcaggagagcgtcaaagaggacacgcgaaaaacggtgcagggtaatgtgatgttgcatcaacgcggctatgccaaaatgttcatgattttcaaagaagatgaacttatcggcgttatctcgtttaatcgtattgaaccactgaataaaaccgctgaaataggctactggctggacgaatctcatcaggggcaggggatcatttctcaggcgctgcaggcattgattcatcattacgcccagtctggtgaacttagacgcttcgtgatcaaatgtcgggtggacaatccgcaaagcaaccaggtcgctttgcgcaatggttga

SEQ ID NO: 131884 - DNA, 1112 bp, Homo sapiens
atgaataaagcgaggacacagaaggtaaaaagcagacaacaaaagggaaaagaacgagaaacagcgcaaaataaaaaaagaaaaccacagagaaaagacaacaagagcgccgaagagaaaaaagaaggcacaaacacaggaagagaaccaaaacaagcacacgcacagacgaaagacacatgcaagcaaagcagagcgctacgagaagaacaacaaaagcaccaatctaaaagaaacaccaagcccgggagacaccagacaagacacaacaaagcaagcaaccaaaacacacaaacacaacacccaccaagcaaagggacagagaaaggacacaaccacacagaaaaaacgaaagacaaaaaagaacaaggcaaacgggacaaacaaaaatcaaacaagaacaaacaaaaaacaaaaacaaaacaaaaagtaaaacccaaccaccaagcaaagccagaaaccaccacccaccacaaaagaacgcacgaggaaaccacgcacgaccgcccccaccccaaaagcaaaacagaccagcgcacacaacgacaacagcacggccacccggcccccaaaagcggacaaaccgcacaccccacacaacgagagaaaacacgaacacaaaaaacacaacagaacacaacaaccacacaaaacaaaacaaccaccaacccaacaaacacagcaacgaaccagaaagcgcacacacaacaaacacaacgcacgcgcacaacaaacacaaaagacaacaccagcaacagaacaagacaacaaaaaagaagacaaacacaagaccgacacaaacgacaacaaagcgaaaggacacaggagcaaaatcggtacctgtcgatgaataccggatttaatatcccgtctgaaaaacgaaaatcctcgctttatgtccttgttcgataaacacaataaacttgatcatgaaattgccagaaaggaaggttccacggtcgaggcagtcgctaaactggccgcagtttgttcaaagtgaagaggacacgcgaaaaacggtgcagggtaatgtgatgttgcatcaacgcggctatgccaaaatgttcatgattttcaaagaagatgaacttattcgcgttatctccgtttaa

SEQ ID NO: 131885 - DNA, 1463 bp, Homo sapiens
cctcctacctgggttcttttgctccaatttggctccagtaccaccttcaggtggacaccagcatgatctaccgtatccctcctctgcataaaaccctggtgcctcagggacagggcaagcaagaatgggccaatcacaccaatgggcattcttatggaggaaggatgctcatgtgcgtaaagagagtgggtacatgtatagcctatatgaccgcgcctatggagaacgtactacaggacgccgaggccgcggtcgcgggcccatcccacgcccctgatacgtccgacgtcggggccacgctgcttgtgtctgacgggacccacagtgtccgatgcctggtgacgcgggaggccctggacacctcggactgggaggagaaggagttcggcttccgcgggacagagggccggctgctgctgctgcaggactgcggggttcatgtccaggtcgctgagggcggcgcgcccgcagagttctatctccaggtggaccgcttcagcttgctgcccacggagcagccccggctacgggtgcttgagagcacctcacagagtccacatggttgggacaaacattcctatggttaccatggtgatgatgggcattcgttctgctcctcagggactggccagccctatggtcccacattcaccacaggagacgtgatcggctgctgtgtcaacctcatcaatggcacctgcttctacaccaagaatggccacagacttgctcaagggcgcctcgagggaaacgcgctgaagctggacttgctgacttccgaccgggccctggacaccaccgctccccgtggcccctgcatcggtcccggtgccggagagatcctggagcgcggccagcgcggcgtcggggacgtgctgttgcaactcgaggggatctccctaggtcctggggcctctctcaagactctctgtggcctgagtacctggagggcggtaagaagaccttggacagcgtccctgctactggagctgaggtctggggttaagtctggacgtcagtcagcagtcattagccaagccaagagccttctgtccatgggagatggatggcctgaaagggacactccaggattgtctgatggcgagcgtatgattaaacgcacctttaatccggtgcttaagaagagcgtttcattaggtagtaacataagacacatgcttgcagaggaggcaactacagaagaattagacggaacagtgccctgtgctggtgtagccgaaccgccattagccggcgtattggatgcgggcgtatttgaatttgaagaagatgagctgccgctcttttcgcaggaaggcgtagagatggtaatgccgggcgacaacatcaaaatggttgttaccctgatccacccgatcgcgatggacgacggtctgcgtttcgcaatccgtgaaggcggccgtaccgttggcgcgggcgttgttgctaaagttctgggctaa

SEQ ID NO: 131886 - DNA, 1290 bp, Homo sapiens
atgcaaatgactaagcaaccaccaatcgcaaaagccgatctgcaaaaaactcagggaaaccgtgcaccagcagcagttaaaaatagcgacgtgattagttttattaaccagccatcaatgaaagagcaactggcagcagctcttccacgccatatgacggctgaacgtatgatccgtatcgccaccacagaaattcgtaaagttccggcgttaggaaactgtgacactatgagttttgtcagtgcgatcgtacagtgttcacagctcggacttgagccaggtagcgccctcggtcatgcatatttactgccttttggtaataaaaacgaaaagagcggtaaaaagaacgttcagctaatcattggctatcgcggcatgattgatttagagacatcgcaattaaaacaagggcaacggatacatatgccgatgcggatggtggcgttccatgaaatgccgaatctggcgcttacaatgtcacccgctctggcgacagctatattctggttaacttctataccgatgcggaatgtgccggaccctgcagatgaaggcgcattacagaaatggtggtctgttctaccagacggttatggttttgaggaagactgggcagaagtttatacctcgaaaaatcttccaccagaaagctacccagtcggcgcaccaatcccgtggccatcagataccgttccgtctggttatgccctgatgcaggggcaggcttttgacaaatctgcttacccgaaacttgcagccgcttatccgtcaggcgtgatccctgatatgcgtggctggacgattaagggcaaacctgccagtggtcgggccgtattgtctcaggaacaggacggcattaaatcgcatacccacagcgccagcgcatccagtacagatttggggacgaaaaccacatcgtcgtttgattacggcactaaatccacgaataacaccggggcacatacacacagtgtgagcggctctacaaactcggctggagcacacacacactcactagccaacgtgaacacggctagtgctaactccggtgctggtagtgcatcaacaagattgtctgttgtgcataatcaaaactatgcaacatcatctgctggcgcacatacccactcactgtccggcactgctgcaagcgcaggtgcacacgcgcatactgtcggtattggtgctcatacgcactccgttgcgattggttcacatggacacaccatcaccgttaacgctgctggtaacgcggaaaacaccgtcaaaaacatcgcatttaactatatt

SEQ ID NO: 131887 - DNA, 2980 bp, Homo sapiens
ggattttgccgatttcggaaccaccatcaaacaggattttcgcctgctggggcaaaccagcgtggaccgcttgctgcaactctctcagggccaggcggtgaagggcaatcagctgttgcccgtctcactggtgaaaagaaaaaccaccctggcgcccaatacgcaaaccgcctctccccgcgcgttggccgattcattaatgcagctgtttcgacaggtttcccgactggaaagcgggcacacacatcgcgatacacttctaagccagacgtggcgcggcctgcaacgatcagggatctatatggatctaattgggatctgtatggacctgattattggatctatccagtggataatgtggataagtgaaaaaccggccaacgtagccggttggaagggagtcgtattattctacgctttcgatgagaagaccatgttcatagcatttaagctcatcgccctcttccgtggcaccagcaaccaccaacgcttaccagcggccctcaccgtcgttaacacccactaccctcccggaatcaactgcacctttaaacagcgtgttgtcattccgcgtctcaatttgggccttcgcctatctatcaaccttatgcccgcacaccgaaaggaggtgatcttcgatgagattccacgtgtgcgcaaaccctctgccgagatcaatgtcctgaagctgtcgtcgcccatttccatacagaatcttcgactgatgtcgcgtggcaaactcctgctgaccgtggagtccaagaagtacccacatctgcgcatccagggacacatcgtgacccgagccagctgcgaaatcttccagacccctgtggcgccgcacagtgccgaatcctcgaccaagagcagcggtttggcgtgggtctacttgaacaccgatggatctctggcctacaacatcgaaacggagcacgtgaacacccgggataggcccaacatcagtttgattgaggagcagggcaagcggaaggccaagctggaggatctgacgccgagcttcaacttcaaccaggccattggtagtgtggagaagttgggtcccaaggtcctcgagtcgctgtatgccggcgaactgggcgttaatgtggccaccgagcatgagacgagcctgatccgtggccgcctagtgccccgtccagtggccgatgctcgggactcggcggaacccattctgctgaagcgacaggagcacacggatgcacagaatccacatgccgtcggcatggcctggatgtccattgacaacgagtgcaatctgcactacgaggtgacgctcaacgccatcaatgaaagagcactggcaacagctcttccacgccatatgacggctgaacgtatgatccgtatcgccaacacagaatttcgtaaagttccggcgttaggaaactgtgacactatgagttttgtcagtgcgatcgtacagtgtccacagctcggacttgagccaggtagcgcctcgggtcatgcatatttactgccttttggtaataaaaacgaaaagagcggtaaaaagaacgttcagctaatcattggctatcgcggcatgattgatctggctcgccgttctggtcaaatcgccagcctgtcagcccgtgttgtccgtgaaggtgacgagtttagcttcgaatttggccttgatgaaaagttaatacaccgcccgggagaaaacgaagatgccccggttacccacgtctatgctgtcgcaagactgaaagacggaggtactcagtttgaagttatgacgcgcaaacagattgagctggtgcgcagcctgagtaaagctgatacggatgtagccttggatgtgcccgtgcccaatgaagaggaagagcgcaacatgaaacattacgctgcgttgctaacgggccgcacctcctatttcctcaagggtgaggaaatgaagtccatgtacaccacctacaatccgcagaatgtggtggccaccgcccgtttcctgttccacaagaagaatctatactactccttctacacctcatcgcgaatcggtcgtccgcgtgccattcaattcgttgatgatgcgggtgtaatcctggaggagcatcaactggagaccaccttggcgggcactctcagtgtctatcagaatgccacgggcaagatctgcggtgtctggcgacgagttccacgtgattacaagcgcatcctgcgcgacgatcgtctccatgttgtcctcctctggggcaacaaacagcaggccgagttggctctgacttggctgggcaagcatgcgcagttcggtactggcaagttaataagtaataggtatactggcaattctgaaaccaagtccaagcgccacctgctttaccggaaccaaaaacaattagtatacagtacactaataggcgtcgcgtggcagccgccgcccccgacagtaaagctaataagccagcggtatcatgggcagtcgtgcaacaagtcccagtaccaactgcgttacaggcaaagcatggcaactagcatacagcataatactactaggcgtagcgtggcaggtcaggagggttctatctctgttggccagaatgtcccttttattactggtcgtgtgactggtgaatctgccaatgtaaataatccatttcagacgattgagcgtcaaaatgtaggtatttccatgagcgtttttcctgttgcaatggctggcggtaatattgttctggatattaccagcaaggccgatagtttgagttcttctactcaggcaagtgatgttattactaatcaaagaagtattgctacaacggttaatttgcgtgatggacagactcttttactcggtggcctcactgattataaaaacacttctcaggattctggcgtaccgttcctgtctaaaatccctttaatcggcctcctgtttagctcccgctctgattctaacgaggaaagcacgttatacgtgctcgtcaaagcaaccatagtacgcgccctgtag

SEQ ID NO: 131888 - DNA, 786 bp, Homo sapiens
atgtgcagcgaaattcaagctgcgtgtcgggaaacggcgcaaccgatcccggaaagtgatgctgaactggcgcgctgcattttcgacagtctggcgctggtgtatgccgatgtgttgcatgagctggcgcatctgcgcggtgaagatttctcgcaactgcatattgtcggcggaggctgccagaacacgctgctcaaccagctatgcgccgatgcctgcggtattcgggtgatcgccgggcctgttgaagcctcgacgctcggcaatatcggcatccagttaatgacgctggatgaactcaacaatgtggatgatttccgtcaggtcgtcagcaccaccgtgaatctgaccacctttacccctaatcctgacaattcactctacacgacagacaaaggagctttgcgcatgaccactcaactggaacaggcctgggagctagcgaaacagcgtttcgcggcggtggggattgatgtcgaggaggcgctgcgccaacttgatcgtttacccgtttcaatgcactgctggcaaggcgatgatggattgagtctagaggaagattcaacaggagacttagttgctatagccacttggatccctgacaaagtgggcttcagtgcaatagaaaagccacattttccccacaataccttccccccaaacaaaatgaatggaagtcaaagccttatttccaatggagggatgaaagacaaaattgagccatttgaaaaacagtcagaaataaatacggacatcattgagcaacttgcagtgcaccacaaataa

SEQ ID NO: 131889 - DNA, 769 bp, Homo sapiens
cttctgccgccagcgccagtgccaggtttaccgccgtggacgatttacccacgccgcctttaccggaactcaccgcgataatgttcttcaagtgcagagtaaactgagggcagatggttgtgcgctggaagattatttttctcagtcagaacaggtattgccttccgagttggcttttgatgaagcgccgcaggatgtggtgaataaggtatttaacatcactttacgcaccattatggaaggtcagtcgatcgtcaacgttgatgagatccaccgtgccgcccgctttttctatcaggccagacagcgggatttgtacggtgccggaggatcaaatgctatctgtgctgatgtacagcacaagttcttgcgcattggcgtacgctgtcaggcctatcctgatgctcacatcatgatgatgtccgcttcgttgttacaggaaggagatgttgtgctggtagtgacccattccgggcgaaccagtgatgtaaaagcggccgtagaactggcaaaaaagaacggggcaaagattatttgtataacccatagctaccattcaccgatagcgaaactggccgattatattatttgctcaccagccccggaaacgccgttattaggtcgtaatgcctcggcaagaatattacaactaactttgctggacgctttttttgtctctgtcgcccagctcaacattgaacaagctaatattaatatgcaaaaaaccggcgcaatggttgatttcttctcaccaggcgcgctgaaataa

SEQ ID NO: 131890 - DNA, 4809 bp, Homo sapiens
atgtttcgtgtaacttggtcgtctggccgaacaggcttaggcaaaaggttattcagaacaccatacgacaacgatgacacagggccttacgcgttcaataaaactcacccaaaagacaattatacctgcaccgtattgttcatcgatgacatgtccgcgagtggtcaaagtctcgacaaagcgcaggataattatcggcaggcaatgaaaaaactctcttcagggcgcggaaatgtgctggcgcaggcagaagcgtttcgcggtttaggagtagaaattaaacgcgagattaatccggatttggctgaacaggcgattcgcctgcaagattgcgtatttgatactcaggaaacaatgaccactacctttactggtaccgtttcttctgcaaatagcggcaattattacaccattttcaataccgataccggtgcggcatttaacaatgttagcctggcgatcggtaattatgtagttttagcgtttagcgcatcggcggcgcagtatgaagatggtaaacagtacaatcaccgcttccggctcaaaacgctcaactaccgttttgcggcaggggctctcccagcggtggctattaagtgccggagcgcgaaatttactgcaacactacagtttccgggaaacgtgcgcgaactggaacatgctattcatcgggcggtagttctggcgagagccacccgcagcggcgatgaagtgattcttgaggcgcaacattttgcttttcctgaggtgacgttgccgacgccagaagtggcggcggtgcccgtggttaagcaaaacctgcgtgaagcgacagaagcgttccagcgtgaaactattcgtcaggcactggcacaaaatcatcacaactgggctgcctgcgcgcggatgctggaaaccgacgtcgccaacctgcatcggagagcaatgagtgaagcactactgaacgcgggacgtcagacgttaatgctggagttgcaggaagcaagccgtttaccggaacgtctgggcgatgattttgttcgcgccgccaatatcatcctgcactgtgaaggcaaagtggtggtttcgggaattggcaaatcgggccacattggtaagaaaatcgccgcaacgcttgccagtaccggcactccggctttttttgtccatccggcagaagcgctgcacggcgatctggggatgatcgaaagccgcgatgtgatgctgtttatctcttactccggtggcgcgaaggaactggatctgattattccgcgtctggaagataaatctatcgcgctgctggcgatgaccggcaaagcgacgtcaccgctgggcctggcggcaaaagcggtgctggatatctccgtagaacgcgaaggcagccgaatgacttacgcgacttcagcacatcaacccggatgtggattattgccacgctcaatgattacgccaacattcgccgcccgcgccactgcgcctggcttgctgagtttgatacgcacccacggcgagttgaagcgtgctaacagcagctccgccacctcttcagccacgcgttccaccagcgcaaaacgcgccccctcgacgtggctgaccaccgtttctgcaatgtcagcggccagcaacgacccacggtccaagcggggggactttcaaccggcccacggggcacccaatgcaaccacattgctgcaagggcaacaaagaggggtcccccgggcacaaaccagggggcccaaggggaacaccgggataacaccaacgggccggcggactcggcatggggcgataagagacccaatagggcgtcccgagcccccctgtagcggcgccatcggcaaaagatccagcgcacaagtccagaaagtggggaaagcccggacccgaccatctcaagataccatgttcgaatatatcccacaacgcgtcatcgtccggcagcaccggtggtcgcgaaccaaacagcgtattgggttcgatgtgtatctggacgtcaactataaatttgtaccatggtttaatctgacagtacgaaatcgctataaccataataactatagttcaacagatttgagcggggaactggataataatgacacctatgaaattggcacctactggaattttaaaatcaccgataaattttcctatacatttgagccacattacttcatgcgagtgaatgactttaatagtagcaacgggaaagatcatcattgggaaatcactaacaccttccgttaccgtattaatgaacactggctcccttatttcgaattgcgctggttagaccgcaacgtcgaaccgtaccaccgcgagcaaaaccagatccgtatcgggacgaacaattttggcttcgcatgcgttatcgctgattgtcggcagcttgattggcgttctcgcgtactacgtcagagaaaaaaacgcacgatgccggacgcgacaaagtcaaaaatgagcgttacggcgtcgccccttctgtcgcttttggccttgcacaacacgccagacggcggcattccgaccatcggtttgccgggctattctgccccatctgcgggaacggcggccctgaatcattccggaaaagttgatatcttcaataaacttcacctgttcctcttcccacactgcatcaagcgcctggcggctttcccggaattacgcccagatgagctactccacggcacgggccagtgcgaacgagtcgtgggcgtactttatggggcggcgaaaattcgtcgcatcccgtcaggcgagccagatgtttctgtgtcactactggtccatatgcgaatatggcacactgcccaagtaatttatagattcaatgccatccccatcaagctaccaatgactttcttcacagaattggaaaaaactactttcaagttcatatggaaccaaaacagagcccgcatcgccaagtcaatcctaagccaaaagaacaaagctggaggcatcacgctacctgacttcaaactatactacaaggctatagtaaccaaaacagtatgccataccaggaccagaaagcgaaccatcctgggcaacaataatcggatcgatacgaacttaggtgttccctgtttgctggcggacggcagtttggccgctttattgacgtcataccaccaggtgtcgattccgttaggcattcgcaaagctgtttataatgggagccgctttgacgtctggagtagcgcatttatcatcatcggctacgccattccggcctttttgtttgccatcctgctgattgtcttcttcgcgggcggcagctatttcgacctgttccctctacgcggcctggtttccgctaactttgattcgctgccgtggtatcagaaaatcaccgattatctgtggcatatcacgctgccggtgctggcgacagtgattggtggctttgcggcgctgaccatgctgacaaaaaactcattccttaatagcgagcaggggcagagtgttccattaaatacgtcgacaactacagacccggctacaacgtccacgccgccagcgtctgtggatactaccgcaaccaacacgcaaacacctgccgtaactgcgccagcaccagctgttgatccgcaacagaatgcggttgtttcgccttcgcaggcaaatgttgataccgccgcgaccccggcaccaacggcagcaacgtgctgccagcagacgctgacgcggggcgagacggtcaacggtgatatctttcataccatccgggatccagatgttcatcaccgatggtgtgccgagttgctcgccaaaataggccgaaacgcgacggctggctttgcagtgatcaatccagaactggcgaatgctgtcgtcggcatgggaaagcatcggcacgtagctcactggcattacgcgctttgcccggataattgcctgtggcctgaatccccccggtcagcgaaccttccgggttttcaaaaccggaaacatcatcgccctgccagcagtgcattgaaacgggtaaacgatcaagttggcgcagcgcctcctcgacatcaatccccaccgccgcgaaacgctgtttcgctagctcccaggcctgttccaatgagttttacatgggaaaataatcgccagatatggtttaaagtccaggatagtcagttgatgaaatatattctgtacaaaggatttattggcatcgacggtattagcctgaccgtcggcgaagtcatgtcttccgccatatcttcgtggtccagacccgcgataccagttcagcgcaggagcgtaaacgatcgggaagtccatctgctcgtcggtcgcgtcgaggttaacgaacagatcgaatacctgatccacaacccaatcaggacgcgcgccaggccggtcaacttaggtgataaccaccatctgctcctcgccgttaggtaccgagctcgaataactaatctggacgaatcggacgtctcggcgtatagcgagagcccaacgggacagacggcgtccaatgcttgcggggggaccgtccgcctatggaaggcgccttacacgattgcccaccgagcctcgcttagccaggggcctgacaatttcagagcgtgcagtgcacacgggtcatcctcgccatattacggagtctgtttccgaaaagtgcacgacgagcccttaggcggaatgactgctccggtgcataaccccagcgtactgcgttctttcaggaatcaatcagttgctgtgcccggttcagccacccacgacccgaatatcgaactgggtgtcgcaggtttgatcggccagattcaacatgccttccgctgtcagcgccagcacaggcgattgactttgcatgtcgtttaa

SEQ ID NO: 131891 - DNA, 895 bp, Homo sapiens
atgacggcctcagaacgtcacgccagcacagagaatgatattcgcatacggagaacattctccgctgcgaattaccgcctgactttctgcggtttgttgtttgaattgttcatgcgtggtgtaacgaatttcaatggtatttccctggtgtttttgcagctgctcaagaactttagcaacaacgcccgcgccaacggtacggccgccttcacggattgcgaaacgcagaccgtcgtccatcgcgatcgggtggatcagggtaacaaccattttgatgttgtcgcccggcattaccatctctacgccttccggcagttcgatggtaccagtcacgtcagtagtacggaagtagaactgcggacggtagcctttgaagaacggagtatgacggccgccttcatctcttggacagaatgtacacttcagattcgaacttgcacggccttcgtccagcagtttcaccagtgacaaacacaccagcgttgatggctactacagccatgatggttcgctggcgcaggttgacctcagtgcgaactaccatgaagggcaatacacctctgcgggcttgtcgttacagggcggcgcaacgcttactacccacggcggcgcacttcaccgtacccagaatatgggcgggacacgcctgctgattgatgccgatggcgttgccgatgttccggtggaaggtaacggggctgctgtttataccaatatgtttggtaaagccgtcgtttctgacgttaacaattattatcgcaatcaggcgtatatcgacctcaacaaattgccggaaaacgccgaagcaacccagtcggtggtgcaagccacgctaactgaaggagccattggctaccgcaaatttgccgtcatcagtggtcaaaaagcgatggcg

SEQ ID NO: 131892 - DNA, 1150 bp, Homo sapiens
aggttggcatgccgcaagggtgccttctagaggttcagggtaccaccctttttgatgttttcgcccggccattcccctctttacgccttccggcagttgaatggtcccagtcccgccagtagtacggaagtaaactggcggccggtagcctttgaagaccggagtatgacgcccgccttcatctttggacagaatgtacacttcagatttcaactttggtgtgcggctgaatggtgcccggctaagccagtacctgaccacgttcgatttcttcacgtttgataccacgcagcagaacacatacgttctcaccagcacggccttcgtccagcagtttgcggaacatttcaacgccagtacaggtagacttctgagtctctttgataccaacgatttcaacttcttcaccaactttgatgataccgcgttctacacgaccggtaacaacggtaccacgaccggagatggagaatacgtcttcgatcggcagcaggaacggcttgtcaatcgcacgctctggttccggaatataagaatccaggaagccagccagttccaggattttcgcttcccactctgcgtcgccttccagcgctttcagagcagaaccacgaacgatcggagtgtcgtcgcccgggaagtcgtactgagacagaagttcacgaacttccatttcaaccagttccagcagctcttcgtcatcaaccatgtcgcatttgttcaggaacacgatgatgtacggaacgcctacctgacgacccagcaggatgtgctcacgagtctgcggcatcgggccgtcagtcgcagcaactaccaggggggatcctctagagagatcgttatggagatcctctacaacatctttaccgtgttttttaaccaggtcatgaccaatgccccgttgttgctgggtattgtgacctgtctgggctacatcctactgcgcaaaagtgtcagcgttattattaaaggcacgattaaaaccataattggtttcatgttgttgcaggcagggtccggcatcctcaccagcaccttcaaaccggtggtggcgaaaatgtccgaagtctacggcattaacggcgcaatttccgatacctacgcttcaatgatggcaaccatcgaccgcatgggcgatgcctatagctgg

SEQ ID NO: 131893 - DNA, 2734 bp, Homo sapiens
atggaaggtcagtcgatcgtcaacgttgatgagatccaccgtgccgcccgctttttctatcaggccagacagcgggatttgtacggtgccggaggatcaaatgctatctgtgctgatgtacagcacaagttcttgcgcattggcgtacgctgtcaggcctatcctgatgctcacatcatgatgatgtccgcttcgttgttacaggaaggagatgttgtgctggtagtgacccattccgggcgaaccagtgatgtaaaagcggccgtagaactggcaaaaaagaacggggcaaagattatttgtataacccatagctaccattcaccgatagcgaaactggccgattatattatttgctcaccagccccggaaacgccgttattaggtccccagaactttagcaacaacgcccgcgccaacggtacggccgccttcacggattgcgaaacgcagaccgtcgtccatcgcgatcgggtggatcagggtaacaaccattttgatgttgtcgcccggcattaccatctctacgccttccggcagttcgatggtaccagtcacgtcagtagtacggaagtagaactgcggacggtagcctttgaagaacggagtatgacggccgccttcatctttggacagaatgtacacttcagattcgaacttggtgtgcggcttgatggtgcccggcttagccagtacctgaccacgttcgatttcttcacgtttgataccacgcagcagaacacctacgttctcaccagcacggccttcgtccagcagtttgcggaacatttcaacgccagtacagaactaaacataaagttagatcttgtctttgaatcaatggctaggcatttcgggttcccgttcaatgaccatccccagggcgttggctttttgattctggagacgatgtgcagcgaaattcaggctgcgtgtcgggaaacggcgcaacggatcccggaaagtgatgctgaactggcgcgctgcattttcgacagtctggcgctgctgtatgccgatgtgttgcatgagctggcgcagctgcgcggtgaagatttctcgcaactgcatattgtcggcggaggctgccagaacacgctgctcaaccagctatgcgccgatgcctgcggtattcgggtgatcgccgggcctgttgaagcctcgacgctcggcaatatcggcatccagttaatgacgctggatgaactcaacaatgtggatgatttccgtcaggtcgtcagctccttccgcgaatctgaccacctttacccctaatcctgacaattcactctacacgacagacaaaggagctttgcgcatgaccactcaactggaacaggcctgggagctagcgaaacagcgtttcgcggcggtggggattgatgtcgaggaggcgctgcgccaacttgatcgtttacccgtttcaatgcactgctggcagggcgatgatgtttccggttttgaaaacccggaaggttcgctgaccggggggattcaggccacaggcaattatccgggcaaagcgcgtaatgccagtgagctacgtgccgatctggaacaggctatgcggctgattccggggccgaaacggcgtaatttacatgccatctatggatcaaaggttttcgcggtagcgggatgcgtcgtgttgatgacgaccatgcccgacagttgcaattcgtggcaaaaatgcaggaataaaacaatgaacaagaagattcattccctggccttgttggtcaatctggggatttatggggtagcgcaggcacaagagccgaccgatactcctgtttcacatgacgatactattgtcgttaccgccgccgagcagaacttacaggcgcctggcgtttcgaccatcaccgcagatgaaatccgcaaaaacccggttgcccgcgatgtgtcgaagatcatccgtaccatgccaggcgttaacctgaccggtaactccaccagtggtcagcgtgggaataaccgacagattgatattcgcggtcggtttgatgggattgtgggtatttttgctctcatcggtgattggtacccggcaatgtatggtaccgagctgaatatgcaaatgactaagcaaccaccaatcgcaaaagccgatctgcaaaaaactcagggaaaccgtgcaccagcagcagttaaaaatagcgacgtgattagttttattaaccagccatcaatgaaagagcaactggcagcagctcttccacgccatatgacggctgaacgtatgatccgtatcgccaccacagaaattcgtaaagttccggcgttaggaaactgtgacactatgagttttgtcagtgcgatcgtacagtgttcacagctcggacttgagccaggtagcgccctcggtcatgcatatttactgccttttggtaataaaaacgaaaagagcggtaaaaagaacgttcagctaatcattggctatcgcggcatgattgatctggctcgccgttctggtcaaatcgccagcctgtcagcccgtgttgtccgtgaaggtgacgagtttagcttcgaatttggccttgatgaaaagttaatacaccgcccgggagaaaacgaagatgccccggttacccacgtctatgctgtcgcaagactgaaagacggaggtactcagtttgaagttatgacgcgcaaacagattgagctggtgcgcagcctgagtaaagctggtaataacgggccgtggtactcactggaagaggtaccgagctga

SEQ ID NO: 131894 - DNA, 732 bp, Homo sapiens
atgttagataaaattgaccgtaagctgctggccttactgcagcaggattgcaccctctctttgcaggcactggctgaagccgttaatctgacaaccaccccttgctggaagcgcctgaaacggctggaggacgacggtatccttatcggcaaagtcgccctgctggatccggaaaaaataggcctcggcctgaccgcttttgtgctgataaaaacgcaacatcacagcagcgaatggtattgccgctttgtcacggtggttaccgaaatgccagaagtgctggggttctggcgcatggctggtgaatacgattatctgatgcgcgtccaggttgccgacatgaaacgctacgacgagttttataagcgtctgctggtatttccgtcgggaatggcgtcgctatctcggggctgtcgccttgcttgtcattatcgcgatgctgcaactggttccgccaaaagtggtggtattgttgtcgatggcgtgacagaacaacacttactaccggtaccgagctcctgcggtgccgctgacggctgccagcacgccgacgccgctgacgaatattttgtaagtaatggcaaactgtcagctcatcgatatccagtcgtcgcgtatccggtgaacaaaacgcaaaatcgtctgccaaatttttctccagcagcagaatactctcgttatgcagcgatattttttgctgttcatgataaatatcgaatgaacgacgaatga

SEQ ID NO: 131895 - DNA, 2883 bp, Homo sapiens
tcactcatagatctcgttatccgggttaagacgacgacgactaataattcgcagcagacgccacagtacccatgccagcaatatcacactgatagccgccagcaccgccagcagaatcggatggtttgccagcgcataccacacgcgctcgaaccacggcagatgacctacgtaataaacgtcgccaacacgtaggctgttgataccggactcgcggatcaccgcgaccgaaccgaacatggtggcgcgtttgccgctatcgttcaccgcatcgttaagcatttcataaccgcgtgggctatctgccaacagcgcaatcacgctgcgctggtcgttatacggcgactggaagccaatcaccgccgccatcgcaccggaagaggtcagcgttgaccgggtttctgccgcgcgatcgctctcgtccggcacaatgccggggaacggggtctggcgcatcggtgttttcacccagctttcggtcgcctgcaccaataggtcgatctgcttatcgtctttcagtttgtccgggataccaccgatgatcatgatgtcggcatctttgccctggcggctaacgaccgtgcagctttcgataatattctcgacacccagcgctatgcgtgcgtccagctctttttcaccatcctggcggatatgctcatgaattgccatcgcccgggaggggagtcggtcttcatctatttctatttttttgccgcgctctttttcttcgctctcaacttcaatttcgtcgctgtgttgatcaattttgtcgttgtccatggtctcttctcttgaattagcacgtatagctaaagcgtagcggcttttttgctcgcaactgacgggagttactctgaaaatgtagaaaaggctgcgtttgcctttttctgtttctatagaatcaagtagccttagccacagccccagattcctggagatggccccgcactcactcttcttgcaggaggtgcatttgcactttttgcacttgcaggagccggcgcaggcgcaggagccaccacgcgccttgcggatgatgagattcgggcgcgtatacagtcggcgacgacgcctgatgagttgctctcggcgctggatgacaagggaggcacgcaaccttctgcctctttttccaacgcgccaactatcgtctgcgtaacggcctgtccggcgggtattgctcacacctatatggctgcggaatatctggaaaaagccggacgcaaactcggcgtaaatgtttacgttgaaagccaatggcgctggaagaaacgccgtgcgtttacgggcttctatctcttccacaatgcggacatacatcttctcgttcaggctgtagaagcaacccatcgccacaatggtgactaccgccagtgcgcttgggtagatgaagatcaactggcgtaacccttcaatggtgtggtcagcctgtgcgacgttcggcacatagccaatttgcgtcagcatccagccggggaagaaaccagccagcgcctgagacactttgcgaaagaaggtaaaaccggtgtagaccgttccttccgaacgcacgccggtgcgccactcgccgtactcgacggtgtcggaaaccagcgcccagttcaggctgttaacaaacgctgagccaaagaacgccaggcaggagaacgccacgaagctgaccgaaccgccgccgaagaaatagttgagcagatcgcccagcacccaaatcagcaggccgccgatataaactttcttcttgccaaaacgtctgactgaggcaggcatcaggaatacgccgatgcaaatacagcccatgctgaaaaatcccatatacgacaacaggatgggatcgttaagcacgtactgggtgtaatagacctggatggcgaggttaaacgcccctaaagtgcagaggttggcaatgcacagaatgaacagcgggcggttacccgcaattgcgcggaaagattgcagcaggcccggcttttgcgccggattagcaggctgggtttcgacataacgctctttcacgcccgagtagcagatccacataaacagcaggccaaacagtgaaaacagcgtggcggcgaagatatagccaagttgctgattaccttcgataagattcataactggcacgaatcccaccgtgcacagcagcaggcccagcgtagcgccgccctgacgccatgccgccagtgaggcgcgttcgttggggtttttggtgatagcgggaaccattgcgccgtaggagcagttcatcatgcttttggaccgatcttgcgtcgggaatctacatcctgctgatatcgacgctagtctggccggcgcatgcaatgaaccacggctaaaatccgccagctttgcggaaaattcagccactttcgccgccggaagcgccacccgcagcagaacgaatgcctgataatcactgttgataattttgccgtcacactgccccagcaacgcttcaatgccggttaactgatgatattcacattgcaaagtatattcggttaatggcgtcttgcgttgggtcgttagctggcgcagcgcctgattcacgccgccgccatacgctttcactaacccaccggtgccaagcaatatgccgccgtagtagcgcactaccacagcggtaatttccccgacgccgctgcccattagctgggcgagcatcggtttacctgccgttcccgccggctccccgtcgtcagagaaacccagctgttgagaatcatccggcgcacccgcgacccacgccacgcaatggtgccgggcatcggggtgttctgcccgcaccgattcaacaaacgctttactgccaacaataaaatgccacggctgggagttggtgctggatgggctgtattgcagtagcgttttgatcttgctcat

SEQ ID NO: 131896 - DNA, 1736 bp, Homo sapiens
tcacctcgattacggattcaatgtccgtacccgtagatccggaagaatggggactccgtgtggccgcttttgttatgatacttgcgcaacatcacagcagcgaatggtattgccgctttgtcacggtggttaccgaaatgccagaagtgctggggttctggcgcatggctggtgaatacgattatctgatgcgcgtccaggttgccgacatgaaacgctacgacgagttttataagcgtctggtaaacagcgtgccggggctgtcggacgtcacttccagcttcgcgatggaacagattaaatacaccacttctttacccatcgaataaatatccagaatcaggtcaggacacaacgcgtgcgattatttgctcaattaagctggtatttccgtcgggaatggcgtcgctatctcggggctgtcgccttgcttgtcattatcgcgatgctgcaactggttccgccaaaagtggttggtattgttgtcgatggcgtgacagaacaacactttactaccgggcagatcctgatgtggatcgccaccatggtgctgattgccgttgtggtttatctcctgcgttacgtctggcgggtattgctgtttggtgcgtcttatcaactggctgttgaactgcgtgaagattattaccgtcagctaagccggcagcatcctgagttttacctgcgtcatcgcaccggtgacctcatggctcgtgcgaccaatgacgtcgatcgcgtcgtgtttgccgccggagaaggggtgctgacgctggtggattcactggtgatgggctgcgctgtgttgattatgatgtctacgcaaattagctggcagttgaccttattttccctgttgccgatgccagtgatggcgatcatgattaagcgcaacggcgatgctttgcatgaacgctttaagctggcacaggcggcgttttccagtcttaatgaccgcacccaggaaagcctcaccagtatccgcatgatcaaagcctttggtctggaagatcgccagtcggcgtattgccgcgagcagtccacgtatttggcatcaatgaagagacggacgcctgttagtcgaacatttgttcatccggtgatgaaaagcccttacggactgacgctcaattcccggagaataccgggtccacgcctggacgggagaacatcgatgagtcacatcacaacggaagatccagcaactttacgcctgccctttaaagagaaactctcttacggtattggcgacctggcctctaacatcctgctggatatcggtacgctttatcttttgaagttttataccgacgttctggggctgccaggcacctatggcggcattatctttttgatttcaaaattctttactgcgtttaccgatatgggtaccggcattatgttggattcccgacgcaagatcggtccaaaaggtaagttccgtccttttattctgtatgcgtcattcccggtcaccttactggcgatcgccaactttgtcggcacaccgtttgatgtcaccggtaaaacggtgatggccactattctgtttatgctttacggactgtttttcagcatgatgaactgctcctacggcgcaatggttcccgctatcaccaaaaaccccaacgaacgcgcctcactggcggcatggcgtcagggcggcgctacgctgggcctgctgctgtgcagcggtggattcgtgccagttagattataggatctgtgatcggatatga

SEQ ID NO: 131897 - DNA, 964 bp, Homo sapiens
aaacaaggggggcggggcgctgctgacgaacttgcacttgccaaagtcgacgctgaatatgctgggttccgcctttgccggttatcaacacacgcatgaactgcctatagagcagcggtataagagaaatatacgcttttttagtcacggggatgccatgtttatcacgttcaatccgcaggcaattaatgagcgcgtcggggagtaattccgcggcgctggtttaaaacgttggactgtttttctgacgtagtggagaaaaaatgaaatttgaactggacaccaccgacggtcgcgcacgccgtggccgcctggtctttgatcgtggcgtagtggaaacgccttgttttatgcctgttggcacctacggcaccgtaaaagggatgacgccggaagaagttgaagccactggcgcgcaaattatcctcggcaacaccttccacctgtggctgcgcccgggccaggaaatcatgaaactgcacggcgatctgcacgattttatgcagtggaaggggccgatcctcaccgactccggcggcttccaggtcttcagccttggcgatattcgtaaaatcaccgaacagggcgtgcacttccgtaacccgatcaacggcgatccgattttcctcgatcctgaaaaatcaatggagattcagtacgatcttggttcggatatcgtcatgatctttgatgagtgtacgccgtatcctgctgactgggattacgcaaaacgctccatggagatgtctctgcgttgggcgaagcgtagccgtgagcgttttgacagtctcggaaacaaaaatgcgctgtttggtatcatccaggcacttacgattccaaccaacaaagtgagctttcgatactctttcgtggaaatgaaagaaagcgttgtgcctgccgcaatgtaagccctgtttgctgcaatacaaccgcatcaatatgcgactgttttgccacccagtga

SEQ ID NO: 131898 - DNA, 341 bp, Homo sapiens
ccttgcggagtgaggtataacaagggtagacgtgactggcgaaatcttcgccagtcggtaacagctttacgacagctatcacgaatttacgggcaagggttacagagatagttgaaaaagcggctaacaatttgccagccgttgtggaaatgatgattacatcgctgcgcgataaatcgccacaatttcttcggctgaacatccgccagcagcagcggctggaacaggccgcttacgaaatgacggcgctgcgtgctgcgaccattgagcttggtccgctggtgcgcggtttaccgcatttgcgaactatccatcgccagctgtatcaggaaatagagtaa

SEQ ID NO: 131899 - DNA, 1458 bp, Homo sapiens
atgctaaagtcggttccaggtgaagcccagaatacggtcagtcaggcgaatcatctcgtaagagaaattcgccgcaatctcttccatcagtgcaatcgcgttctgctgcgctttttcatgggagatttttttgctgcgcgcttcatcttctaccgctttggcaatggcgcgggaggcgagcagcttattaaacagatcctgacgagcaggcaaacgtgggcctacggcagccagacgttgacgggcaaagtgcatacgcgctatgtgttcattcacggcgggccgcgtgtgttcacctattacacgccgaaagaagagtctattaagctgttccgcgactatctcgatttgcaccgtagcaacccaaatctggatgtgcagatggtgccagtgtcggtgatgtttggtcgcgcgccggggcgtgaaaaaggcgaagtgaacccgccgctgcgtatgcttaacggcgtacagaaatttttcgctgtactgtggctcggtcgcgacagtttttcagggattgtcggtgccgcgctactgatggcgggttgtagctccagcaacgaattgagtgctgccggtcagagtgtacgcattgtggacgagcagccaggcgcagagtgccagctgattggtactgcgacaggaggaacaatgtctcaggttcagagtggcatttgccagaacattcgccgcgcggcgatttggatcgaagccaacgtgaaaggggaagttgacgccctgcgtgcggccagtaaaacatttgccgacaaactggcaacttttgaagcgaaattcccggacgcgcatcttggtcaacaatctgaggccagccttgatatcatgcgtaaccggctgaacatccgccagcagcagcggctggaacaggccgcttacgaaatgacggcgctgcgtgctgcgaccattgagcttggtccgctggtgcgcggtttaccgcatttgcgaactatccatcgccagctgtatcaggatattttcgactgggcagggcaacggcgtatcaccctgataaaccatgggtttgtgcccaagtcaacgacagttgtggaaacgaacggaccgagcgaccaaagcattgcaatgcgcaggccaggtcagactattagtaggatccaccaagtccagaaaaagctgggcatcgagctcaccaactgttatgaacacagcggcttaccagacattaaaaacgtcaccggtattttaatatgtcggcaaacccacgcccgccctgcgcgccttgccaggctcatcttcaccgccaataaaaccaatacgattaacgccctggttgatatagaagtcgatgatttctttactgatgcgtgccagatcgattgttgttttgagacagggtctcactccgttctcgccaggctcggaggggctagtgcgcaagatctccagctcgacgcaacctctgcctcccatggttcgaagtga

SEQ ID NO: 131900 - DNA, 1671 bp, Homo sapiens
atgccatgcacgtttatcgaaaggaacatactggactatttcaccatcacggcgaatcaaacacatcccatcttgcgcattgccgtcgccggttatgccatgccagcgccagagttgcttactcgccatgcggcatccccagtacgcggattaactcttcaaaggtggttaagccttgctctacggccaggcagccgttttcaaaaagcgtacgcatacccgcctgtcgtgcgccgtacgaccataaaaaccgtggtagcaatgtacacaaccgggtgcctgccagtggggcagcggcgatggccatacattgtctggaatgtggatgggctccccttgctgccggcgacaatgtgggcaaagtttgcgtaccagacgctgggctattaccagcggagacaacaccaggtgacccagttgcgccgcctgaacatcaaaccggttatcctggcagctgacggctctgagccagatctttctcagcaagccctgactgaaaaaggcgtgctgttcaactctggcgagttcaacggtcttgaccatgaagcggccttcaacgccatcgccgataaactgactgcgatgggcgttggcgagcgtaaagtgaactaccgcctgcgcgactggggtgtttcccgtcagcgttactggggcgcgccgattccgatggtgacgctggaagacggtaccgtaatgccgaccccggacgaccagctgccggtgatcctgccggaagatgtggtaatggacggcattaccagcccgattaaagcagatccggagtgggcgaaaactaccgttaacggtatgccagcactgcgtgaaaccgacactttcgacacctttatggagtcctcctggtactatgcgcgctacacttgcccgcagtacaaagaaggtatgctggattccgaagcggctaactactggctgccggtggatatctacattggtggtattgaacacgccattatgcacctgctctactttcgcttcttccacaaactgatgcgtgatgcaagcatgactaaccctagctcggtaccccgtgccggtgggcctgcgctgttgttcgaaaaccctaaaggctactcaatgccggtgctgtgcaacctgttcggtacgccaaagcgcgtggcgatgggcatggggcaggaagatgtttcggcgctgcgtgaagttggtaaattattggcgtttctgaaagagccggagccgccaaaaggtttccgcgacctgtttgataaactgccgcagtttaagcaagtattgaacatgccgacaaagcggctgcgtggtgcgccctgccaacaaaaaatcgtctctggcgatgacgtcgatctcaatcgcattcccattatgacctgctggccggaagatgccgcgccgctgattacctgggggctgacagtgacgcgcggcccacataaagagcggcagaatctgggcatttatcgccagcagctgattggtaaaaacaaactgattatgcgctggctgtcgcatcgcggcggcgcgctggattatcaggagtggtgtgcggcgcatccgggcgaacgtttcccggtttctgtggcgctgggtgccgatcccgccacgattctcggtgcagtcactcccgttccggatacgctttcagagtatgcgtttgccggatctggtacctgctga

SEQ ID NO: 131901 - DNA, 1083 bp, Homo sapiens
atgcctttcaaggggcagatccaagccccagtgggcacaggggaagggaagggctcagcgggaagtcttgaacgccagatggcaaaaacacccccagggctctggaaaattaagggtaaaggggcatttcaggctcactctttcccagctgaagaggatcatcataatgaagaaagacaaacaaagaaaaaaagaaaaacaaaacaccgacataaattttctgaagaattattgcaggaacttaaggaaatatttggagagaacggttatcctgatttcaccactaggaaaacactggccaacaaatttgattgtccggttaacgtgataaacgcatacttcaaaaagaattctggagaaacagaattcagtataacgagagtcaaaaggatatcctccaatcatggtttcaacatgaccctttccctgataaagctgccagagaacaactggccaaagaaattggggttccagaatctaatattcagtttttttcaccatccgcatctggaaatcactgaaattgctgaccgcactttgcgtgccggtgggcctgcgctgttgttcgaaaaccctaaaggctactcaatgccggtgctgtgcaacctgttcgctggtgtaacaggactctatgtgctcggaattgggcttattttgtatgctttatccaaagaaatatatgtgattaccacagagaccttctctaccatatcagtagtagggttacttgtctatgcaattaaaaaatatggtgcctctcttgcagaatttgctgataaactcaatgagcaaaaacttgtccaactagaagaggcgaagcaggcttccatcaaacaaatccaggatgcaactgatttggagaagtcacagcaggtactgccattactttttgatgtgcagaggaaaaacattcctatggcttcagagtttacttaccaggaacagctgtatagagtacataaggaagtaaagaattgcctagactatcatatatccgtgcagaacatgatgcatcaaaaggaacaagagcacattataaattgggtggagaagcatgtggttcagagcatctctgcacagtag

SEQ ID NO: 131902 - DNA, 2697 bp, Homo sapiens
atgcgggcaggattcacaagtaacgtcctgaccttcctgacgtgcacgagtcacttcctcaacaccttccgggctgctgacgtggcaaacgtgcagacggcaaccagcaactttcgccagatacaagtctttgaagacatcatcacgcaatacaatggcaaatatatcctcgcagtagaaggtaatccgccgctgggcgagcaggggatgttctgtatcagcagcggtcgaccgtttattgagaaactcaaacgtgccgctgccggagccagcgcgattatcgcctggggaacctgcgcgtcctggggctgcgtgcaggccgcgcgacccaatccgacgcaggcaacgcctatcgacaaagtcatcaccgacaaacccattatcaaagtacctggctgcccgccgatcccggatgtgatgagcgccatcattacttacatggtgacctttgatcgcttgccagatgtcgacagaatgggccgtccgctgatgttctatggtcagcgaatccacgataaatgctatcgccgcgcccacttcgacgccggagagttcgtccagagttgggatgatgacgctgcccgcaaaggttactgcctgtacaaaatgggctgcaaagggcctaccacctataacgcctgttcctcacacgctggaatgatgggtctggtcacggctgctggctggcggaaatggtttggatcggggtcgtttcagcggtgtcgattcgagttggataagctatctatccagcgccatcagcgttaccatggcaccagctacaaccttgaaccagacatcaaaagcagccctggcggcttgcgcgatatccacactctgcaatgggtggcccgccgtcattttggcgcaacatcgctggatgaaatggtcgggtttggcttcttaacctcagcggagcgggcggaattaaacgaatgtctgcatatattgtggcgtattcgctttgccctgcatctggtcgtcagccgttacgataatcgcctgttattcgatcgccagcttagcgtcgcccagcgtctgaattacagtggtgaagtgaactcaaccagatgctgctgcaactgttcgatgaaaccatcctcgccctttccgccgacaaaaaaccaccgtccaatcgacgatgagtttaagctacgcggtacgctaatcgacctgcgtgatgaaaccattattatgccgccagccggaagccatcttgcgtatgttctccaccatggggcacaacagggcgacaaccgcttttactccaccacgttggcccatttcgccatgcccgtggcctttggaaacaccgttgtgtatattccggaagcccaaaactgttttgagcatcttggtcaccccggtgagcgacttagctctaaagattttttctacgacgacggtgagtttgccgccattcttgaggatgtgcgcacggtccgcgaattaggttttcctggactggtgacgggcgttctcgatgttgacgggaatgtcgatatgccacgaatggaaaaaataatggctgctgccggtccgctggcagtgacttttcatcgcgccttcgatatgtgcgctaaccctttatatacactcaataatcttgcggaattgggcattgcccgggtactgacatcagggcaaaaatcagacgcactgcaaggtttatcaaaaattatggaacttattgcccatcgtgatgctccaatcattatggccggagcaggagtccgtgcagaaaacctgcaccacttcctcgatgccggagtgctggaagtccatagctccgcgggagcgtggcaagcctcaccgatgcgttatcgtaatcaaagattgtccatgtcatcagatgaacacgcggaccagtattcgcgttatatccctgcgtctgacatctacgaagacgaaggcattttaatgatcaccccagcggcaaccgcgccggagctgaccgcccgtggctatcagctgatcctgcgcaccaccggcctggactccgaccaggggccgacggcggcgaaatatattcttgagaaagtgaaaccgcagcgtattgctatcgttcacgacaaacagcaatacggcgaaggtctggcgcgagcggtgcaggacggcctgaagaaaggcaatgcaaacgtggtgttctttgatggcatcaccgccggggaaaaagatttctcaacgctggtggcgcgtctgaaaaaagagaatatcgacttcgtttactacggcggttatcacccggaaaggggcaaatcctgcagccggcaacaaccgtcatttccattgagcccgccaatcctgatgtggtctatattcccaactacaacccaaccgtggtttacgggaactgggccaatactgcgtatccgtcggtttatctgccaccaccagcctgagaaccgtttgttgacagctttgtacgcggattcggctatagcatgggcgttgctaccacgtacgcactattcagcagcatcgactgggacgacgacaatcatgaccatcatcatcatgacaatgatgattatcatcaccacgatggcggtcatcgtgacagtcatggctggcaacacaacaggcgacaacattaaaatcgacatcaaccaaattcaacccgatcaccccgggaaccatcttactcgaaaagaaatatggcattggcgggacaaatccaaactaaccgcaatgggg

SEQ ID NO: 131903 - DNA, 901 bp, Homo sapiens
atgccatcaaagaacaccacgtttgcattgcctttttcaggccgtcctgcaccgctcgcgccagaccttcgccgtattgctgttgtcgtgaacgatagcaatacgctgcggtttcactttctcaagaatatattcgccgccgtcggcccctggtcggagtccaggccggtggtgcgcaggatagctgatagccacgggcgcatcgcaaagagaacgccgtataatgggcgcagattaagaggctacaatggacgccatgaaatataacgatttacgcgacttcttgacgctgcttgaacagcagggtgagctaaaacgtatcacgctcccggtggatccgcatctggaaatcactgaaattgctgaccgcactttgcgtgccggtgggcctgcgctgttgttcgaaaaccctaaaggctactcaatgccggtgctgtgcaacctgttcggtacgccaaagcgcgtggcgatgggcatggggcaggaagatgtttcggcgctgcgtgaagttggtaaattattggcgtttctgacagagccggagccgacaaaaggtttccgcgacctgtttgataaactgccgcagtttaagcaagtattgaacatgccgacaaagcggctgcgtggtgagccctgccaacaaaaaatcgtctctggcgatgacgtcgatctcaatcgcattcccattatgacctgctggccggaagatgccgcgccgctgattacctgggggctgacagtgacgcgcggcccacatagagagcggcagaatgtgggccagtttagagaacatcttcaggctcgaaagtgtgacttacccgggatcacacacaggctggcagtgaagaatccaggggtacgtagccagggttcgtacgagggggtaatcaaggcggattaa

SEQ ID NO: 131904 - DNA, 323 bp, Homo sapiens
ttacgctcccgggtgtcatgggcgagggaatttcggttctacgatttcgataacggtttgcgtttatgaatttcatacagaattatcgcaatccctactacaaatatcaggccacagagaaaaccaagccagttggaggtgatgtgcggtgtaatgtatgcgccgaaaaacagcgttaacgggtggtgaaccagatagataaacagcgatgcgttaacacaataagtcacccgcgctgactggaagttaagcacacggtggccaaaggagaagaccacattcaccatccacagaccgaggaccatggtgatcaccgactcggt

SEQ ID NO: 131905 - DNA, 1329 bp, Homo sapiens
atgacccgtgacacactgaaccgcgcaattgcacgtggtgtgggcggtgatgatgatgcaaacatggaaaccatcatctacgaaggttacggtcctggcggcacggcaatcatgattgaatgtctgtctgacaaccgcaaccgtaccgttgctgaatggaaggaaggggagttgtcttttggagccgtgagctgtgcagcctgggtttacaagaggggtgatgccaatttttccttagccaccctgtgtgtgtctcaatatgccaggcgagaaagtggcgaaggtcaaagtgggatgtacgaagcggtgcgcgacggcatggtggtgaatctgttgctggaggcaattccggatctgcatttgcgtcttgacgcaaatcgcgcctggacaccgctgaaaggtcagcagtttgccaaatacgttaacccggattatcgcgaccgcatcgcgtttctcgaagagccgtgcaaaacccgcgatgattcgcgagcgtttgcccgtgaaaccggcattgccattgcctgggatgaaagcctgcgcgagccggattttgcctttgtggctgaagagggcgtgcgcgcggtagttatcaaacccacgctcacgggcagtctggaaaaagtacgcgagcaggtacaggcggcgcacgcgctggggctgacggcggtgatcagttcttccattgaatcgagcttaggcttaacgcaactggcgcggattgccgcctggttaacgccggacaccattccagggctggacacgctggatctgatgcaggcgcagcaggtacgtcgctggccggtgcggggagaaaccatcgccttacgtcttaatgacgagcaactcaactggcgcgagctttgtgctcgcgtcgatgaattagcctccggatttgcggtgcagggggtggttgagggcagcggcgtgatgttgcgggcgtggaatacgccgcaaacgctgctcgcctggctggcgttactgcaatgcggggcgcgggtgttgcccgtgaaccctcagctgccgcaaccgttgcttgaagaattgctgcccaatctgacgctgcaatttgctctggtgccggatggggaaaacacgtttccggcattaacgtcgctgcacattcagctggttgaaggcgcacatgccgctacgtggcagccgacgcgtctgtgctcaatgacgatcatggtcttcatcacggatattagctcagattcagcagttatcttgtctgctcatcccattcgtcccaccctgccagccattgcgttattatctgtccttgagattctatttgtcctagtggatgtgaagtgtatctccttgtag

SEQ ID NO: 131906 - DNA, 1394 bp, Homo sapiens
atgaacgacgcctcccccgtttcgctggcctgcgccgtgctgacggtcagcgacacccgcagcgccggcgacgacacgtccggcaacctgctggccaacagcctggcgcaggccggccaccaatgcgtgcggcgcgacatctccaaggacaacgtggtgctcgggccgatgcagcatgccaatgccgctgttggggtgcctgacaattgcgatgcccgtagtcgttatgcgttccggatgacctatgtcattctagtcgtcgcgtcttggctctctgtgtacaacacgtcagcattggcgtttgtcgcttatttactcaaccagcgctatggcagtggcgatgcctggatgtacgaaaccgagtcggtgatcaccatggtcctcggtctgtggatggtgaatgtggtcttctcctttggccaccgtttgcttaacttccagtcagcgcggccgcaaaagcaacgaatcccctgctcgcgcgcctgttccgtcaactcgaccgggatagccgcgccgccaagtaacaccgctttcagggaaacggaactacggttaaccagcaaacgccagagttgtgttggcaccagtgaagctaacgccagccaggcgagcagcgtttgcggcgtattccacgcccgcaacatcacgccgctgccctcaaccaccccctgcaccgcaaatccggaagctaattcatcgacgcgagcacaaagctcgcgccagttgagttgctcgtcattaagaccaagtcgcgcacagagccgggcgggtacgtgccaggcgtctggctgcgggaaatcgacgctgctgcgcatggttgccgggctggagcgggtgacagaaggcgatatctggatcaacgaccagcgcgtgactgaaatggagccaaaagatcgcgggattgcgatggtgttccagaactacgcgctttatccgcatatgagtgtcgaagaaaacatggcgtgggggctgaaaattcgcggcatgggcaagcagcaaattgccgagcgcgttaaagaagcggcgcgcattctggagctggacggtctgctcaaacgtcgcccgcgcgagctttccggcggtcagcgccagcgtgtggcgatgggccgcgcgattgtgcgcgatccggcggtgttcctgtttgatgagccgctctctaacctcgatgccaagctgcgcgtgcagatgcgtcttgaactgcaacagttgcaccgtcgcctgaaaacgacttcactctacgttactcacgatcaggttgaagcgatgacgctcgcccagcgagtaatggtgatgaacggcggtgttgccgaacagaattgcacaccagttgaagtctacgaaaagcccgccagcctgtttgtagcgagtttactcgcatccgcgataaccgctga

SEQ ID NO: 131907 - DNA, 744 bp, Homo sapiens
ctaaaggatcccgggtatgtgggacgagctggaagaagattctgaagaataagtgtgatctacgtcactcataacgttggtactatcggccacgttgaccacggtaaaactactctgaccgctgcaatcaccaccgtactggctaaaacctacggcggtgctgctcgtgcattcgaccagatcgataacgcgccggaagaaaaagctcgtggtatcaccatcaacacttctcacgttgaatacgacaccccgacccgtcactacgcacacgtagactgcccggggcacgccgactatgttaaaaacatgatcaccggtgctgctcagatggacggcgcgatcctggtagttgctgcgactgacggcccgatgccgcagactcgtgagcaggtctatcttgttgagcacaataatcggctcaatctgcaaggtttcgcaggccaccaggtaacggtcgataatattgagcgacagctccggcaaaatggcggagacaatgacaatctggtcgatgttggcggcaataggttttacgccgtcgtagaaatccggacgcgtcaacaccgaggtacgctcatgcaccgcttccacgatccctttgacatttacgccttccgccgccggtttacccggacgccagacgcaaacatacaggttccagcctttttcagtggcgataatacccacgtctttaccctgagcttctgaacattcacgggtacagccggagacaccgaacttcat

SEQ ID NO: 131908 - DNA, 488 bp, Homo sapiens
gccacgaaagtttctgtatatggtggttttggtccgcgccttctctttcaagatatcccggcacttttttgccatgggcgaagcccgcagtatattgcccgcgtacggttttttcgcgtacgttggagcggtcgatgcggcgcagagacttcagtactttcactttttcatcgcggatgctgtctgcgctcaggtcagacggcggagacatcgcaatcatgcaaagaatttgcagcaggtggttctggatcatgtcgcgcatctgaccggctttatcaaaatagccccagcgcccttcgatccccacttcttctgccacggtaatctcaacatgatcaatggtgcgattgtcccagttattcacaaacagggagttagcaaaacgcagcgccaacaggttcagccccgtttctttaccaagatagtggtcgatacggtaaacctggcactcctcgaagtattcgccaacctgatccccgggtaccgag

SEQ ID NO: 131909 - DNA, 701 bp, Homo sapiens
atgggctatgtgatcctgaaaaactacaaacctcaggtggtgctggctgccgcaggtatcttcctgatgatgtgcggtgtctggttagggttcggtggtgtactcgatcccaccaaaagcagcggctacttgatcgtcgatatttataatgaaatcctgcgcatgctgtccaaccgcattgccggattggggctgtcgattatggcgttgggcgtttatgcccgctacatggagcgcataggggccagtcgcgcgatggtgagcttgttaagccgcccgttaaaactcattcgctcgccgtatattattctgtcggcaacttacgtcatcggccaaatcatggcgcagtttattaccagcgcctccggtctgggtatgttgctgatggtcaccttatttccgacgctgcagagcagccagaatcaggttgattccagctccatcttcaacggcattgaaggcgctgagatgagcaacaaaggcaaagatcagggcgtggtagtgaacaacgtgaaaacgggcactccggctgcgcagatcggcctgaagaaaggtgatgtgattattggcgcgaaccagcaggcagtgaaaaacatcgctgaactgcgtaaacaaactgtgaatgccgtcgggccaatgggcggtattacttctgccagtatgccgatgctggtggttgagaacgtgaccgacggcaaccg

SEQ ID NO: 131910 - DNA, 1951 bp, Homo sapiens
atgtcaggagaacacacgttaaaagcggtacgaggcagttttattgatgtcacccgtacgatcgataacccggaagagattgcctctgcgctgcggtttattgaggatggtttattactcattaaacagggaaaagtggaatggtttggcgaatgggaaaacggaaagcatcaaattcctgacaccattcgcgtgcgcgactatcgcggcaaactgatagtaccgggctttgtcgatacacatatccattatccgcaaagtgaaatggtgggggcctatggtgagcaattgctggagtggttgaataaacacaccttccctactgaacgtcgttatgaggatttagagtacgcccgcgaaatgtcggcgttcttcatcaagcagcttttacgtaacggaaccaccacggcgctggtgtttggcactgttcatccgcaatctgttgatgcgctgtttgaagccgccagtcatatcaatatgcgtatgattgccgaggatcctccagtacccgagcatgcatgcatgcctgcaggtcgacgtgtattcaccactgcggtgcatgcctccctggacaagttccgtcgacacttttacgctatctgccggaaaaatcaccccagtctggcggcggatctcggtcagcagtttggcggtgatgcgactgaccgccagccctggatgatccaccagatgctcatccaccagggtagcgaacagctctgcttcgtagagcatggtattaatatgctgcggctgggtgagatcctgcatttggctgccacgcggcacgaagtgaagtttgttgatttgcgcttcaccgatactaaaggtaaagaacagcacgtcactatccctgctcatcaggtgaatgctgaattcttcgaagaaggcaaaatgtttgacggctcctcgattggcggctggaaaggcattaacgagtccgacatggtgctgatgccagacgcatccaccgcagtgattgacccgttcttcgccgactccaccctgattatccgttgcgacatccttgaacctggcaccctgcaaggctatgaccgtgacccgcgctccattgcgaagcgcgccgaagattacctgcgttccactggcattgccgacaccgtactgttcgggccagaacctgaattcttcctgttcgatgacatccgtttcggatcatctatctccggttcccacgttgctatcgacgatatcgaaggcgcatggaactcctccacccaatacgaaggtggtaacaaaggtcaccgtccggcagtgaaaggcggttacttcccggttccaccggagtaccctcaccctaaccccagcaaagcatgtctagggtctcacaataacagcaggtctcagaaagatggctggcccttgatgttcaggaagcccacggattctcgaccatcgatcagacggtgatcgtaggacagcgccaggtacatcatcggcaggatctcaacctgaccattcaccgccatcggacgatctttgatagcgtgcatacccagaattgcgctctgcggcgggttgatgatcggcgtaaacatcagggaaccgaacacaccaccgttggtgatggtgaagttaccaccggtcagatcttcaacggtcagcttgccgtcacggcctttgactgccagctgtttgattttcttctcgatgtctgccgtgccgagggtatcgacagtcacgcagaaccgggcgtcaccaggccgcgcggcgtagaaaccgacatgctgagcgtcgaaatagttgtggtaaaccacgtcatcgccgtcgatagaagcgttcacttccggggtaacgtttcagggcttcaaccaccgttttcacgtagaaggacataaagcccagacggatgccgtggcgtttttcaaacgcttcaccgtactgcttacgcagatccataatcggtttcatgttgacttcgttgaacgtg

SEQ ID NO: 131911 - DNA, 1037 bp, Homo sapiens
atgatgtacctggcgctgtcctacgatcaccgtctgatcgatggtcgcgaatccgtgggcttcctggtaacgatcaaagagttgctggaagatccgacgcgtctgctgctggacgtgtacacttttggcgcaatttgcaaagggcttggcgaggcaaaactgaatgctaaaccggcacgcgtagtcatggagaaaccgctggggacgtcgctggcgacctcgcaggaaatcaatgatcaggttggcgaatacttcgaggagtgccaggtttaccgtatcgaccactatcttggtaaagaaacggtgctgaacctgttggcgctgcgttttgctaactccctgtttgtgaataactgggacaatcgcaccattgatcatgttttccctattgaatcgcgcttattccacaaactctcgacgcgccatcggctggcctatgtcgaggctcagagcagccagaatcaggttgattccagctccatcttcaacggcattgaaggcgctgagatgagcaacaaaggcaaagatcagggcgtggtagtgaacaacgtgaaaacgggcactccggctgcgcagatcggcctgaagaaagccgtgcataacggaggacttatggctggctggcatcttgataccaaaatggcgcaggatatcgtggcacgtaccatgcgcatcatcgataccaatatcaacgtaatggatgcccgtgggcgaattatcggcagcggcgatcgtgagcgtattggtgaattgcacgaaggtgcattgctggtactttcacagggacgagtcgtcgatatcgatgacgcggtagcacgtcatctgcacggtgtgcggcaggggattaatctaccgttacggctggaaggtgaaattgtcggcgtaattggcctgacaggtgatccagagaatctgcgtaaatatggcgaactggtctgcatgacggctgaaatgatgctggaccagtcccggttgatgcacttgttggcgcaggatagccgtttgcgggaagaactggtcatgaacctgttgcggtc

SEQ ID NO: 131912 - DNA, 1463 bp, Homo sapiens; identical to SEQ ID NO: 131885

SEQ ID NO: 131913 - DNA, 1290 bp, Homo sapiens; identical to SEQ ID NO: 131886

SEQ ID NO: 131914 - DNA, 2980 bp, Homo sapiens; identical to SEQ ID NO: 131887

SEQ ID NO: 131915 - DNA, 786 bp, Homo sapiens
ttatttgtggtgcactgcaagttgctcaatgatgtccgtatttatttctgactgtttttcaaatggctcaattttgtctttcatccctccattggaaataaggctttgacttccattcattttgtttggggggaaggtattgtggggaaaatgtggcttttctattgcactgaagcccactttgtcagggatccaagtggctatagcaactaagtctcctgttgaatcttcctctagactcaatccatcatcgccttgccagcagtgcattgaaacgggtaaacgatcaagttggcgcagcgcctcctcgacatcaatccccaccgccgcgaaacgctgtttcgctagctcccaggcctgttccagttgagtggtcatgcgcaaagctcctttgtctgtcgtgtagagtgaattgtcaggattaggggtaaaggtggtcagattcacggtggtgctgacgacctgacggaaatcatccacattgttgagttcatccagcgtcattaactggatgccgatattgccgagcgtcgaggcttcaacaggcccggcgatcacccgaataccgcaggcatcggcgcatagctggttgagcagcgtgttctggcagcctccgccgacaatatgcagttgcgagaaatcttcaccgcgcagatgcgccagctcatgcaacacatcggcatacaccagcgccagactgtcgaaaatgcagcgcgccagttcagcatcactttccgggatcggttgcgccgtttcccgacacgcagcttgaatttcgctgcacat

SEQ ID NO: 131916 - DNA, 769 bp, Homo sapiens; identical to SEQ ID NO: 131889

SEQ ID NO: 131917 - DNA, 4809 bp, Homo sapiens; identical to SEQ ID NO: 131890

SEQ ID NO: 131918 - DNA, 895 bp, Homo sapiens; identical to SEQ ID NO: 131891

SEQ ID NO: 131919 - DNA, 1150 bp, Homo sapiens
ccagctataggcatcgcccatgcggtcgatggttgccatcattgaagcgtaggtatcggaaattgcgccgttaatgccgtagacttcggacattttcgccaccaccggtttgaaggtgctggtgaggatgccggaccctgcctgcaacaacatgaaaccaattatggttttaatcgtgcctttaataataacgctgacacttttgcgcagtaggatgtagcccagacaggtcacaatacccagcaacaacggggcattggtcatgacctggttaaaaaacacggtaaagatgttgtagaggatctccataacgatctctctagaggatcccccctggtagttgctgcgactgacggcccgatgccgcagactcgtgagcacatcctgctgggtcgtcaggtaggcgttccgtacatcatcgtgttcctgaacaaatgcgacatggttgatgacgaagagctgctggaactggttgaaatggaagttcgtgaacttctgtctcagtacgacttcccgggcgacgacactccgatcgttcgtggttctgctctgaaagcgctggaaggcgacgcagagtgggaagcgaaaatcctggaactggctggcttcctggattcttatattccggaaccagagcgtgcgattgacaagccgttcctgctgccgatcgaagacgtattctccatctccggtcgtggtaccgttgttaccggtcgtgtagaacgcggtatcatcaaagttggtgaagaagttgaaatcgttggtatcaaagagactcagaagtctacctgtactggcgttgaaatgttccgcaaactgctggacgaaggccgtgctggtgagaacgtatgtgttctgctgcgtggtatcaaacgtgaagaaatcgaacgtggtcaggtactggcttagccgggcaccattcagccgcacaccaaagttgaaatctgaagtgtacattctgtccaaagatgaaggcgggcgtcatactccggtcttcaaaggctaccggccgccagtttacttccgtactactggcgggactgggaccattcaactgccggaaggcgtaaagaggggaatggccgggcgaaaacatcaaaaagggtggtaccctgaacctctagaaggcacccttgcggcatgccaacct

SEQ ID NO: 131920 - DNA, 2760 bp, Homo sapiens
atggaaggtcagtcgatcgtcaacgttgatgagatccaccgtgccgcccgctttttctatcaggccagacagcgggatttgtacggtgccggaggatcaaatgctatctgtgctgatgtacagcacaagttcttgcgcattggcgtacgctgtcaggcctatcctgatgctcacatcatgatgatgtccgcttcgttgttacaggaaggagatgttgtgctggtagtgacccattccgggcgaaccagtgatgtaaaagcggccgtagaactggcaaaaaagaacggggcaaagattatttgtataacccatagctaccattcaccgatagcgaaactggccgattatattatttgctcaccagccccggaaacgccgttattaggtccccagaactttagcaacaacgcccgcgccaacggtacggccgccttcacggattgcgaaacgcagaccgtcgtccatcgcgatcgggtggatcagggtaacaaccattttgatgttgtcgcccggcattaccatctctacgccttccggcagttcgatggtaccagtcacgtcagtagtacggaagtagaactgcggacggtagcctttgaagaacggagtatgacggccgccttcatctttggacagaatgtacacttcagattcgaacttggtgtgcggcttgatggtgcccggcttagccagtacctgaccacgttcgatttcttcacgtttgataccacgcagcagaacacctacgttctcaccagcacggccttcgtccagcagtttgcggaacatttcaacgccagtacagaactaaacataaagttagatcttgtctttgaatcaatggctaggcatttcgggttcccgttcaatgaccatccccagggcgttggctttttgattctggagacgatgtgcagcgaaattcaggctgcgtgtcgggaaacggcgcaacggatcccggaaagtgatgctgaactggcgcgctgcattttcgacagtctggcgctgctgtatgccgatgtgttgcatgagctggcgcagctgcgcggtgaagatttctcgcaactgcatattgtcggcggaggctgccagaacacgctgctcaaccagctatgcgccgatgcctgcggtattcgggtgatcgccgggcctgttgaagcctcgacgctcggcaatatcggcatccagttaatgacgctggatgaactcaacaatgtggatgatttccgtcaggtcgtcagctccttccgcgaatctgaccacctttacccctaatcctgacagtgaaattgcccactatgtggcgcagattcactctacacgacagacaaaggagctttgcgcatgaccactcaactggaacaggcctgggagctagcgaaacagcgtttcgcggcggtggggattgatgtcgaggaggcgctgcgccaacttgatcgtttacccgtttcaatgcactgctggcagggcgatgatgtttccggttttgaaaacccggaaggttcgctgaccggggggattcaggccacaggcaattatccgggcaaagcgcgtaatgccagtgagctacgtgccgatctggaacaggctatgcggctgattccggggccgaaacggcgtaatttacatgccatctatggatcaaaggttttcgcggtagcgggatgcgtcgtgttgatgacgaccatgcccgacagttgcaattcgtggcaaaaatgcaggaataaaacaatgaacaagaagattcattccctggccttgttggtcaatctggggatttatggggtagcgcaggcacaagagccgaccgatactcctgtttcacatgacgatactattgtcgttaccgccgccgagcagaacttacaggcgcctggcgtttcgaccatcaccgcagatgaaatccgcaaaaacccggttgcccgcgatgtgtcgaagatcatccgtaccatgccaggcgttaacctgaccggtaactccaccagtggtcagcgtgggaataaccgacagattgatattcgcggtcggtttgatgggattgtgggtatttttgctctcatcggtgattggtacccggcaatgtatggtaccgagctgaatatgcaaatgactaagcaaccaccaatcgcaaaagccgatctgcaaaaaactcagggaaaccgtgcaccagcagcagttaaaaatagcgacgtgattagttttattaaccagccatcaatgaaagagcaactggcagcagctcttccacgccatatgacggctgaacgtatgatccgtatcgccaccacagaaattcgtaaagttccggcgttaggaaactgtgacactatgagttttgtcagtgcgatcgtacagtgttcacagctcggacttgagccaggtagcgccctcggtcatgcatatttactgccttttggtaataaaaacgaaaagagcggtaaaaagaacgttcagctaatcattggctatcgcggcatgattgatctggctcgccgttctggtcaaatcgccagcctgtcagcccgtgttgtccgtgaaggtgacgagtttagcttcgaatttggccttgatgaaaagttaatacaccgcccgggagaaaacgaagatgccccggttacccacgtctatgctgtcgcaagactgaaagacggaggtactcagtttgaagttatgacgcgcaaacagattgagctggtgcgcagcctgagtaaagctggtaataacgggccgtggtactcactggaagaggtaccgagctga

SEQ ID NO: 131921 - DNA, 882 bp, Homo sapiens
atggataaattcctggacacatacactctcccaagactaaaccaggaagaagttgaatctctgaatagaccaataacaggagctgaaattgtggcaataatcaatagcttaccaaccaaaaagagtccaggaccagatggattcacagctgaattctaccagaggtacaaggaggagctgatagggtggcttagagaaagtgtgtcaaaaatatgtctaaaatttgatcaccaggttcaggtgatcactggccgcctgataatccgcttccagatcgccttcggcaccgttgtgctctgccagctcacgcgccatatcgacgtgtttgtaggcaagcggcttgcgaatgcacgatttgcgccatcgctgggtggtgcgcccgacctgttcactctcaaaccatgttttgtggcagtggaaactcagggcgatttacctcaagccacgacggtggttgatatcgacggttgcctgggcaagccagccaatgtacaggtggcattggatctggatgtgaaaggcttccagcagtgggtggctgagagaatagctatgcatgatgcaaacatccgcgttgccatcgcgggagccggggggcgtatgggccgccagttgattcaggcggcgctggcattagagggcgtgcagttgggcgctgcgctggagcgtgaaggatcttctttactgggcagcgacgccggtgagctggccggagccgggaaaacaggcgttaccgtgcaaagcagcctcgatgcggtaaaagatgattttgatgtgtttatcgattttacccgtccggaaggtacgctgaaccatcttctgccccgaattacacttaaaacgactcaacagcttaacgttggcttgccacgcattacttga

SEQ ID NO: 131922 - DNA, 1628 bp, Homo sapiens
cttcgaagcgaaaatgcaggaactggcacaggtttccaagaaactgatggagatcgcccatcagcatcatgcccagcagcagacagccggtgtgatggcttctgccatcaacgcgaaagatggcaatgttgtcggcgctgaatttgaagaagtcaaagacaaaaaataatcgccctataaacgggtatattatactgacacgggcgaaggggaatttcctctccgcccgtgcattcatctaggggcaatttaaaaaagatgggtaagcaagattattgcgagattttaggcgtttccaaaacagcggaagagcgtgaaatcagaaaggcctacaaacgcctggccatgaaataccacccggaccgtaaccagggtgacaaagaggccgaggcgaaatttaaagagatcaaggaagcttatgaagttctgaccgactcgcaaaaacgtgcggcatacgatcagtatggtcatgctgcgtttgagcaaggtggcatgggcggcggcggttttggcggcggcgcagacttcagcgatatttttggtgacgttttcggcgatatttttggcggcggacgtggtcgtcaacgtgcggcgcgcggtgctgatttacgctataacatggagctcaccctcgaagaagctgtacgtggcgtgaccaaagagatccgcattccgactctggaagagtgtgacgtttgccacggtagcggtgcaaaaccaggtgcagatgcgccagggattcttcgctgtacagcagacctgtccacactgtcagggccgcgatttatcatcggattgaccagctgtatagcgttcagtgttcaggccgcaaatgttgatgagtacattactcaactccccgctggtgccaaccttgccctgatggtgcaaaaagtcggcgcgtcggcccccgctattgattaccacagtcagcagatggcgctgcctgccagtacccagaaagtgattactgcgctggcggcgttgattcaactcggccccgattttcgttttaccacgacgcttgaaaccaaaggcaatgtggaaaacggcgtacttaagggtgacttagtggcgcgatttggtgccgatccgacgttaaaacgtcaggatattcgcaatatggtcgcgactttgaaaaaatctggcgtcaaccaaatcgatggcaatgtgttgatagatacctccattttcgccagccacgataaagcccccggctggccatggaatgacatgacacaatgctttagcgctccgcctgccgccgccatagttgaccgcaactgtttctccgtctcgctctacagtgccccaaagcctggtgatatggctaaagtgagaactgtcgctgtaccccgctcttcagacggatctgcagctcatcgagatccgcttcgtagcgttcgatcttctcctgctgacgcagtgcggtttgcaccaggttcaggtgatcactggccgcctgataatccgcttccagatcgccttcggcaccgttgtgctctgccagctcacgcgccatatcgacgtgtttgtactgctcagccgccagttgctgacgcgaagtatgtagctcgcgacgaaactccagggctttgtcgagatggacacggcgctcgttggcgtga

SEQ ID NO: 131923 - DNA, 1326 bp, Homo sapiens
  misc_feature (1)...(1326): n = a,t,c or g
ttaatatccctgctcgaaatagctttcgagaataataaccgcagaggcagagtcaactttgcctttgttgagcgcccgatagccgccctgttcaaacagaccggaacgggcttccacagtgctaagacgctcgtcatggagctttacttcaacaccgaaacggccatgaatacggttggcaaatttacgcgctctggcagtcaatggttgctcggtgccgtccatattcagcggcaaaccgacgatgatttcgtccggctgccactctttcagtaaacgctcgataatgttccagtccggcgtaccgtccgtgttgtctgaaatgcgaatgctggaagcaaaattggagggcggagtatgcaaaataaacccgcgatcttcagccagcggaccgccgagcataaccggtttatccagacggattgattcatcacgcggctccggcgtgatcttcagcttttccagaatcccttcaattttgagattttccagcggcttgttgacgatgatccccattgcaccattggtattatgttcgcaaatgtagaccacggaacgacggaaaatcggatcccagacgtacttgtaggtcagtagatgattatttggtttctcttttgctggggcaaaggttaaaactggattgttctcaataaataagtaaatattgggttttttgaagagatcntttgatgggttatcaagggttttcagcgcggcatcagcctgcttgagctgtacctgaacgcgagcaagacgcagatttatcacggctttgagattttcatcgctcgtgtctgccagcccctgttgtaactgggcggcagctttctctagttcatttttgtcaacaaattgtgcggtaaccgcattttgataggcaagagaagcggagcgtgcagaatcaacctgatggctgttccagtagcgccagccaatcagtgcgccaacgcccaaaatcaccccaacagccagtgcagagcgcaaatccttcactactgctgtgccgttagccacttcagactcacccagcaccacagcaacgcgggcaccccatttatcagcacgggcaaactgtttcttaaagttgccgccgccgtggttggtcatcaatttcacgcccggtaattcatcacgcagacgctcagctaatgccatagccgcagattgtgtatcagcacctgaagccaccaggtatatatcgacaacaggatcggctttaaattccggattaacggcctgtactaacatacagacgttcgaggcccatagcaaaaccgacagccggtgttgcacgaccgcccagttgttccacaagaccgtcat

SEQ ID NO: 131924 - DNA, 331 bp, Homo sapiens
ctcggcgagcttttaccaaaaagctgttccatatcctgatcctggtagttggcgggatatcttcaatcacgtcatgcagcagcgccgccatcagcgtttcatagtcagtttcatctcggccagaatgcaggcaaccgctaccgggtgcgtgatatgggttcaccgcttgaacgtgtttgcccctcgtgagcatcacgtgcaacggatacgcctgccgcagacgcttgatttggtcttccggcagcggctcctgctcttgctgttcctggcgttcgcgaacgtcgaggatctggttgctgatcagaccttcttcgatttcgcacagcgcgag

SEQ ID NO: 131925 - DNA, 594 bp, Homo sapiens
atgagcctgatccgcactgaaaccagagacacaaaacgcgcagctgacccactgcacgacctgcgtagcaagccgttttctgagtggggcgaagatgaaatcaggcgttttaatctgatagacgcgcttcttgagtttgtctacacagacacatccagcccgttcggtatcggcatgaccttcgattacacggagtgctgggaaattggtgttcgtgacgactgcctggtaatgacacgcgttaagccggtgcatccagaatatgcgaagcactggaacatgaaaggcgtcatgaatgacaaaacccgcttccacgccgacaagtgggtagggtacagcaaggtgcttgcctgggtgagcttatcgcacaaagacaccttcacgggtgcgaaacggtttcaatacttccaaacgatgtacgacatggaacggcaaatcaacgcaaacctgccggttggcggccttcccaacgttgacacagagcgaactggcaaactgttccaacgcgatgacttttctgaggatagccatgccaacgatccgaagttggttggtgatgattacgtcccccaggcaccggagcaaatcaactga

SEQ ID NO: 131926 - DNA, 1197 bp, Homo sapiens
atgacgcttcatggcgatacgcgcatcgataattactactggctgcgggacgatacgcgttctcagccagaagtcctggactacctgcaacaagaaaatagttacggtcatcgggtgatggcctcacaacaagccttgcaggatcgcatcttaaaggaaatcatcgaccgcattccgcaacgagaagtttctgcgccctacatcaaaaatggctaccgctatcggcatatttatgaaccaggctgtgaatatgctatctaccagcgtcaatcggcattcagtgaagagtgggatgagtgggaaacattgctcgatgccaataagcgcgcagctcatagtgagttttattcgatgggcggaatggcgattacgcccgataacaccattatggcgctggcagaagattttctttcccgacgccagtacggaattcgttttcgtaatctggaaactgaacgtttcccaaatgacgtggatccgatcgaaactcgcgactggctccaggcgatcgaatcggtcatccgtgaagaaggtgttgagcgtgctcagtatctgatcgaccaactgcttgctgaagcccgcaaaggcggtgtaaacgtagccgcaggcacaggtatcagcaactacatcaacaccatccccgttgaagaacaaccggagtatccgggtaatctggaactggaacgccgtattcgttcagctatccgctggaacgccatcatgacggtgctgcgtgcgtcgaaaaaagacctcgaactgggcggccatatggcgtccttccagtcttccgcaaccatttatgatgtgtgctttaaccacttcttccgtgcacgcaacggggtaccgacataccaccttattgaagcagtggtcttcagatttcttactgctggttttcctctacttctaaagaaagcttcaggtgtgttttggaatgcggaatttggtcatcagctcatcgctggcgatcactttttccaccactttcaggcacatctggtgcagttcggcggtgacttcttccagcttttcaacctgggcgagggtcaacttgtagtaagcatcttcacaccagtacggctcgccgtacatggtgtgaaaattgaaaccgtattcgtgggctttctcacgccagtccgggcgctcggtaatactgactctttccatcggtatcagccacccattgaacgagaagag

SEQ ID NO: 131927 - DNA, 3405 bp, Homo sapiens
  misc_feature (1)...(3405): n = a,t,c or g
atgctgctccagacgccgcaacttactgctgtgacgcctgctgaaacaggttttcccacatatcggtcaccagcgcctgtggctggtaccacatccccgttgaagaacaccggagtatcgggtaatctggaactggaacgccgtattcgttcagctatccgctggaacgccatcatgacggtgctgcgtgcgtcgaaaaaagacctcgaactgggcggccatatggcgtccttccagtcttccgcaaccatttatgatgtgtgctttaaccacttcttccgtgcacgcaacgagcaggatggcggcgacctggtttacttccagggccacatctccccgggcgtgtacgctcgtgctttcctggaaggtcgtctgactcaggagcagctggataacttccgtcaggaagttcacggcaatggcctctcttcctatccgcacccgaaactgatgccggaattctggcagttcccgaccgtatctatgggtctgggtccgattggtgctatttaccaggctaaattcctgaaatatctggaacaccgtggcctgaaagatacctctaaacaaaccgtttacgcgttcctcggtgacggtgaaatggacgaaccggaatccaaaggtgcgatcaccatcgctacccgtgaaaaactggatacctggtcttcgttatcaactgtaacctgcagcgtcttgacggnccgccgttgggatgaactgctgcgtaaggataccagcggtaaactgatccagctgatgaacgaaaccgttgacggcgactaccagaccttcaaatcgaaagatggtgcgtacgttcgtgaacacttcttcggtaaatatcctgaaaccgcagcactggttgcagactggactgacgagcagatctgggcactgaaccgtggtggtcacgatccgaagaaaatctacgctgcattcaagaaagcgcaggaaaccaaaggcaaagcgacagtaatccttgctcataccattaaaggttacggcatgggcgacgcggctgaaggtaaaaacatcgcgcaccaggttaagaaaatgaacatggacggtgtgcgtcatatccgcgaccgtttcaatgtgccggtgtctgatgcagatatcgaaaaactgccgtacatcaccttcccggaaggttctgaagagcatacctatctgcacgctcagcgtcagaaactgcacggttatctgccaagccgtcagccgaacttcaccgagaagcttgagctgccgagcctgcaagacttcggcgcgctgttggaagagcagagcaaagagatctctaccactatcgctttcgttcgtgctctgaacgtgatgctgaagaacaagtcgatcaaagatcgtctggtaccgatcatcgccgacgaagcgcgtactttcggtatggaagggtctgtccgccagattgtcttaaggaactggaaaagtggcgatgtaccggagatcagccatgaaaacgagagcttaatcgtcaccttcagtgacagagttccgttacccagactggcgaacggtcatgcactgaaagaggctcagcgcagttgcggggccaacggtatgtgccggcatcgcgatgatgctggtgttaagttatcaacgactttgtgccaccacttcagtctacggaaaaagaagaagagtgggatccggcaatctggctggaagaactggctacccttcccgatgactacccgcaaacgcgcacaggcgctggtcgctaaaggcatcaccattgagttgttctgtgcgccgggtgaaattccctctgcccgcttaccgatgagcgatgtgcgtttttattcccgcagcagtattcgtttcgcccgttgtgattgtattgaaggcacactttgcgaacatgtcgtactggcggtacaggccttcgtcgaggccaaagcgcagcaagcagaatttaaccatttaatctggcagatgcgcagcgaacacgtcacatcatctgacgatccgtttgccagcgaagaaggcaacgcgtgtcgtcaatatgttcagcaattaagccagacattatggcttggcggcatcagccagccgctcatccattacgaggcagcattcaaccgcgcattgcaggcggcagagacctgcaactggcgctgggtgagtgaatcgctacggcaactgcgcgccagcgttgatgccttccacgcccgcgccagccactataatgccggagaatgcttacatcagcttgcggcattaaacagtcgattaaattgcgcacaagagatggcccggcgcgacagtattggtgaagttcctcctgtgccgtggcgcacggtcgttggctctggcattgccggagaagcaaagcttgatcatctgcggctggtgtctttaggtatgcgttgctggcaggatattgagcattatggtttacgcatctggtttaccgatcccgacaccggcagtattttgcacctttcgcgcagttggccgcgaagtgaacaggaaaactcaccggcagctacgcgtcggctgtttagttttcaggctggcgcactggcgggcgggcaaattgtttcacaagcagcaaaacgcagtgccgatggcgagctgctgttagctacccgcaaccgcttaagcagcgttgtgccgctgtcgcctgcggcggcgatcaaaaattcaaaatatcctaactcagtcacacgaagtgactatgtgcctatagaaccttcagttaaaaacctttttgccgtaaatgaattttatagaaataatgatgatttcataaaccctgatctacaagaacggttagtgatcggggattatagcatttcaatatttacttatgacattaaaggtgctaccagtggcttctgtttctatcagctgtccctcctgattcagctactgacggggtggtgcgtaacggcaaaagcaccgccggacatcagcgctatctctgctctcactgccgtaaaacatggcaactgcagttcacttacaccgcttctcaacccgccgggcagtgacgtcatcgtctgcgcggaaatggacgaacagtggggatacgtcggggctaaatcgcgccagcgctggctgttttacgcgtatgacaggctccggaagacggttgttgcgcacgtattcggtgaacgcactatggcgacgctggggcgtcttatgagcctgctgtcaccctttgacgtggtgatatggatgacggatggctggccgctgtatgaatcccgcctgaagggaaagctgcacgtaatcagcaagcgatatacgcagcgaattgagcggcataacctgaatctgaggcagcacctggcacggctgggacggaagtcgctgtcgttctcaaaatcggtggagcagcatgacaaagtcatcgggcattatctgaacataaaacactatcaataa

SEQ ID NO: 131928 - DNA, 1398 bp, Homo sapiens
atgtgtcacgtacgagttaacttgattctcttcgttggagatgccggtctaggcggtcgttatgacggtcttgtggaacaactgggcggtcgtgcaacaccggctgtcggttttgctatgggcctcgaacgtcttgtattgttagtacaggccgttaatccggaatttaaagccgatcctgttgtcgatatatacctggtggcttcaggtgctgatacacaatctgcggctatggcattagctgagcgtctgcgtgatgaattaccgggcgtgaaattgatgaccaaccacggcggcggcaactttaagaaacagtttgcccgtgctgataaatggggtgcccgcgttgctgtggtgctgggtgagtctgaagtggctaacggcacagcagtagtgaaggatttgcgctctgcactggctgttggggtgattttgggcgttggcgcactgattggctggcgctactggaacagccatcaggttgattctgcacgctccgcttctcttgcctatcaaaatgcggttaccgcagtgagcgaaggcaaaccggatagcatcccggcggcggaaaaatttgctgctgaaaataaaaatacttatggtgcgctggcttctttggaacttgcgcagcaatttgttgacaaaaatgaactagagaaagctgccgcccagttacaacaggggctggcagacacgagcgatgaaaatctcaaagccgtgataaatctgcgtcttgctcgcgttcaggtacagctcaagcaggctgatgccgcgctgaaaacccttgataccatcaaaggtgaagggtgggctgccattgttgccgacctgcgtggtgaagcattgctgagcaaaggtgataagcaaggcaaacaccagcgtgccgaaaactgtgagatacaaggatatatcgatatgataaagcacctggtagcacccctggttttcacctcactaatactgactggctgccagtcccctcagggaaagtttactcctgagcaagtcgccgctatgcaatcttatggatttactgaatccgccggcgactggtcgctgggcttatcagatgccattctgttcgcaaaaaatgactacaaattgctcccggaaagccagcaacagatccaaaccatggcagctaaattggcctcgacagggctaacacatgcccgtatggatggacacaccgataactatggtgaagacagttacaacgaaggcttatcattgaaacgggcgaatgtcgtggccgatgcatgggctatgggtggacaaattccacgcagcaatctcaccacacagggtttaggaaaaaaatatcccatagccagtaacaagaccgcccagggccgcgccgagaaccgccgcgtcgcagtggtgattactaccccttaa

SEQ ID NO: 131929 - DNA, 1579 bp, Homo sapiens
atgcctgatgaagaaaaccgatttaatgccctgaaagcggtttttagccagttaatgacagatgcgacgctgacgccgctgttcaactatcactatcgcattagtgcccctcccggcgtgaacggattatctatgaaacgtgctgtcgttgtgttcagtggaggtcaggattccaccacctgtctggtgcaggcattacaacaatatgatgaagtccattgcgtgacgttcgattacggtcagcggcatcgcgcagaaatcgacgtggcacgcgaactggcgctgaaactgggggcacgcgcgcataaggtgctggatgtcaccctgctcaacgagctggcggtcagtagcctgacgcgtgacagcattccggtgcctgattatgaacctgaagccgatggtatcccgaatacgtttgtcccagggcgtaatattttgttcctgacgctggcggcaatatatgcgtatcaggtaaaagcagaagccgtaattactggcgtctgcgaaacggatttctccggctacccggattgccgcgatgagtttgtgaaagcactaaaccatgcccataaagaaaagctggacgaagactgcaaacgccgcatgtacactaacccgctgcgcgtgctggattcaaaaaatccggaagtgcaggcgcttctcaacgacgctccggcattaggtgactatctggacgaggaatctcgtgagcattttgccggtctgtgcaaactgctggagagcgcggggatcgcttacaccgtaaaccagcgtctggccgttaatccggaatttaaagccgatcctgttgtcgatatatacctggtggcttcaggtgctgatacacaatctgcggctatggcattagctgagcgtctgcgtgatgaattaccgggcgtgaaattgatgaccaaccacggcggcggcaactttaagaaacagtttgcccgtgctgataaatggggtgcccgcgttgctgtggtgctgggtgagtctgaagtggctaacggcacagcagtagtgaaggatttgcgctctggtgagcaaacggcagttgcgcaggatagcgtagccgcgcatttgcgacgttactgggttaaggaaggagaaggacagcgtggaaatttacgagaacgaaaacgaccaggtagaagcggttaaacgcttttttgctgaaaatggcaaagcactggctgttggggtgattttgggcgttggcgcactgattggctggcgctactggaacagccatcaggttgattctgcacgctccgcttctcttgcctatcaaaatgcggttaccgcagtgagcgaaggcaaaccggatagcatcccggcggcggaaaaatttgctgctgaaaataaaaatacttatggtgcgctggcttctttggaacttgcgcagcaatttgttgacaaaaatgaactagagaaagctgccgcccagttacaacaggggctggcagacacgagcgatgaaaatctcaaagccgtgataaatctgcgtcttgctcgcgttcaggtacagctcaagcaggctgatgccgcgctgaaaacccttgataccatcaaacggtga

SEQ ID NO: 131930 - DNA, 2071 bp, Homo sapiens
ttaagtatggcacgcgtaactgttcaggacgctgtagagaaaattggtaaccgttttgacctggtactggtcgccgcgcgtcgcgctcgtcagatgcaggtaggcggaaaggatccgctggtaccggaagaaaacgataaaaccactgtaatcgcgctgcgcgaaatcgaagaaggtctgatcaacaaccagatcctcgacgttcgcgaacgccaggaacagcaagagcaggaagccgctgaattacaagccgttaccgctattgctgaaggtcgtcgttaatcacaaagcgggtcgcccttgtatctgtttgaaagccttgaaattgatgaccaaccacggcggcggcaactttaagaaacagtttgcccgtgctgataaatggggtgcccgcgttgctgtggtgctgggtgagtctgaagtggctaacggcacagcagtagtgaaggatttgcgctctgaacgtttcccaaatgacgtggatccgatcgaaactcgcgactggctccaggcgatcgaatcggtcatccgtgaagaaggtgttgagcgtgctcagtatctgatcgaccaactgcttgctgaagcccgcaaaggcggtgtaaacgtagccgcaggcacaggtatcagcaactacatcaacaccatccccgttgaagaacaaccggagtatccgggtaatctggaactggaacgccgtattcgttcagctatccgctggaacgccatcatgacggtgctgcgtgcgtcgaaaaaagacctcgaactgggcggccatatggcgtccttccagtcttccgcaaccatttatgatgtgtgctttaaccacttcttccgtgcacgcaacgagcaggatggcggcgacctgttttacttccagggccacatctacccgggcgtgtacgctcgtgctttcctggaaggtcgtctgactcaggagcagctggataacttccgtcaggaagttcacggcaatggcctctcttcctatccgcacccgaaactgatgccggaattctggcagttcccgaccgtatctatgggtctggcgagcaccctgaaacgtcgcgagcgcatctcggcccgtctgggggatattttaagccatctctacctcgcctctgtcgtgctgaagcgttatgactacgaaggccgtaatgaagccgacctggcgatagtgcactggggcgtacaacatgcgctgtatcacgctgaacaggcgatggatgatttactgcaaaacttccccaaccgcgtggttgccgggctgctgaatgtggtgatcttacctaccggacgtcattatctggcaccttctgacaagctggatcataaagtggcgaacattttacaagtgccgaacgccacccgttcccgcattggtcgcgggcagtacctgacgccgagcgagcataatccggttggcttgctggaacaaactctagtggatgtgattgccgacgacccaattcatcaaccggatctgaaaagagctggggaaaaacctgccgttacccgtctggatgaactggcgcacaacgcgcgaggatccccatccgcattgaaaccagagacacaaaacgcgcagctgacccactgcacgacctgcgtagcaagccgttttctgaacacatccagcccgttcggtatcggcatgaccttcgattacacggagtgctgggaaattggtgttcgtgacgactgcctggtaatgacacgcgttaagccggtgcatccagaatatgcgaagcactggaacatgaaaggcgtcatgaatgacaaaacccgcttccacgccgacaagtgggtagggtacagcaaggtgcttgcctgggtgagcttatcgcacaaagacaccttcacgggtgcgaaacggtttcaatacttccaaacgatgtacgacatggaacggcaaatcaacgcaaacctgccggttggcggcctttccaacgttgacacagagcgaactggcaaactgttccaacgcgatgacttttctgaggatagtcatgccaacgatccgaagttggttggtgatgattacgttccccaagcaccggagcaaaataactga

SEQ ID NO: 131931 - DNA, 2388 bp, Homo sapiens
atggagtcgggcgtggcgactcgtccgattgctgatttcgacgtctacatcgacaagctgactgagttcgtttacaaaaccaacctgtttatgaagccgattttctcccaggctcgcaaagcgccgaagcgcgttgttctgccggaaggggaagaggcgcgcgttctgcatgccactcaggaactggtaacgctgggactggcgaaaccgatccttatcggtcgtccgaacgtgatcgaaatgcgcattcagaaactgggcttgcagatcaaagcgggcgttgattttgagatcgtcaataacgaatccgatccgcgctttaaagagtactggaccgaatacttccagatcatgaagcgtcgcggcgtcactcaggaacaggcgcagcgggcgctgatcagtaacccgacagtgatcggcgcgatcatggttcagcgtggggaagccgatgcaatgatttgcggtacggtgggtgattatcatgaacattttagcgtggtgaaaaatgtctttggttatcgcgatggcgttcacaccgcaggtgccatgaacgcgctgctgctgccgagtggtaacacctttattgccgatacatatgttaatgatgaaccggatgcagaagagctggcggagatcaccttgatggcggcagaaactgtccgtcgttttggtattgagccgcgcgttgctttgttgtcgcactccaactttggttcttctgactgcccgtcgtcgagcaaaatgcgtcaggcgctggaactggtcagggaacgtgcaccagaactgatgattgatggtgaaatgcacggcgatgcagcgctggtggaagcgattcgcaacgaccgtatgccggacagctctttgaaaggttccgccaatattctggtgatgccgaacatggaagctgcccgcattagttacaacttactgcgtgtttccagctcggaaggtgtgactgtcggcccggtgctgatgggtgtggcgaaaccggttcacgtgttaacgccgatcgcatcggtgcgtcgtatcgtcaacatggtggcgctggccgtgctgtttgtcaacgcggatgaaaccacggtcgtcaacttccacgcctgctttgcctgcgtcgaggtttttaccgttcggcacacgaccaatcgctaccagcacggcgtcgtaacgctgcggttcagcgggtgcttttttgccttccatcgtcacataaatgccgtcttctttcgcttcaacatacaggcggtgtttgttgcgctgcgcccggaagtgatcgccatcatgcataaactgcgtgagcaggggcatcgcgtggtggtgctttccaataccaaccgcctgcataccaccttctggccggaagaatacccggaaattcgtgatgctgctgaccatatctatctgtcgcaagatctggggatgcgcaaacctgaagcacgaatttaccagcatgttttgcaggcggaaggtttttcacccagcgatacggtctttttcgacgataacgccgataatatagaaggagccaatcagctgggcattaccagtattctggtgaaagataaaaccaccatcccggactatttcgcgaaggacaaagccaggcaccgtacccgtccactatgggcctggctaaaactactctggcaacgcattgatgaggacaacatgacaaccctggcaggtaaccttgcctatgtgtcgttgctctcattagtgccgctggttgccgttgtttttgcgcttttcgccgcttttcccatgttttccgacgtcagcattcagttacgtcactttatttttgccaactttctgcctgctactggcgatgttattcagcggtatatcgaacaatttgttgccaattccaacaagatgaccgccgttggggcgggccagtctggcgatcagttcctatttgctctctttaattgccaatgttttgatgctgatgagctgaagcgtattaagaatgagctggaacccaaaatgggcatggagctcaatctggtacagctgattgcctataccgactggaatgaaacgcagcagaaacagccggatggaagctgggttaattacaactacgactggatgtttaagccgggtgccatgaaacaggtggcggaatatgcagatggtattggtccggattaccatatgttgattgaggagacatcgcagccgggtaatatcaaactcactggcatggtgcaagatgctcagcagaataaactggtagtgcatccttataccgtgcggtcagataaactgcctgaatacactcctgatgtgaatcagttatatgatgctctgtataacaaagcgggtgtaaatgggctgtttactgatttccctgataaggcagtaaaatttcttaataaagagtaa

SEQ ID NO: 131932 - DNA, 837 bp, Homo sapiens
tcatgcttcggcggcggttgaaattggtaacgtggcacaggtcactgcgctctttaccgacgagctgccgcccgctgcgctaaaatcacgcttacaacattcataagcctcttttctagctattttgtaatatacaatattttgctgttgatctacctgatatttgcggcatcgttttgcttgctggtcgtctgatgcattattacggttttcatcaccgtctgttccgctggcgacgtttcgggcatgagcgccacctggtgtgcgttcgttgccatcagcgtagaccacttcaccggtttcaatcgcttttaaagtataagttgaagaaatcggtttgccgggtaaatggtggtcgtcaccaattccggtaaaggccatcaatttctctcgatcggtaatcgcgactgcaccaatatccagttcctgatacagcacctgagccactttcatgctgttcacttcgttaaacccctggcgcaaaatgccttccgtcgaggctgccactttcagcgcagtggcagaaaaagccgaagtgtatttttcaaacatcgcgcgtttatcgagcaatatacgcataaacagcgccgcgccgacggtattggtgaccatcattggcgcagcaatattactcaccagacgcaccgcatcttcataaggtcgggcgatcgcaaggatgatcagcatttgcaccatttcagcgacgaacgtgacggcaccggcggtaatggggttaaagactttatcagtgcgcccgcggcggatcaggatgctgtgtaccaggccaccgagtaatccttcaacgatggtcgagatcatgcaacttaacgcggtcat

SEQ ID NO: 131933 - DNA, 1101 bp, Homo sapiens
atgatctctgcgattacgctaagagcgtcggtgtccgggattatgaccggtatcctgctggcgattgcccgtattgctggtgaaaccgcgccgctgctgtttaccgcgctctccaaccagttctggagcacggacatgatgcagccgatcgccaacctgccggtgacgatctttaagtttgcgatgagcccgtttgcggaatggcagcaattggcctgggccggggttcgtaatttgaacttctactacggcaaattccatgccctgaaaaacatcaacctggatatcgctaaaaaccagccggaagcgctggcgtttggtaaattccgcgaagtggttgagcaggaatatcgtgtcaagggtaaagatccggcaacgcttgactacgtggtgccgttcaaagtattcgaaggtaacggcccgaccaactccatcctgctgcgtgaaatcactccgttcagcctgggtgcgttgattgcgctgtatgagcacaaaatctttactcagggcgtgatcctgaacatcttcaccttcgaccagtggggcgtggaactgggtaaacagctggcgaaccgtattctgccagagctgaaagatgataaagaaatcagcagccacgatagctcgaccaatggtctgattaaccgctataaagcgtggcgcgtgccgctggttgccgttgtttttgcgcttttcgccgcttttcccatgttttccgacgtcagcattcagttacgtcactttatttttgccaactttctgcctgctactggcgatgttattcagcggtatatcgaacaatttgttgccaattccaacaagatgaccgccgttggggcgtgcgggctgatcgtcaccgcgttattgttgatgtactccatcgatagcgcgttgaataccatctggcgcagtaaacgagcgcgaccaaaaatttactcgttcgccgtgtactggatgattttaacgctggggccgctgctggcaggggccagtctggcgatcagttcctatttgctatccaagcaatgggctatcgatatcgattccgtcaatagattaggtgccattatcctaacggcactcattacaggtgacacataa

SEQ ID NO: 131934 - DNA, 1393 bp, Homo sapiens
atggctggcaagccggagtacgataaaactatctccacgtcgattgtgctcaatgcgctgaacgcgctcggcgtcagcgccgaagcgtccggacgtaacgatctggtggtgaaaaccgtcgaaggcgaccgcaaagtctcaggctcggcctatcgcgaaaccaaagatcgcggcttccaccacggcaccttgctactcaatgccgacctcagccgcctggcaaactatctcaatccggataaaaagaaactggcggcgaaaggcattacgtcggtacgttcccgcgtgaccaacctcaccgagctgttgccggggatcacccatgagcaggtttgcgaggccataaccgaggcctttttcgcccattatggcgagcgcgtggaagcggaaatcatctccccgaacaaaacgccagacttgccaaacttcgccgaaacctttgcccgccagagtagctgggaatggaacttcggtcaggctccggcattctcgcatctgctggatgaacgctttacctggggcggcgtggaactgcatttcgacgttgaaaaaggccatatcacccgcgcccaggtgtttaccgacagcctcaaccccgcgccgctggaagccctcgccggacgactgcaaggctgccttttctctctctacaatagcgatctcaatactgtcatcgacaacgtgctgcgtatttttccgttgctgttgtcgtggatctccttctggttgctgtacagcattgttcctaccatccgcgtacctaaccgcgacgcgattgtcggcgcgtttgtcgccgcactcctgttcgaagcaggaaagaaaggtttcgcgctttatatcaccatgttcccgtcatatcagctcatttatggtgtgctggcggtgatccccattctctttgtttgggtctactggacatggtgtatcgtcttgcttggcgcggaaattactgtcactctcggggaataccgcaaactaaaacaagcagctgaacaagaagaagacgacgaaccatgattgcattaattcaacgcgtaacccgtgccagcgtcaccgtggagggagaagtgacgggcgaaattggcgcgggacttttggtgttattgggtgtcgaaaaggatgacgacgaacagaaagcaaaccgtctgtgcgagcgtgtgctcggctaccggatctttagcgatgccgaaggcaagatgaatctcaacgtgcaccaggcggccggcagtgtgctgggtgttccccatttaccctcgccgcaaaaaccacacggcgcaaggccccccagttctcccagggggggctcccgggcccctctagagccctatgcggacctggtcaccctggccctgccctccgtcttgcgcgcacggtcttggccactcgctgcccg

SEQ ID NO: 131935 - DNA, 1954 bp, Homo sapiens
atgttcccggcacaggttcgcgcattaggcgttggtctgtcatatgcggtcgctaatgctatatttggtggttcggcggagtacgtagcgttgtcgctgaaatcaataggaatggaaacagccttcttctggtatgtgaccttgatggccgtgagaacatcaatccaaacatggcactgcgatcccggctttgagcctgatggtgaaggtgagcatattctggttagaatcctcaaaaacggctgcaatacccgttttgtggcggatgcactggcgaaattcctgaaaattcatgcccgtgaagtcagcttcgctgggcaaaaagacaaacatgctgttacggaacagtggttatgcgctcgcgtgccgggcaagggaatggcccgatcttggagcgccctttttcacctgggccagggcttggccaggttggctggaggtattccgcggggacaaagcaatatagaaggagccaatcagctgggcattaccagtattctggtgaaagataaaaccaccatcccggactatttcgcgaaggtgttatgctaaaaaccattcaggacaaagccaggcaccgtacccgtccactatgggcctggctaaaactactctggcaacgcattgatgaggacaacatgacaaccctggcaggtaaccttgcctatgtgtcgttgctctcattagtgccgctggttgccgttgtttttgcgcttttcgccgcttttcccatgttttccgacgtcagcattcagttacgtcactttatttttgccaactttctgcctgctactggcgatgttattcagcggtatatcgaacaatttgttgccaattccaacaagatgaccgccgttggggcgtgcgggctgatcgtcaccgcgttattgttgatgtactccatcgatagcgcgttgaataccatctggcgcagtaaacgagcgcgaccaaaaatttactcgttcgccgtgtactggatgattttaacgctggggccgctgctggcaggggccagtctggcgatcagttcctatttgctctccctgcgctgggcgagcgatctcaatactgtcatcgacaacgtgctgcgtatttttccgttgctgttgtcgtggatctccttctggttgctgtacagcattgttcctaccatccgcgtacctaaccgcgacgcgattaaagctcatgaccaatttctagccgaccttgcgagcattctaccgagtaacaccacaccgctcattgtcagtgatgctggctttaaagtgccatggtataaatccgttgagaagctgggttggtactggttaagtcgagtaagaggaaaagtacaatatgcagacctaggagcggaaaactggaaacctatcagcaacttacatgatatgtcatctagtcactcaaagactttaggctataagaggctgactaaaagcaatccaatctcatgccaaattctattgtataaatctcgctctaaaggccgaaaaaatcagcgctcgacacggactcattgtcaccacccgtcacctaaaatctactcagcgtcggcaaaggagccatggattctagcaactaacttacctgttgaaattcgaacacccaaacaacttgttaatatctattcgaagcgaatgcagattgaagaaaccttccgagacttgaaaagtcctgcctacggactaggcctacgccatagccgaacgagcagctcagagcgttttgatatcatgctgctaatcgccctgatgcttcaactaacatgttggcttgcgggcgttcatgctcagaaacaaggttgggacaagcacttccaggctaacacagtcagaaatcgaaacgtactctcaacagttcgcttaggcatggcaagtttgcggcattctggctacaccataaccacgggaagactcactcgtgggttggacccgcttatcccaatctttctcacatg

SEQ ID NO: 131936 - DNA, 1776 bp, Homo sapiens
gggccttcagcggcgtccttgtggctgattttcgtgctgattatcggtaccaagcgttggggcgattaagagcgatggcgcggtgatggagtttgatgtaaacgaagctaacgtggtaaaaccgaaaatggcgcacgcgagaaatattgtggctggtcgccggtcacactaagtatcatccttgggcggcggttgaaattggtaacgtggcccaggtcattgcgctctttaccgacgagctgccggcccgctgcgctaaaatcacgcttacaagacagccaaattgaaatcattcttccccaggaagacgcgtagatttttgtgaccgttaacctggcttcataccttgccacatagccaaacccatcctttcccgctacagttaatttcttgtggcgcgaaaggaggcaaaaatgctctatatctttgatttaggtaatgtgattgtcgatatcgactttaaccgtgtgctgggagcctggagcgatttaacgcgtattccgctggcatcgcttaagaagagttttcatatgggggaggcgtttcatcagcatgagcgtggggaaattagcgacgaagcgttcgcagaggcgctgtgtcatgagatggctctaccgttaagctacgagcaagttctctcacgggctggcagccgtgtgtttgtcgcgctgcgcccgaaagtgatcgccatcatgcataacctgcgtgagcaggggcatcgcgtggtggtgctttccaataccaaccgcctgcataccaccttctggccggaagaatacccggaaattcgtgatgctgctgaccatatctatctgtcgcaagatctggggatgcgcaaacctgaagcacgaatttaccagcatgttttgcaggcggaaggtttttcacccagcgatacggtctttttcgacgataacgccgataatatagaagggagcaaatcagttgggcattaccagtatcttggtgaaagataaaaccaccatcccggactatttcgcgaaggacaaagccaggcaccgtacccgtccactatgggcctggctaaaactactctggcaacgcattgatgaggacaacatgacaaccctggcaggtaaccttgcctatgtgtcgttgctctcattagtgccgctggttgccgttgtttttgcgcttttcgccgcttttcccatgttttccgacgtcagcattcagttacgtcactttatttttgccaactttctgcctgctactggcgatgttattcagcggtatatcgaacaatttgttgccaattccaacaagatgaccgccgttggggcgtgcgggctgatcgtcaccgcgttattgttgatgtactccatcgatagcgcgttgaataccatctggcgcagtaaacgagcgcgaccaaaaatttactcgttcgccgtgtactggatgattttaacgctggggccgctgctggcaggggccagtctggcgatcagttcctatttgctctccctgcgctgggcgagcgatctcaatactgtcatcgacaacgtgctgcgtatttttccgttgctgttgtcgtggatctccttctggttgctgtacagcattgttcctaccatccgcgtacctaaccgcgacgcgattgtcggcgcgtttgtcgccgcactcctgttcgaagcaggaaagaaaggtttcgcgctttatatcaccatgttcccgtcatatcagctcatttatggtgtgctggcggtgatccccattctctttgtttggtgctactggacatgggtaccgagctga

SEQ ID NO: 131937 - DNA, 1087 bp, Homo sapiens
  misc_feature (1)...(1087): n = a,t,c or g
agatatantctcaaagagcaagacgggacgggggggaacggaacgagataaccgacccacggagggacacgggactaagaggagagcgcgtcagggatgagggaggtagataatagggatcctcacgtaaggtggtgagcagcggaaagcggagcgggagaggaggcgggacgacgagggaggagtcggagtggacgaggacgctagggacgcattcgatcgggccgggcggccattcgtcatatcaactgggagaaggagcgagggaaggggagcgagtgcgggagcgcgggcgaccgttgaggcaggtctggaaagagaaagcgtgactggagctggggtcagtggagggtgctaccgtcgcgtaagaggcgcgctaggcgggggcggcgccagcggagtagaagatgtagacgtcagtggaaaccaggggtgaaattccgaggatgtgtgcagtgcgcaggcgcgtaaagaagcctgaagtaaggggatgttcataggagagcgcgaataccaggtctgtggtgaagccgacaaagggaagtagagtcccggggcggggcttcaatccattttcatgccgcgttatgcgaggcaatcaccatgttttatccggatccttttggcgtcatcatcattggcgggggtcatgcaggcaccgaggccgcgatggccgcggcgcgtatgggtcaacagactctgcttttgacacacaatatcgacactctggggcagatgagctgcaacccggcgatcggcggtattgggaagggacatctggtaaaagaagtggatgcactcggcggtctgatggcgaaagcgatcgatcaggcgggtatccagtttaggatactaaacgcaagcaaaggaccggcggttcgcgctacccgagctcaggcggatcgtgtgctctaccgtcaggcggtacgtacggcgctggagaaccaaccgaacctgatgatcttccagcaggcggttgaagatcttattgtcgaaaacgatcgcgtggtcggtgctgttacccaaatgggactgaagttccgtgccaaagccgtcgtgctcaccgttgggacgttccttgtcggta

SEQ ID NO: 131938 - DNA, 384 bp, Homo sapiens
  misc_feature (1)...(384): n = a,t,c or g
atgtggatggtgctgttacaagaaaggggtccagatccagacaccaagagggggttcttggatctcacacaagaaagaattcagggnccgatcgacatggtgatgccgctgaccaccccgagaatgaacatcgccgccgagaacagcgccaggctgtggctgaaccgtaggccggataaggcgtttacgccgcatccggcatccgagcaccattgcctgatgcgacgcttacgccaaccggttggcgttactcactacggtaatcgacgagagcgccattgccgctccggcaactaccgggttaagcagtgttccagtgaacggccacaaaataccggcggcgaccggaataccgatactgttgtagataaacgcaccgagcag

SEQ ID NO: 131939 - DNA, 1385 bp, Homo sapiens
atgagggatcgacttggatccccgcagttcggtatatccggtgttcgcgcgggtggtactaatagacgcatggcgcggatgatatccatcccgcctgccagcagcagttccagcatgttatccatacgaactggagtcagagccggtttcgttgacgaacggtgcggcgtcgtgcaggtcagggataagcggtgtctggaatttataagtacgcgcacgcgcccattggcggttaccggtgatggtgttgatttcaccgttatgcgccagatagcggaacggttgcgccagcggccagcgcggtacggtgttagtggagaagcgctggtggaacaggcaaatggccgattccagacgcaggtccgcaagatcccgcactatacgcggcctgaggtgttagaagggatggaagttccgccagtgttactgtcgggcaaccatgccgagatacgtcgctggcgtttgaaacagtcgctgggccgtacctggcttagaagacctgaacttctggaaaacctggctctgactgaagagcaagcaaggttgctggcggagttcaaaacggaacacgcacaacagcaacataaacatgatgggatggccaacattattaagcaacttgaacaagagcagatgaagcaggacgtaccttccttccgtccgggtgataccgtggaagtgaaagtatgggttgttgaaggttccaaaaaacgtctgcaggcattcgagggcgtggttatcgctattcgtaaccgcggtctgcactctgcattcactgttcgtaaaatttccaacggcgaaggcgttgagcgtgtcttccagactcacctgcgttgccggattatcaataatggcattgatatggcaactgaagcgattctggcggacttgcctccggtgcgcgaaacccagggcaagccgaaaatcgcggtggtggcgcatgatctgcgttacgacggcaaaactaaccagcaactggtacgcgagatgatggcgctgggcgacaaaattgaactgcatacctttggtaagttctcgccgttcaccgctggcaacgtggttaatcacggctttgaaaccgacaaacgtaagctgatgagcgcgctcaatcagatggatgcgctggtattcagttctcgcgtcgataactacccgctgattttgtgtgaggcgctatcgattggcgtgccggtgattgccacccatagcgatgcggcgcgggaagtgttgcaaaaatccggcggtaaaaccgtcagcgaagaagaggtgctgcaactggtgcagttaagcaaaccggaaatcgcgcaggcgatatttggtaccacgctggctgagttcagccaacgcagccgcgccgcctacagtggacaacagatgctggagga

SEQ ID NO: 131940 - DNA, 1821 bp, Homo sapiens
tcagagagccttgggccagagttccaggggctctgggagtggctgccaggtgagttggacagtccaatctccagtggggtcccgcacagatgggatgcggcttaggaggaatcctgggctgcaggtactccttggtctggtgaccagatttctggcacttgcagcaagctccattgtcaggtccggcagataattctttttgacgtcgttttcgacgtactggccggagtacaccacgattgccacatcgccaaacatccccttgtatgaaacagccatacccaggtctttcacggcagtttccagctcagagttagaaccacgacgcgtatccagcttcttctcaacagccttgaaggaacggaacagcgcccagcctttcggatcgaacacaatgatgttgaccacaccgctggcgttgagcgcgtaggcttcaatgtcatcggtcgggtcatacgtttctttgtcgcgggttgaccatgcagccgcaccggcctggacaatgttgttaccagcgctgcggcccatatcgacttcaacaggctcgaacgcttccccggtcatggtgtatttaccgctgagcaccgccgaaacagcctgtttctcttcgacctgagcaatcgccagctcttcatccttcatgttctgaaggataatgcggcgacggcgatagaccgggtcagcgagattctgcggatcctcatccggcaggcggcggagagtcatcagtgggttaacttcgtgtttcggcttcacataacccggcgtgaattcagacgtgctgccgccacgggagcggatcactttgccggagacaatcggcgagacgtaaagcgccatattgaccaggccaggaatttgcgacaggtaaaccttctctgtactgaagggataggtttcgcggaaaaagatacgcaggaaaagcggatcgaatttgaatttcttctcattgaccgccagcagttgggcagtggtgtaaacggacatagatttttcccgtaaaaaaagccgcgcaagcgggatgctgattgcagtaccggcgaacgcgttacgtttaatgttgtcgtcggtgacggcagatggccagaggacatcttcaatacggaaagagccagatttgtaatatgccagttccgcgctgttctggtctgcggttacagccaggatgcccattgccgcgccagcatgagcaccatcccagacggtcagcttgccagaagtggcatccagcatgagcggcgtcatggctggagtggaagccgtcagttcgccaggaccatacgcagtgtgcgccgggtcgctgttaccgagcggctggttatgtgtgaaaacttcagtaattgccatgatagcctctgcttggagtgcaccgggtgctgtttccatcaaacgatccagcgccgtatcggtacgcatctgggcactttgcggtgcagcagccagaatgcgctgtgcgctctctaccgtcatacccggcgtttcggcaagtgttggcgcctgtgactcacgccctttagcctcgtcgcagttcaggatgcccatgatgcgactattctctgcagctactgctgcagtaacctgcgcactgacatctacaggggctgctacggaagcaattgtcgtgtcaacggtagtggcctgttcagctgatgcagttgtctgagttgctgcctggtcaacatgtactcctctaagttttgccagcgcggtccttccgccccgtggtgaagactctactctaccggttgggtgaccaactctcccagttctattattgacatccccagtgggtagtctcaggcaactcgttgaactgctcat

SEQ ID NO: 131941 - DNA, 2502 bp, Homo sapiens
atggggccaggccttgcacaaagatactccttcagagctcatctcataaaaatccctggggcaggccctacttcaccagagcccaacgtacagcggcagctggcagagaaagtgcagcccacatggatgctctcgcaggttagagttgagagcctgcagattttccatgctgaaattgcaaactgctggtggttctaccattctcaggtctggagacttccttcccacagctccactcagcagggccctgagtccggccgggaggactgcgggcagctgggacagaagtgtttggagaccgccgagtgcatccacttcttttaccagatgtcccttcccaataccgccgatcgccgggttgcagctcatctgccccagagtgtcgatattgtgtgtcaaaagcagagtctgttgacccattacgtcgcgcgccatcgcggcctcggtgcctgcatgacccccgccaatgatgatgacgtcaaaaggatccggataaaacatgaaagctgctgctccaccatgccgcccatggtcatcacctgcgtgcggatactttccagttcggcgtttatcgggccgtccggctgcggtaaatcgacgctgctgcgtaccttcaacaaaatgtttgaactgtacccggagcagcacggcaatggcaccaaaaccggcgaccagattatcgctgccactcaccagaatctcgaacagcgagtgcaggaaggtaagttccgtgaggatctgttccaccgcctgaacgttatccgcgttcatctgccgccgctgcgcgaacgtcgggaagatattccccgtctggcgcgccattttttacaggttgccgcgcgcgaactgggcgtagaagcgaagttactgcatccggaaaccgaagctgctctgacgcgtctggcggccatcaccgttagccagcggcaggctgttgagaagaagctggatacgcgtcgtggttctaactctgagctggaaactgccgtgaaagacctgggtatggctgtttcatacaaggggaatcactctaccgggagcgaaatcatgatcaagattggcgttatcgtcgatgattttaccggcgcgacggatatcgccagttttctggtggaaaacggtctaccaacggtaaaagtgagtctggaagacacgctcaacgccttcgccgttggaaattttacgaacagtgaatgcagagtgcagaccgcggttacgaatagcgataaccacgccctcgaatgcctgcagacgttttttggaaccttcaacaacccatactttcacttccacggtatcacccggacggaaggaagcgggaatatttatcagcattaccttaatgaatataaagttaagccagtaattcacaacaaagattggcgattcaagcggtttgccgtagaattaccgccctcattaagagtcatcaaggtggttaaccacaaaccccgcatcggtctggaaactgttgattccggacgcatcatgctggataacgaggacatcacccacgttccggcggaaaacagctatgtgaacactgttttccaaagctacgcacttttcccccacatgaccgtgttcgaaaatgtggcatttgtacaacttatggcacaggtttgcaggcctgataagacgcgtaagcgttgcatcaggcaatggtgctcggatgcaggatgcggggtaaacgccttatccggcctacggttcaggcacaagtttgtaggcctgataagacggatgaagcgatgttttggccttacgcgaccttttttgcacgctattcacggcgtgccaaatattcatggtcgctaccagcagttcgatgataatccgttcaagcaggtagcgcaaaatccgttggcgacgtttagtcttgacgttgacactgcgagttatgcgactgtaaggcgtttcttcaatcaagtgctgttacgtccgccagacgctgtgcgggtggaggaaatagtcaattatttcccgtctgattgggatatcaaagacagacaatttattccggcctctaagccaatacctttcgctatgcgctacgaattggcacctgcaccatggaatgaacagcgaacattgctgaaagttgatatcctggcgaaagatcgcaaaagtgaagagttaccagcttctactctggtctttcttatcgacacttctggttcaatgatttctgatgaacgtttgccacttatccagtcttcgttgaaattattggtcaaagaacttcgtgagcaggataacattgccatcgtgacctacgctggcgactcccgtattgcattgccttctatctccgggagtcataaggcggaaattaatgccgcaattgattcgctggatgccgaaggcagtaccaatggaggtgccgggctggaactggattatcagcaggcgacgaaagggtttattaagggcggcatcaatcgcattttactagacagtgaggggtcctctaaagtggacccgcaggcatgcatgcattag

SEQ ID NO: 131942 - DNA, 1698 bp, Homo sapiens
ttattcgtggcgcgcagtatgtcgcatcctggggcacatagtagcgacaaagcggtatacacggcagtgtgccccatacgatttttcttttcgccttttctttacaccatttacaccggtctgatggctgcgggagcctgccacaatccggtcatagtccattgcctgtgtcagcatggaggcatacagggggacttctgcacgataagcattttcactgcgcagataccagctctcatcactgtcccggttgagggagtagttaaaggcaccggcctgcagcctgttcccccttgttttggcatcttcagcagaaacgttgattcctgaaataccctgcagggctttaaaatccactttttccatatcgatagtcacgttttcctgcgcgtaggtatcggtataggttaatttttcttcaacacccgcgatgtttttgtatttggcgcttaacggctcaagtgtcttggcagcatcttctttggtggttgcaccaatggaggcaaattgaattttggtttcagaagattgcttaagcaccttgtcacctttgtagacataggtaatggcaatttcagtgccgttcagattggcgctgaatttcttcgattcttctttgtcaccgcagccagcaagagagaaaccagacagatgcaacaacgagggaaacagcgggctttccgtctgttcgtcgatggcgaaaacattatcgacgccgactaccgtctgttctacgtccatcgcggcatggaaaaactggcggaaacccgtatgggttataacgaagtgaccttcctctctgaccgtgtgtgcgggatctgcggctttgcccacagcaccgcctacaccacgtcggtggaaaacgcgatgggtattcaggtgccagaacgtgcgcagatgatccgcgccattctgctggaggtagaacgcttgcactcgcatctgctcaaccttggcctggcctgtcactttaccggcttcgactccggctttatgcagttcttccgcgtgcgtgaaacctccatgaaaatggcagagatccttaccggtgcgcgtaaaacctacggcctgaacttgatcggcgggattcgtcgcgatctgctgaaagacgacatgatccagacccgccagctggcacaacagatgcgtcgtgaagtgcaggagctggtggatgtgctgctgagcactccgaacatggaacagcgcactgtcggcattggtcgtctggacccggaaatcgctcgcgacttcagtaacgtcggcccgatggtccgtgccagcggtcacgcccgtgatacccgcgccgatcacccgtttgtcggctatggcctgctgccaatggaagtccacagcgagcagggctgcgacgttatttcccgtctgaaagtgcgtatcaacgaagtctataccgcgctgaacatgatcgactacggtctggataacattccgcaccgctttgcgctgggctttgccgaagcgccgcgcggcgatgatatccactggagcatgaccggcgacaaccagaagctgtaccgctggcgctgccgtgccgcgacctacgcgaactggccgaccctgcgctacatgctgcgcggcaacaccgtttccgatgcgccgctgattatcggtagcctcgacccttgctactcctgtaccgaccgcatgaccgtggtcgatgtgcgtaagaagaagagacat

SEQ ID NO: 131943 - DNA, 1668 bp, Homo sapiens
atggattaccacgcgctgaatgcgatgcttaacctctacgatagcgcaggtcgcattcagttcgataaagaccgccaggccgttgacgcctttattgcgacgcatgtgcgtccgaacagtgtgaccttcagtagccagcagcagcgcctgaactggctggtcaacgaaggttactatgatgaaagcgttcttaatcgctactctcgcgactttgtcattacgctgtttacccacgcacacaccagcggttttcgtttccagacattcctcggggcatggaagttttacaccagctatacgttgaagacattcgacggtaaacgttatctggaagattttgccgatcgagtaacgatggtggcgctgacgctggcacaaagcgatgagacgctggcgttgcaactgaccgatgaaatgctgtcaggacgctttcagccagccacgccaacattcctcaactgcggtaagcagcagcgcggcgaactggtttcctgttttttgctgcgtattgaagacaatatggagtcgattggtcgggcggtaaattccgcactgcagctgtcgaaacgcggcggcggcgtacatttttgctgtcgaatctgcgaaaagcgggcgcgccaattaaacgtattgaaaatcaatcttctggcgcgcgcctgcggattgcgaaccgcagttcgtcagtcagcaaaagttcagttcggcgactatcaggctaacggcatgatggcagttgctaaaaaactgggtatggcaccgcgacaattagcagagcaggtgctgactcatctggatcttaacggtatcgccagcaaagttgagatcgccggtccaggctttatcaacattttccttgatccggcattcctggctgaacatgttcagcaggcgctggcgtccgatcgtctcggtgttgctacgccagaaaaacagaccattgtggttgactactctgcgccaaaccgggggttttttggggggggggccccgctaggtacgaccctccaagatctcactcgcccaacaaaggaagacggacttcaggcaaaaccaatcagcttttgggccagctttgctttgcagtttgtgaacgtcaaaatcattttgtacggtgttacggcactgtcgacgtttgttctgccgcaaacacaggcgttaagctgggtagttggcgtcagcgttttgctggcgatgattgggacgtttggcaatgtgtgctgggcgctggcggggcatctgtttcagcgattgtttcgccagtatggtcgccagttaaatatcgtgcttgccctgttgctggtctattgcgcggctttcagtaaaggtacgagcgataacgtcgcgctgctgttccggagtcagagagttaaagcgaactgcataaccggatacacggatggtcagctgcggatatttttccggatgcttaactgcatcttccagagtttcgcgacgcagaacgttaacgttcaggtgttgaccaccttcaacgcgaacttctggtttcacttctactggaacttcacggtattcaatgtcacccagtttgcttactgcaaccacttcatcttctgcataacctgcttttgcaacgatgcaacgccgttcgcctttttcgctgtccagcagccagaaagagttcaccgaaagacagcgatactgttgtag

SEQ ID NO: 131944 - DNA, 1202 bp, Homo sapiens
ctagaggatccccaaaccgttgagcggcatatccggcgcgtcggtttccagcaataacgatgccagcggtaattttgcgatgacatcgcgggttttactggcgcgtggataggtgatagtaccgcctacgccaattttgtagcccagctgtacaaaccgttcggcctgttgcaggctgccggaaaaaccgtgaaccacgccagtgcgcggtaaatcgtggcgtttaagatgcatcgccagtttgtcgtgcgtgcgccgtgaatgcaggatcaccggcagatcgtagcgtttcgccagtttcagttgttcgtcgagtaaccactgctgcctctcaaattgcggatcgtcgccaaagagatccagaccgatctcccccaccgccaccaccttcgccggacgcctttccagcgcctgctgtagctgctcaagagacacatcgctatgtttttccaacataccaggatgcaagcccaatgcggcatacagcggttgataattttccgctaatgccaacacacgggcaaaattttccgcctctgttgccggaacaatgatcttgcctacgcccgcttgtgccgcgcgttgcaggctggcctcttcatcgccaggagcgtcggttcacttgggcaaccagcgtatcgttggcgactggcgcaggcggaatgacaatcgattccggcgtcaccactggcaccagatggcgggtaagcggcgctttttcagttaatagcttgccaaccgtggcgaggaaataacgaccgcataaacgcccaagtttatagtcttcacgcagcgccggaatccgactgccaagcgcgatactatgtaatggcttcggcggataaatttcgaatatccgcagcttgcccggtggtttctcaataaattgctgaatgtcacgatagctggtttcatgatgctgcaccagattgaccagcggctgcaggctactgtcacccagccagcgttccatgcgtttgaaccactggggcgtgtaatacatttgtgacggcacagtgcgaatgacgaccaacgttttagcgccctgccttgccgcctctttaaccggaatcgcatcacctgatcccgccatccaagtaggtaatcgcctttccacgaccctccgctacgaataaagcccggtatccgcactggaagccccaatcacatccacccagttacggtccggacgcaaaacaacc

SEQ ID NO: 131945 - DNA, 2866 bp, Homo sapiens
atgttaggggccgcagaggccctgctcttccggctacagacagcacttcaagcccagaaccgcaggcccttcctgcctcatgagggcctgggccttgcagagctgtcccagtgctgggcagggctggagtgggcagaggctgcaaggagccaggccctgcagcagaggctactgcagctgcagcggctagaaaccctggcccggcgcttccagcacaaggcagccctccgggagagtttccttaaggatgcagagcaggtgctagaccaggccagagccccgccagccagcctggccacagtggaggcagccgtccagaggctgggcatgctggaggctggcatcctgccccaggaggggcgcttccaggccctggctgagatcgcagacatcctccggcaggagcagtaccacagctgggcagatgtggcccgcagggtcgaggagccaggctacgcagagagccagcctctgcaaggacaggtggagacactgcaggggctgctgaagcaagtacaggaacaagtggcccaacgggcccggcgccaggctgagactcaggcccggcagagcttcctgcaagagagccagcaactgctactgtgggcagagagtgtccaggctcagctgcgcagcaaggaggtgtcagtggatgtggcctcggctcagcggctgctgagggagcaccaagacctgctggaggagatccacctgtggcaggagagaggtttccagctggtaaagcaacaccccaaagatcccgtgacagtttatggctgcgaccctcactggctagggagtcttccttgctgcaaagccaacgttccatcttctccactgagctcagaaacagctgagaacaaaggaaaaggcaagagacagtcggtggagggtccagccactgcagttggagtgactgttccagtggcacagactggagatggagtgcagttcacacggacacaccacgtggtgctgaagacgaccctctatgacatggatgtggagcccagctggaagtacacggctatcggctgccaggaccgaaatattcggatatttaacatcagcagtggaaagcagaagaagctgtttaaagggtcacagggtgaggacggcacactcattaaggagaaagccacgagcctccccaacaatgtggcacgggacctgtgtgggctggaggcgcagctgataagccaccaggggctggagcgagaactcgtgggcaccgagcggcagagtgggcacatgcctgccgtgcgggtttgggacgtggcagagcacagccaggtggccgagctgcaggagcacaagtatggtgtggcttgtgtggccttctctcctagcgccaagtacattgtctctgtgggctaccagcatgacatgatcgtcaacgtgtgggcctggaaggaattaggccaaacaagcccggggacaccctttaaacccagccccaaattaaatgacagtgtggccttaattggccaccgcatcgctcacggcggcagtatttttaccgagtccgtcattattaccgatgaagtcattgataatatccgtcgcgtttctccactggcacccctgcataattacgccaatttaagtggtattgaatcggcgcagcaattatttccgggcgtaactcaggtggcggtatttgataccagtttccaccagacgatggctccggaagcttatttatacggcctgccgtggaaatattatgaagagttaggtgtacgccgttatggtttccacggcacgtccgcaccgctatgtttcccagcgcgcacattcgctgctgaatctgacggaagatgactccggcctggttgtggcgcatcttggcaatggcgcgtcaatctgcgcggttcgcaacggtcagagtgttgatacctcaatgggaatgacgccgctggaaggcttgatgatgggtacccgcagtggcgatgtcgactttggtgcgatgtcctgggtcgccagccaaaccaaccagagcctgggtgacctggaacgcgtagtgaataaagagtcgggattattaggtatttccggtctttcttcggatttacgtgttctggaaaaagcctggcatgaaggtcacgaacgcgcgcaactggcaattaaaacctttgttcaccgaattgcccgtcatattgccggacacgcagcttcattacgtcgcctggatggaattatattcaccggcggaataggagagaattcaagcttaattcgtcgtctggtcatggaacatttggctgtattaggcttagagattgatacagaaatgaataatcgctctaactcctgtggtacggactggaaaaacgaaattaatgtccgcgattttattcaacataactatacaccgtatgaaggcgatgaatctttcctcgccgaagcgacgcctgccaccacggaattgtgggaaaaagtaatggaaggcatccgtatcgaaaatgcaacccacgcgccggttgatttcgataccaatattgccaccacaattaccgctcatgatgcgggatatattaaccagccgctggaaaaaattgttggcctggcaacggatgcgccgttgaaacgtgcgctacacccgttcggtggcattaatatgattaaaagttcattccacgcctatggccgagaaatggacagtgaatttgaatatctgtttaccgatctgcgtaaaacccataaccagggcgtatttgatgtttactcaccggatatgctgcgctgccgtaaatctggcgtgctgaccggtttaacaagatggctatgggccgtgggcgcattatcggggactaatcgccgggaaaagtttgctgaccactgttctgatgaattccttggttga

SEQ ID NO: 131946 - DNA, 1479 bp, Homo sapiens
atgggtacccgcagtggcgatgtcgactttggtgcgatgtcctgggtcgccagccaaaccaaccagagcctgggtgacctggaacgcgtagtgaataaagagtcgggattattaggtatttccggtctttcttcggatttacgtgttctggaaaaagcctggcatgaaggtcacgaacgcgcgcaactggcaattaaaacctttgttcaccgaattgcccgtcatattgccggacacgcagcttcattacgtcgcctggatggaattatattcaccggcggaataggagagaattcaagcttaattcgtcgtctggtcatggaacatttggctgtattaggcttagagattgatacagaaatgaataatcgctctaactcctgtggtattccggtgaatattcaggctcttctctcagaaaaagtccgtcaggccatgattgcggcaggcgcgcctgcggattgcgaaccgcaggttcgtcagtcagcaaaagttcagttcggcgactatcaggctaacggcatgatggcagttgctaaaaaactgggtatggcaccgcgacaattagcagagcaggtgctgactcatctggatcttaacggtatcgccagcaaagttgagatcgccggtccaggctttatcaacattttccttgatccggcattcctggctgaacatgttcagcaggcgctggcgtccgatcgtctcggtgttgctacgccagaaaaacagaccattgtggttgactactctgcgccaaacgtggcgaaagagatgcatgtcggtcacctgcgctcctacattattggtgacgcagcagtgcgtactctggagttcctcggtcacaaagtgattcgggcaaaccacgtcggcgactggggcactcagttcggtatgctgattgcattgctggaaaagcagcagcaggaaaacgcccgcagcgcgagttcccggtgggcgtgggctccgcggaccccgcactcggagcctgcggctggtccccagcggcctgggcatgaaatcaaaatggcagtgggtgtcgataaaacggcaaatcaagccagatcctcattgttaaatgtcgggtcgttcgcctgcggagcgtcgctcacttcggcaaccagcgtatcgttggcgactggcgcaggcggaatgacaatcgattccggcgtcaccactggcaccagatggcggaacttgaggcctattacttttttaccaacgctgaccctccggatcgtcttatggcatctgccacctcgcacttcgttccgtagagctcgagctgacacaaatttataccggcttatatcacccttatacgattcgttacgtccagtccgaattcaatctaacattaccccggccactcgaaataatatgccccgcaaaatctccccactcattttgtacctggaccaagactggatcagcccaatgtcatcaatgatagactggattagaaaatgtggcacataa

SEQ ID NO: 131947 - DNA, 846 bp, Homo sapiens
atgcgcgatcgtgcgacgcgtgaaaaactgtttattgcgggctggacgcgagcggaaaaaaatgatgccaatgatacccgcgctatcattcaacgtctggtggagatccgtgcacaacaggcaacactacttggttttcctcattatgccgcatggaaaatcgccgcagtcatcgcaaaaaagacgctggtaacgcggagaaatgcaaatcaaaaccacaatgagataccaccttactcctgcaagaatggccatagtcaaaacataatagttgctggcaaggattcggtgaaaagggaacacttttacactgctgatgagaagctactgacggggtggtgcgtaacggcaaaagcaccgccggacatcagcgctatctctgctctcactgccgtaaaacatggcaactgcagttcacttacaccgcttctcaacccgccgggcagtgacgtcatcgtctgcgcggaaatggacgaacagtggggctatgtcggggctaaatcgcgccagcgctggctgttttacgcgtatgacagtctccggaagacggttgttgcgcacgtattcggtgaacgcactatggcgacgctggggcgtcttatgagcctgctgtcaccctttgacgtggtgatatggatgacggatggctggccgctgtatgaatcccgcctgaagggaaagctgcacgtaatcagcaagcgatatacgcagcgaattgagcggcataacctgaatctgaggcagcacctggcacggctgggacggaagtcgctgtcgttctcaaaatcggtggagctgcatgacaaagtcatcgggcattatctgaacataaaacactatcaataa

SEQ ID NO: 131948 - DNA, 443 bp, Homo sapiens
ccggtccgtcttgtgggtagattctctcaggaaggctccggtccgacttgtgggtacaggtttaaagggcaggcgctgacccagaaatttaaggaaaagtgggccaccgatcagtgatgccatcagcccaaccagcaaaccgtagacgatcaccgaaccgatatctgcgcccagcttattggcaacatataaagcagccggatgtggaggaaccacgcagtgcactgccatcaatgcggtacatagcggaatggcaagctttaataatgaggtattggtttttttggcaattgaaaaagccagaggaatcaatagcacgacgcccacttcaacaaacagcgtgatgccacaaatcaggccaaccagcaccataatgacatcaactgaaagccaacggcagcgttgaagtgtcagaccaattctctcaggaaggccgccaatca

SEQ ID NO: 131949 - DNA, 1395 bp, Homo sapiens
atggtgctggttggcctgatttgtggcatcacgctgtttgttgaagtgggcgtcgtgctattgattcctctggctttttcaattgccaaaaaaaccaatacctcattattaaagcttgccattccgctatgtaccgcattgatggcagtgcactgcgtggttcctccacatccggctgctttatatgttgccaataagctgggcgcagatatcggttcggtgatcgtctacggtttgctggtgattcatcaacgttttgtccttgccggagccaaacttgcgcaagctgataaagcaaaattaaaagtactgaatacagaagctgcgaccctgaccagccagtttaaccagcgattactggcagcaaataaatccggcggtctggttgtgaacgatatcgcgcagctggcaggaatgagtgagcaagagattgcgctggcggcagaggcggctcgcgagaaaggtctggataacaaatggctgattccgctgctgaataccacccaacaaccggcgcttgccgaaatgcgcgatcgtgcgacgcgtgaaaaactgtttattgcgggctggacgcgagcggaaaaaaatgatgccaatgatacccgcgctatcattcaacgtctggtggagatccgtgcacaacaggcaacactacttggttttcctcattatgccgcatggaaaatcggcgatcagatagcaaaaacacctgaagcagcacttaactttatgcgggaaattgttccagcggcgcgtcaacgtgcgcaccccagctggaagactgccaggaacagcgtattcgatattttcaaaatcggcattggcccttccagttctcataccgttggaccaatgaaagcgggtaaacaatttaccgacgatctgattgcccgtaacctgcttaaagacgtgacccgcgtggtggttgacgtgtacggctcgctctctctgaccggtaaaggccaccacactgatatcgccattattatgggcctggcgggtaacctgccggataccgtggatatcgattccatccccagttttattcaggatgtgaatactcatggtcgcctgatgctggcaaacggtcagcatgaagtggagttcccggttgatcagtgcatgaacttccacgccgacaacctttctctgcatgaaaacggtatgcgcattaccgcgctggcgggcgataaagtcgtttacagccagacttactactctattggcggtggctttatcgttgatgaagagcattttggccagcaggatagcgcaccggttgaagttccttatccgtacagttcagcagccgatctgcaaaaacattgtcaggaaaccgggctgtcactctctggcctgatgatgaaaaacgagctggcgctgcacagcaattaa

SEQ ID NO: 131950 - DNA, 1377 bp, Homo sapiens
atggcattgggaaaagacttggagcagggtcctcaccacattggttctcaccatttacaaatgaagaagtcaggtcgtcccagacgtttcgctcctgagcaggcaatctctgcggcaaaagtgctttttcaccaaaaaggtttcgatgctgtcagtgttgctgaagttactgattatcttggtattaaccccccgagcctctacgcggcttttggcagtaaagctgggttatttagccgtgtactcaatgaatacgtcggtacggaagctattccgcttgccgatattcttcgtgatgatcgtccgcatcgacattttgccgaagcgaccatcatgccaaccgttattacgcacgccgccgttcccctatgcattggtttagggttgggttcgaaagtcatccctccgcgtctgttatttgccggaatcatcctggcgatgctgcccgacgccgacgtattgtcgtttaaatttggcgttgcttacggcaatgtttttggtcatcgcgggtttacccattcgctggtgtttgcgtttgttgtcccgctgttatgtgtgtttattggacgccgatggttcagggctgggctgattcgctgctggctgtttttaaccgtctcgttgctatcgcacagcttgctggattcggtaaccactggcgaaaaaagcaccgttattgaagtcggcgttgatgtgcctaacgccagtctgatgattatcgaaaacccggagcgtctgggtctggcgcagttacaccagctgcgcgggcgcaatcagcagttaaagaaaggggaaccgacagcgcagtaccgaaaacttcgcagcccaactgatggaactgacgataacgccctttctgcggacgctcgtgacggaacatcggcccgctggtggcgcgcgctgggtatttccgagcacgtaactcttgagctgaactctatcggttcgctggaagcacgcgccaattaccgcgatgcgctggtggcattccttgagcagcataaagaaaagctggacgaagactgcaaacgccgcatgtacactaacccgctgcgcgtgctggattcaaaaaatccggaagtgcaggcgcttctcaacgacgctccggcattaggtgactatctggacgaggaatctcgtgagcattttgccggtctgtgcaaactgctggagagcgcggggatcgcttacaccgtaaaccagcgtctgctaaattaccgcctttcagccaatttgatcgagaacaatttatctctttttgatggagaaggtatctatcggttttatcaccccaagccaacaaaaaacgccgagcgagagaaccgccagtgccgcaacgatctgtttttccgatgtggatttttctgcccaccatga

SEQ ID NO: 131951 - DNA, 3519 bp, Homo sapiens
ttttttatttggcaaacatctcgtttattaccatcatgaatatcatttggacctctgcaaagactatatacattcacattaacgtacacgctcagcttcaggcctctggcgggctgttcgtggctggttcagtagctgggtcactcccgtattgcactgagttcctagaactcctgatagccacgcacacagatgccaggccacgggccacgccacgcacacagatgccaggccacgggccacgccacacacacagatgccaggccacgggccacgccacgcacacagatgccaggccacgggccacaccacgcacacagatgccaagccacgggccacgccacacgcacagatgccaggctgcgggccgtgcctgctgtctgtccttgtactcggtgcaagcatgaatttctttatccctttatttccttcttgaaatcgctgaggcagttgagaggagtggagggagggtgggcagggctggaggatgggagggagcacgtctgatagaaaacgtcaccgagacacaccccagggccagaggcgaacgcatctgaggggtggctgggcaggagcaccagggctatgtacacggtcagggtcttccctggggaggaggcagagggctgcttttgtttgtagtttttttgttttttctgcaaaagtttggaagaaaggggagtagctgcggtggggcgatggggccgagaggttggagttggggcgatggggctgagagaggtcggagctggggtgagggggccgagagaggtcggagggcgcggagaggagagaggtagaggaggacgggctggccgagaagcagtgtttcagggaggcctgctggctccgcatgctcgaaaagcagtcgagaatcaacccaaaagattgtcacagttttgtttcggaattatgctctctctgggaagaaaactttagcactttttttccacaagtggaaaacggaaatatgaaaagtcacagggggcgtgaggacagacggcgtgtcctttcctacacatatggagacgcaggccggagcaacggcacacggaccacgcacacgcggcggacgcaccaacgcctacgcagaagagaacaaaagtcgcttctaactgggcacaaaccctctgcacccaaatatcccgacacccacaaacaaaatcagaacagaagagaaaaagacccacatccaaacaaacccaagagcaagtgaaacagtgaaaaaaatactttggcagtgacaaacaaattttggattttgatttcttgtgtttgcttttttggatttcctttggagcagaggtgtgtccggtatccttggctggctagctagcaaggtagttcacaagtatgcttcctttgcttttttaaaaaaactttttggatttttacttaaagccaaagagtttaacattacaggaaaaaaaaatctgaaaccaaaaatgcatcttgagtcagaaatcgaaatctttcctcccgtcttcgctgatcagcctcacgcccctgggggaggggcacagctgggttcagatctccagctataaaatcgcagttttctttctccctttttaatcaggagggggagaacccccccgttttctttgtccatttctgagtagctcttttgccaacacacaaaaccccccaaaattctttgctgaaaatataagccaccaattcgattttttcattgaagagaaagtgtgtgatagtcatagagagagagaggatagagaagacagagggggagagacagacagagaggaaaagagaggtgggcagagccgccgcgcctgcggcatctgctctgctgtctaaagctcagtcgaggcttctgaggatgcttgaagagacgttgtcaggaggtctccgcgcggaatcattaggtagctgaggcaggtgcactgaatgcggttttgttggttctgtgtcttctttcggagaggggcagtagcagcagtgactaattggtcggctcccacaggtcaggcggggcgcagtgtctggcaggccaggcatcggaggccaggcacagcatccggtgggcctggagctgggtggggttggcacggtgctgtgtccggcaggccaggggccagtggggtcagcggggcacggtgtccagtgggccaggtgggctgggggagccggggcgagaaggccccgcagagccggcttcgctggggctggcagcacccacaggcagggaggggcccaggctgtgggcggcttcgggcggtccaggcaccgggtcggccaccacggctgtggggccctgcaggctctggccacacacgtggtgatgcttctcccagtcccgatgctggcagaaggacccgcagtagcgtgccgcgttgcagccgctgcacgtctcactggctttccgcccgcagttccagcagctctcgctggagtcctcctgctggttgatgaccgtcagggcgtcctcggaggcctgccgcttcgcctcggccagggcccgctccatcttggcacgctccgtggtgatgagctcgtgcgctttgcgctccgcgtccgacacggctttctgcagctccgacatggcctgccgcttcacctcattcacggcctcttcagccttcctccagatgtcctcaggcacgtagccggtgagggtcctcggcaggaactcgcgaggcacgtctagctgaggcccttcgggaccggcggagctgctgcggggccgggccgcggcgggagcggggcccttctttgtgtcctcggcgtcgctgtagcgccgcgcccagtggttgagctccccgcggtcggcctcctggcacctgcgcagcaccgtgagcgagcgccgcgtcttctccaccatgtccatgatgcagttcaggaggttgttgaggtgcttccactcttctgcccactcacgctctgtgagcttgtggtcgatcacttcttcctgccgggacccaggcaccagctgggccaagtactgggcgggcgtctgcttggccaggcgtgcacagtgcaggagctcccgctgcagcaagggcaggtttgccttcaggaagggaatgacaaacggccgcagagggaagttggtggcctcctgaagcttggaatgaaactcctcgatcgtcaatgtcgagttcaccaggcccagcaccagtgtgcgcacgcgctccccaatctctggggagatgtcgctgccaaactgctgcagtgtggtgaggaagcgcttgagcttgctgagctgccgggccccgcaggctgggggcaggtgctgtgtggacaaggaggctgtggacgaggtggccgggccattgctgaagccgttgggtgtgcacggtgcaccattgatggctgttggtgagtggctgctgccgttcatcagtgtgtgtggcgtgaaggagggggggcgtgtggccccctgggatgcggcaggcggtgggggcggcatgctggggggtgtggaccggggctgcgtcttcacctccgctggggagtccggcatcgctgaggccttagctttcctgtccactgggg

SEQ ID NO: 131952 - DNA, 460 bp, Homo sapiens
  misc_feature (1)...(460): n = a,t,c or g
tgctgccccttcgtcctctcgccttctccagaccacgccatgggagggagctgggtgcggtgggaaagccccaccctgggagtccaggatctgggctcaagtcccacatgccccacatcgccgtgtggcccaggtgaggcactcctgcgaagctctgtgcccaccctcccacgccaccctcccatggcactgctaggaaggaacttgaggcccagagaggtcgagcaccttgacctttgaggcccgaggtcaagttgagctttcggccacccagcccaggccccctctgctcggacctgagcagggctgtgcacccctgcatgctacccaggccctccttccccaccccacaggcaaacctgcccttgctgcagcgggagctcctgcactgtgcacgcctggccaagcagacgcccgccgaattccaccacacggactacgatctcgaannccccccatc

SEQ ID NO: 131953 - DNA, 240 bp, Homo sapiens
atgaaaaagatcctgacaaccccgatcaaagctgaagatctgcaagatattcgcgtcggcgatgtgatctacctgaccggtacgctggggagcggcttacgcgttgccgtactggagcagcgcgtacaggaacctctggcggcgaatgcaccaccacaactgcgcgtttcggctatcaatgccgccagcgaaaaattactcacccgtcttggcgtctggcaggacattctctctcgtagg

SEQ ID NO: 131954 - DNA, 456 bp, Homo sapiens
atgaaaaagatcctgacaaccccgatcaaagctgaagatctgcaagatattcgcgtcggcgatgtgatctacctgaccggtacgctggtgacctgccgcgacgtttgtcaccgccgtttgatcgaactgaaacgtccgatcccttacgatctcaacggcaaagcgattttcgtccgctgcattcttgatgctgatgcccagcgcgaaggtatcaatgcctcgacacgctacccgaaaaactgggtgcagtcgggggatccggcgcgcgaatccaccatgattcagtcacaaattaaccgcaatattcgtcttgatcttgccgatgccattttgctcagcaaagctaaaaaagatctctcatttgccgagattgccgacggcaccggtctggcagaagcctttgtaaccgcggctttgctgggtcagcaggcgcttcctgccgacgccgcccgcctg

SEQ ID NO: 131955 - DNA, 4221 bp, Homo sapiens
ggagggcctcggctttccagggacagaggcccaactccaggacgccccagctggcccagcccctcctctttccctcaaggctgcaggaggtcgggaaaggcagtcctggtagaggcctgtcctgggctccaggttggcccctgagggtggccctcctcatgccggcttcaagactgagggacagggcagccagttcagcctcgggatccacctgtggctccatgtcccagacgcaccctgtgctggagagcggcctcctggcatctgccggctgctccgcaccccggggtcccaggaagggcggcccagccccagtggacaggaaagctaaggcctcagcgatgccggactccccagcggaggtgaagacgcagccccggtccacaccccccagcatgccgcccccaccgcctgccgcatcccagggggccacacgccccccctccttcacgccacacacacatcgagaggacgggcctgcgacgctgccccacggccgttttcatggctgcttaaaatggtctatggtctgtctcttgatgaacggcagcagccactcaccaacagccatcaatggtgcaccgtgcacacccaacggcttcagcaatggcccggccacctcgtccacagcctccttgtccacacagcacctgcccccagcctgcggggcccggcagctcagcaagctcaagcgcttcctcaccacactgcagcagtttggcagcgacatctccccagagattggggagcgcgtgcgcacactggtgctgggcctggtgaactcgacattgacgatcgaggagtttcattccaagcttcaggaggccaccaacttccctctgcggccgtttgtcattcccttcctgaaggcaaacctgcccttgctgcagcgggagctcctgcactgtgcacgcctggccaagcagacgcccgcccagtacttggcccagcatgagcagctcctgctggacgccagcgcctcctcccccatcgactcctcagagctgctactggaagtcaacgagaacggcaagaggaggacgcccgacaggaccaaagagaacgggtcagaacgcgacccgctgcaccccgagcacctcagcaaacggccatgcaccctgaaccctgcccagcgctacagccccagcaacgggccaccgcagcccacaccgccgccgcactaccgcctggaggacatagccatggcccaccacttccgagatgcctaccgccacccagacccccgggagctacgagagcgccatcggccgcttgtggtgcctgggtcccggcaggaagaagtgatcgaccacaagctcacagagcgtgagtgggcagaagagtggaagcacctcaacaacctcctgaactgcatcatggacatggtggagaagacgcggcgctcgctcacggtgctgcgcaggtgccaggaggccgaccgcgaggagctcaaccactgggcgcggcgctacagcgacgccgaggacacaaagaagggccccgctcccgccgcggcccggccccgcagcagctccgccggtcccgaagggcctcagctagacgtgcctcgcgagttcctgccgaggaccctcaccggctacgtgcctgaggacatctggaggaaggctgaagaggccgtgaatgaggtgaagcggcaggccatgtcggagctgcagaaagccgtgtcggacgcggagcgcaaagcgcacgagctcatcaccacggagcgtgccaagatggagcgggccctggccgaggcgaagcggcaggcctccgaggacgccctgacggtcatcaaccagcaggaggactccagcgagagctgctggaactgcgggcggaaagccagtgagacgtgcagcggctgcaacgcggcacgctactgcgggtccttctgccagcatcgggactgggagaagcatcaccacgtgtgtggccagagcctgcagggccccacagccgtggtggccgacccggtgcctggaccgcccgaagccgcccacagcctgggcccctccctgcctgtgggtgctgccagccccagcgaagccggctctgcggggccttctcgccccggctcccccagcccacctggcccactggacaccgtgccccgctgaccccactggcccctggcctgccggacacagcaccgtgccaaccccacccagctccaggcccaccggatgctgtgcctggcctccgatgcctggcctgccagacactgcgccccgcctgacctgkgggagccgaccaattagtcactgctgctactgcccctctccgaaagaagacacagaaccaacaaaaccgcattcagtgcacctgcctcagctacctaatgattccgcgcggagacctcctgacaacgtctcttcaagcatcctcagaagcctcgactgagctttagacagcagagcagatgccgcaggcgcggcggctctgcccacctctcttttcctctctgtctgtctctccccctctgtcttctctatcctctctctctctatgactatcacacactttctcttcaatgaaaaaatcgaattggtggcttatattttcagcaaagaattttggggggttttgtgtgttggcaaaagagctactcagaaatggacaaagaaaacgggggggttctccccctcctgattaaaaagggagaaagaaaactgcgattttatagctggagatctgaacccagctgtgcccctcccccaggggcgtgaggctgatcagcgaagacgggaggaaagatttcgatttctgactcaagatgcatttttggtttcagatttttttttcctgtaatgttaaactctttggctttaagtaaaaatccaaaaagtttttttaaaaaagcaaaggaagcatacttgtgaactaccttgctagctagccagccaaggataccggacacacctctgctccaaaggaaatccaaaaaagcaaacacaagaaatcaaaatccaaaatttgtttgtcactgccaaagtatttttttcactgtttcacttgctcttgggtttgtttggatgtgggtctttttctcttctgttctgattttgtttgtgggtgtcgggatatttgggtgcagagggtttgtgcccagttagaagcgacttttgttctcttctgcgtaggcgttggtgcgtccgccgcgtgtgcgtggtccgtgtgccgttgctccggcctgcgtctccatatgtgtaggaaaggacacgccgtctgtcctcacgccccctgtgacttttcatatttccgttttccacttgtggaaaaaaagtgctaaagttttcttcccagagagagcataattccgaaacaaaactgtgacaatcttttgggttgattctcgactgcttttcgagcatgcggagccagcaggcctccctgaaacactgcttctcggccagcccgtcctcctctacctctctcctctccgcgccctccgacctctctcggccccctcaccccagctccgacctctctcagccccatcgccccaactccaacctctcggccccatcgccccaccgcagctactcccctttcttccaaacttttgcagaaaaaacaaaaaaactacaaacaaaagcagccctctgcctcctccccagggaagaccctgaccgtgtacatagccctggtgctcctgcccagccacccctcagatgcgttcgcctctggccctggggtgtgtctcggtgacgttttctatcagacgtgctccctcccatcctccagccctgcccaccctccctccactcctctcaactgcctcagcgatttcaagaaggaaataaagggataaagaaattcatgcttgcaccgagtacaaggacagacagcaggcacggcccgcagcctggcatctgtgcgtgtggcgtggcccgtggcttggcatctgtgtgcgtggtgtggcccgtggcctggcatctgtgtgcgtggcgtggcccgtggcctggcatctgtgtgtgtggcgtggcccgtggcctggcatctgtgtgcgtggcgtggcccgtggcctggcatctgtgtgcgtggctatcaggagttctaggaactcagtgcaatacgggagtgacccagctactgaaccagccacgaacagcccgccagaggcctgaagctgagcgtgtacgttaatgtgaatgtatatagtctttgcagaggtccaaatgatattcatgatggtaataaacgagatgtttgccaaat

SEQ ID NO: 131956 - DNA, 4034 bp, Homo sapiens
gcggtttctgttttttatttggcaaacatctcgtttattaccatcatgaatatcatttggacctctgcaaagactatatacattcacattaacgtacacgctcagcttcaggcctctggcgggctgttcgtggctggttcagtagctgggtcactcccgtattgcactgagttcctagaactcctgatagccacgcacacagatgccaggccacgggccacgccacgcgcacagatgccaggccacgggccacgccacacacacagatgccaggccacgggccacgccacgcacacagatgccaggccacgggccacaccacgcacacagatgccaagccacgggccacgccacacgcacagatgccaggctgcgggccgtgcctgctgtctgtccttgtactcggtgcaagcatgaatttctttatccctttatttccttcttgaaatcgctgaggcagttgagaggagtggagggagggtgggcagggctggaggatgggagggagcacgtctgatagaaaacgtcaccgagacacaccccagggccagaggcgaacgcatctgaggggtggctgggcaggagcaccagggctatgtacacggtcagggtcttccctggggaggaggcagagggctgcttttgtttgtagtttttttgttttttctgcaaaagtttggaagaaaggggagtagctgcggtggggcgatggggccgagaggttggagttggggcgatggggctgagagaggtcggagctggggtgagggggccgagagaggtcggagggcgcggagaggagagaggtagaggaggacgggctggccgagaagcagtgtttcagggaggcctgctggctccgcatgctcgaaaagcagtcgagaatcaacccaaaagattgtcacagttttgtttcggaattatgctctctctgggaagaaaactttagcactttttttccacaagtggaaaacggaaatatgaaaagtcacagggggcgtgaggacagacggcgtgtcctttcctacacatatggagacgcaggccggagcaacggcacacggaccacgcacacgcggcggacgcaccaacgcctacgcagaagagaacaaaagtcgcttctaactgggcacaaaccctctgcacccaaatatcccgacacccacaaacaaaatcagaacagaagagaaaaagacccacatccaaacaaacccaagagcaagtgaaacagtgaaaaaaatactttggcagtgacaaacaaattttggattttgatttcttgtgtttgcttttttggatttcctttggagcagaggtgtgtccggtatccttggctggctagctagcaaggtagttcacaagtatgcttcctttgcttttttaaaaaaactttttggatttttacttaaagccaaagagtttaacattacaggaaaaaaaaatctgaaaccaaaaatgcatcttgagtcagaaatcgaaatctttcctcccgtcttcgctgatcagcctcacgcccctgggggaggggcacagctgggttcagatctccagctataaaatcgcagttttctttctccctttttaatcaggagggggagaacccccccgttttctttgtccatttctgagtagctcttttgccaacacacaaaaccccccaaaattctttgctgaaaatataagccaccaattcgattttttcattgaagagaaagtgtgtgatagtcatagagagagagaggatagagaagacagagggggagagacagacagagaggaaaagagaggtgggcagagccgccgcgcctgcggcatctgctctgctgtctaaagctcagtcgaggcttctgaggatgcttgaagagacgttgtcaggaggtctccgcgcggaatcattaggtagctgaggcaggtgcactgaatgcggttttgttggttctgtgtcttctttcggagaggggcagtagcagcagtgactaattggtcggctccckcaggtcaggcggggcgcagtgtctggcaggccaggcatcggaggccaggcacagcatccggtgggcctggagctgggtggggttggcacggtgctgtgtccggcaggccaggggccagtggggtcagcggggcacggtgtccagtgggccaggtgggctgggggagccggggcgagaaggccccgcagagccggcttcgctggggctggcagcacccacaggcagggaggggcccaggctgtgggcggcttcgggcggtccaggcaccgggtcggccaccacggctgtggggccctgcaggctctggccacacacgtggtgatgcttctcccagtcccgatgctggcagaaggacccgcagtagcgtgccgcgttgcagccgctgcacgtctcactggctttccgcccgcagttccagcagctctcgctggagtcctcctgctggttgatgaccgtcagggcgtcctcggaggcctgccgcttcgcctcggccagggcccgctccatcttggcacgctccgtggtgatgagctcgtgcgctttgcgctccgcgtccgacacggctttctgcagctccgacatggcctgccgcttcacctcattcacggcctcttcagccttcctccagatgtcctcaggcacgtagccggtgagggtcctcggcaggaactcgcgaggcacgtctagctgaggcccttcgggaccggcggagctgctgcggggccgggccgcggcgggagcggggcccttctttgtgtcctcggcgtcgctgtagcgccgcgcccagtggttgagctcctcgcggtcggcctcctggcacctgcgcagcaccgtgagcgagcgccgcgtcttctccaccatgtccatgatgcagttcaggaggttgttgaggtgcttccactcttctgcccactcacgctctgtgagcttgtggtcgatcacttcttcctgccgggacccaggcaccacaagcggccgatggcgctctcgtagctcccgggggtctgggtggcggtaggcatctcggaagtggtgggccatggctatgtcctccaggcggtagtgcggcggcggtgtgggctgcggtggcccgttgctggggctgtagcgctgggcagggttcagggtgcatggccgtttgctgaggtgctcggggtgcagcgggtcgcggtctgacccgttctctttggtcctgtcgggcgtcctcctcttgccgttctcgttgacttccagtagcagctctgaggagtcgatgggggaggaggcgctggcgtccagcaggagctgctcatgctgggccaagtactgggcgggcgtctgcttggccaggcgtgcacagtgcaggagctcccgctgcagcaagggcaggtttgccttcaggaagggaatgacaaacggccgcagagggaagttggtggcctcctgaagcttggaatgaaactcctcgatcgtcaatgtcgagttcaccaggcccagcaccagtgtgcgcacgcgctccccaatctctggggagatgtcgctgccaaactgctgcagtgtggtgaggaagcgcttgagcttgctgagctgccgggccccgcaggctgggggcaggtgctgtgtggacaaggaggctgtggacgaggtggccgggccattgctgaagccgttgggtgtgcacggtgcaccattgatggctgttggtgagtggctgctgccgttcatcagtgtgtgtggcgtgaaggagggggggcgtgtggccccctgggatgcggcaggcggtgggggcggcatgctggggggtgtggaccggggctgcgtcttcacctccgctggggagtccggcatcgctgaggccttagctttcctgtccactggggggtcggggggtccgggggatccggcgggcggcggacggcgcacactcgcgactcggtccgggagtcgctgctccttccagcttggtccccgcctccacgactcaggggcggctgcgcgctgtcttctggcgccgcaccgggctcaggcgcgcggcggggctggggcgcgcgcggggcggcc

SEQ ID NO: 131957 - DNA, 455 bp, Homo sapiens
tctcaggtggaagatcaggggcagcttcgtgtggtcttccagattgtgagttgtgacccctgaaacgttctgcccagggcagaaatcaatgccctgtctgaagttctcccaggagttggtccaggtccagaagtgagccttgtgctgcccgagggtggccgccatcagcgtgtcgccacggtaatagaagataggcctgtccatcagccggccctgcaggagggtggggaggaggttgaggccatcaatggccctgtcgctgggcggcgtcaggcccgcaagggccaggctggtggtgaagaggtccatgatgctgcccagctggtggctcacctggcctgcagtgacgtgccctggccaccatgcgagggcaggctccctcatccctccttcaaacgtggtctgcttcccacacagaaaggggccgttgctgccaccgaattccaccgcactga

SEQ ID NO: 131958 - DNA, 2712 bp, Homo sapiens
atggattcgatgatcaaccgttataccgccgatcgccgtatacgtcatgacgatgcatacacgccggataacgtcgcgtgtaagcgcgcggatcgcgccacactggtttatacccagcgttgtaaagaggcgtggaaagatgtaccggtgatcctcggcggtattgaggctagtatgcgccgtaccgcgcattatgattactggtccgataccgtgcgccgttccgtgatggtggattcgaaagccgacatgctgatgtttggtaacggtgagcgtccgatggtggaagtggcgcatcgtctggcgatgggcgagccaattagtgaaatccgcgatgtgcgtaataccgcgattatcgtgaaagaggcgctgcctggctggagcggcgtggattccacccgtcttgatacccctggaaaaatcgacccaatcccgcatccgtatggtgaagatttgccgtgcgcggataacaaaccggtggcaccgaaaaagcaggaagccaaagccgtaaccgtgcagccaccgcgcccgaaaccgtgggaaaaaacctacgtgttgctgccttctttcgagaaagtgaagggcgataaagtgctgtacgcccatgcttcgcgtattctgcaccacgaaaccaacccaggctgtgcccgcgcattgatgcaaaaacacggcgaccgctatgtgtggatcaacccgcctgctattccgctttctaccgaagagatggacagcgtttttgcgctgccatacaagcgcgtgccacatccggcctatggcaatgcccgtattccggcttacgaaatgaattacggttgttatgctgcagaacctaatgacgtgcaactggcgcgctattttcatcttgatgaacgggatctgggcttcattaaccaacgacggggcaaacataataggctgggcattgcgcttcagctcaccacagcccgttttctgggaacatttctgacggatttaactcaggttctgcctggtgttcaacattttgtcgcggtacagcttaatatccaccgtccagaagttctctcccgctatgctgaacgggacactacccttagagaacatactgcattaattaaggaatattacggctatcatgaatttggtgattttccatggtctttccgcctgaagcgtctgctatatacccgggcgtggctcagtaatgagcgaccgggtctgatgtttgattttgccactgcatggttgcttcaaaataaggtattactgcccggagcaaccacactagtacgtctcatcagtgaaattcgtgaaagggcaaatcagcggctgtggaaaaagctggccgcactgccgaacaaatggcaggcagctcaagtgatggagcttctggtcattccggaaggctgttccactctggagcgagtggtttcccgtcctgacatcacccaggggaactatctgaccgctaacgacgtatccaaaatacgtgttggcatgacgcaacaacaagttgcgtacgcattgggtacaccgctgatgtccgatccatttggtacgaatacctggttctatgtcttccgccagcaaccaggtcatgaaggtgtaactcagcaaacgctgacgctgacctttaacagtagcggtgtgttgaccaatattgataacaaacctgcgctgagtgcattgcttatcagagatatgcccccatatgttgaggcatatcctaacgagaatctgacaaccgttatgcctgaacaatatcgttatacgctgcccgtcaaagcgggtgagcagcgtctgctgggcgagttaaccggcgcagcctgtgcaacgctggtagcggaaattgccgaacgtcacgccggtccggtggtactcattgcaccagatatgcaaaatgctctgcgtttgcatgatgaaatcagccagtttaccgatcaaatggtgatgaatctggcggactgggaaactcttccctacgacagtttttcgcctcatcaggacattatctcctcgcgcctttccaccctttaccagctaccgacgatgcagcgtggcgtactgattgttccggtgaatacgcttatgcagcgcgtttgcccacacagttttctccacggtcatgcgctggtgatgaaaaaaggtcagcgcctgtcacgagatgcattacgaacccaactggacagcgccggttatcgccatgttgaccagccagcgcacgctggcggcaaagtgctggagatgatcgtggtggggatcgccacctggctggggttcttgctcttcgggctgaactattcgctgctgctggcagtgctggtcggcttctcggttcttattccgtacattggcgcatttgtggtgaccattccggtggttggcgtggcgctattccagtttggcgcaggtactgaattctggagctgcttcgcggtgtatctgattattcaggcgctggacggcaacctgttagtgccggtgttgttctccgaagcggttaacctgcatccgctgcatcaccgggagcagattggcggtaataaaatggctgaccgtcagtgccggaaaattgtctgcgctactgtgcgccagctgccagaaggggggaggggcgaaatggcgaatggcaatggcgaacggaatcacaaacaaattggcgatacagtgctcaaagccactgggagcaaacagggtgatgggcaaaatcatggcgacgattttgtcgcgtaa

SEQ ID NO: 131959 - DNA, 2097 bp, Homo sapiens
atgaccctcaagactcctgatgcccggcaatcagtaggagccaacagcctaagggatattccctgcacccgccgggccggccttgcatcagagagtcgggacgccgcactcacgattttgcaggtcctgggggacggcgggcccagcgtgcaggtcctggctctgcggagctggccacggttcctagtgagaggctggctgggctttttctcacatgtccttgtcacacggcgatgtggccgggctgggatcacccttccctctcttcggaagagccctccggtctggtgtggagcagaaagtcccacagacaaccccagacacacactgattgcagtcggtagatcgactctgaggatccccgactgtgcccgagtggtgcacgttaaggtggctgtcatggtcaattttacgttctgtgtattttacaataaaaaccccaagcaggaggacggaagtccaatggcttctaaggatataaccctcaccttcgttctaccagctacaagcagaccatcatcatccctcccacggtccctgtccccacacgtcccacggggctacgttggtgcggtcaccgtccccacgcgttcccacggggcaagaccacgccatgggagggagctgggtgcggtgggaaagccccaccctgggagtccaggatctgggtcactgaaagaccttgagcgggcttacaaaaacttcttccggaagcgggctgcttttccccgattcaaaaagcggggacagaatgatgcattccgctacccgcagctggggtggggcgttggtgggatcgaagcagaagccgcaatgttaggccagccggtttccatgcttatcccggatgtagtgggcttcaaacttaccggaaaattacgtgaagctcccccagggaagctctgccctctccccagcgcagtttcgtcaggctgttccactctggagcgagtggtttaccgtcctgacatcaaccaggggaactatctgaccgctaacgacgtatccaaaatacgtgttggcatgacgcaacaacaagttgcgtacgcattgggtacaccgctgatgtccgatccatttggtacgaatacctggttctatgtcttccgccagcaaccaggtcatgaaggtgtaactcagcaaacgctgacgctgacctttaacagtagcggggacccgaagctgagagagcctcaagtggctcaggctacagcagcaggggtggcttttgtccctgacgtgggccccccacccccttcttccatgtctgggagtggcagcaacggcccctttctgtgtgggaagcagaccacgtttgaaggagggatgagggagcctgccctcgcatggtggccagggcacgtaactgcaggccaaagctgctggaactgcgggcggaaagccagtgagacgtgcagcggctgcaacgcggcacgctactgcgggtccttctgccagcatcgggactgggagaagcatcaccacgtgtgtggccagagcctgcagggccccacagccgtggtggccgacccgcgcgttatgaaaaagatcctgacaaccccgatcaaagctgaagatctgcaagatattcgcgtcggcgatgtgatctacctgaccggtacgctggtgacctgccgcgacgtttgtcaccgccgtttgatcgaactgaaacgtccgatcccttacgatctcaacggcaaagcgattttccacgctggccccatcgtgcccaaaaacggcgacaaatgggagatggtctccgtcggcccgacacccagtatgcgtatggaaagttttgaccgtgaatttattgagcagtccggcgtgaacctggtggttggcaaaggtggtatggggccgctgaccgaagaaggctgccagaaattcaaggcgctacatgtgattttcccggcaggctgcgcggtgctggcggcaacccaggtggaagagattgaagaagtgcgctggacagagctcggaatgccggagtcactgtgggtctgccgggtcaaagagttcggcccgctgattgtctctattgatacccccggcaccaacctgatagccgaaaacaaaaagctgttcgccgaacgccgc

SEQ ID NO: 131960 - DNA, 2154 bp, Homo sapiens
atgacaccatcacgcttcgcgaagaagaacggatcgttggttaagcgttgccctatgggcattgacgccgaggtcaccatgataaagccaatcgccgcgaggccgaaggtcagccacagtaaggtgcgatcgtacatgatcaggctgtcggtatctttttcccgcgagcccatcacccagccctttagcgccgtggagatccagaccaggataagatacggtgtaagtggattctttttgcgccgggtcgataccgagcatcaccccgaccgccacgctgcgcgcgctttgcagtaccacatcaccggtagtaataggtgcgacgcgattaacgccgtccagtttgacacggctggcggtgagtgtaccaatcggcggatggctgaagaccacggtcggaatgttgctgtaatccagatgctcatccggcttgttattaaacaggcgttcagagaggtaccttcagagttgtggacaaatcgtaagcaggcttgcccgttcctcgatttcgactgtggagaaaactctgctatcgcggcgaacaactatgactggttcggcaatatgaatgtgctgaccttcctgcgcgatattggcaaacacttctccgttaaccagatgatcaacaaagaagcggttaagcagcgtctcaaccgtgaagatcaggggatttcgttcactgagttttcctacaacctgttgcagggttatgacttcgcctgtctgaacaaacagtacggtgtggtgctgcaaattggtggttctgaccagtggggtaacatcacttctggtatcgacctgacccgtcgtctgcatcagaatcaggtgtttggcctgaccgttccgctgatcactaaagcagatggcaccaaatttggtaaaactgaaggcggcgcagtctggttggatccgaagaaaaccagcccgtacaaattctaccagttctggatcaacactgcggatgccgacgtttaccgcttcctgaagttcttcacctttatgagcattgaagagatcaacgccctggaagaagaagataaaaacagcggtaaagcaccgcgcgcccagtatgtactggcggagcaggtgactcgtctggttcacggtgaagaaggtttacaggcggcaaaacgtattaccgaatgcctgttcagcggttctttgagtgcgctgagtgaagcggacttcgaacagctggcgcaggacggcgtaccgatggttgagatggaaaagggcgcagacctgatgcaggcactggtcgattctgaactgcaaccttcccgtggtcaggcacgtaaaactatcgcctccaatgccatcaccattaacggtgaaaaacagtccgatcctgaatacttctttaaagaagaagatcgtctgtttggtcgttttaccttactgcgtcgcggtatcggtaccaaactggcgcgcgtggcgcgtatgcactttgcccgtcaacgtctggctgccgtaggcccacgtttgcctgctcgtcaggatctgtttaataagctgctcgcctcccgcgccattgccaaagcggtagaagatgaagcgcgcagcaaaaaaatctcccatgaaaaagcgcagcagaacgcgattgcactgatggaagagattgcggcgaatttctcttacgagatgattcgcctgactgaccgtattctgggcttcacctggaaccgactttaccagggcatcaacgtccataacgctgagcgcgttcgccagctggcccacgacggtcatgagctggtatatgtgccttgccaccgcagtcacatggactacctgctgctttcttacgtgctgtatcaccaggggctggtgccgccgcatatcgccgccgggatcaacctgaatttctggcctgccgggccgattttccgccgtctgggggcgttctttattcgccgtacgtttaaaggcaataaactttattccaccgttttccgggagtatctcggcgaactgttcagccgtggttattccgtcgagtacttcgtggaaggcggtcgttcccgtacggggcgtttgctggatccgaaaactggtacgctgtcgatgaccattcaggcgatgctgcgtggcggcacgcgtccgattacggggataccttcagatcgacctgaagtcatgcagctgcctccctaa

SEQ ID NO: 131961 - DNA, 1127 bp, Homo sapiens
gcggtacgccctatgccagccaacccgtgatccgtccggtggaaggcagtaaaccgctgattaaacaagtcctggatattggcgcgcacggcacggataaaactatcgctcagaaactggcgcgcgtggcgcgtatgcactttgcccgtcaacgtctggctgccgtagccacgtttgcctgctccgcacagaacgcgattgcactgatggaagagattgcggcgaatttctcttacgagatgattcgcctgactgagtgtattctgggcttcacctggaaccgactttaccagggcatcaacgtccataacgctgagcgcgttcgccagctggcccacgacggtcatgagctggtatatgtgccttgccaccgcagtcacatggactacctgctgctttcttacgtgctgtatcaccaggggctggtgccgccgcatatcgccgccgggatcaacctgaatttctggcctgccgggccgattttccgccgtctgggggcgttctttattcgccgtacgtttaaaggcaataaactttattccaccgttttccgggagtatctcggcgaactgttcagccgtggttattccgtcgagtacttcgtggaaggcggtcgttcccgtacgggcgtttgctggatccgaaaactggcgatgctgcgtggcggcacgcgtccgattacgctgattccgatctatatcggttatgagcacgtcatggaagtgggtacttacgccaaagaactgcgcggcgcgacgaaagagaaagagagcctgccgcagatgctgcgcggtttaagcaagctgcgtaatctcggtcagggttacgtcaacttcggtgaaccaatgccgttgatgacctaccttaaccagcatgtacctgactggcgtgaatctatcgatcccatcgaagcggtgcgtccggcatggttaacgccgacggtcaataatattgctgccgatctgatggtacgcattaacaacgcaggcgcggcaaacgccatgaacctgtgctgtactgcgctactggcatcacgtcagcgctcactcacccgcgagcagttaaccgagcaactcaactgctacctggatctgatgcgcaacgtgccctactccacggactctacc

SEQ ID NO: 131962 - DNA, 1019 bp, Homo sapiens
tcagctgttgttttcctttgtttgtgtgattgttgtgttcgtgctgtctggtttgtctggttggtctgggttgggtgcgccctgtggtttctctagttgtgtggtgttgctacttgggtctgtctgttgtgtgtgtgtggtggctgtctgtgtgtgtcgcgtgcgctttctgtagtctgttgtggctttgacctgtgcttgtgtacctgtgggtgtctttctcttggttgtgtggtcgctcgttggtgtgtgatgcgtttggttgcgttttatgtgtgctgtgtttttggtgtggtgtttgctgggggtggttttccaggtgtttagtgcttgtccgtgtgttggattgcgtggcggtggcctgggtgtgtccgcttggtgtggggattggcctgtgggttgtgtgttgcccaccgggttggtcagtgccgtgccgtgttgttgtgacgtcttagcccggtttcgtgtggatctctgttggggttgatgattgtctgggttggtgttggttcgatcggtgttgatcggtaagtttttaatccatgtagtatcaccatgatagatatcaacttcacgcagttgccctgcccagtcgaaaatatcctgatacagctggcgatggatagttcgcaaatgcggtaaaccgcgcaccagcggaccaagctcaatggtcgcagcacgcagcgccgtcatttcgtaagcggcctgttccagccgctgctgctgatggaatactatgcagccattaaaaatgatgagttcatgtcctttgtagggacatggatgaaattggaaatcatcattttcagtaaacgcctcgcgaatcgggcaagccttgtgcgcctcaggtcgttcaggaacgagaccatcacgatgccgttcagcatggccacgccgaataccgcgatgaagccgatggctgacggcacggacaggtactggccactgatgaagagcccgacgatgccgccgatgatggcgaagggcacgttggcgatgatgataaagttctgcagaat

SEQ ID NO: 131963 - DNA, 2471 bp, Homo sapiens
  misc_feature (1)...(2471): n = a,t,c or g
atgttccagccttctgattccggtaaatcgttcatctttaatatgagcgtcggttacaacctcgaaggtattaagcaaccgccgatgcaacagttcatcgacaatatgatggacgcatctgaccatccgaaattcgctcaatatcgcgatacgctgaataaattactccaggatgacgcatttttagctcgccacggattgcaggaaaaacgcgaaagcttgcaagccttacccgctcgcatccccaccagtatggtgcatggcgtcaccctctccaccatgcacggctgtcctccgcatgaaatcgaagccatttgccgctacatgctggaagaaaaagggctcaacacctttgtgaaacttaacccgaccttactggggtacgcgcgtgttcgtgagatcctcgatgtctgcggtttcggttacataggcttaaaagaagagtcatttgatcacgacctcaagctgacgcaagcactggaaatgctggaacgcctgatggcactggcaaaagaaaaatcactcggctttggcgtaaaactgactaacactctcggcaccatcaacaataaaggcgcactgcctggtgactctacgagtggcgttctgcggacttacgagcggctcttgaccgcctggatgctgacatgcccatgcgctgatgagcatcaacgcggtgaaagcgtgaaattggcgacggctttgacgtggtggctgcgcggcagccagaaccgcgatgaaatcaccaaagacggtttccagagcaaccatgcgggcggcattctcggcggtatcagcagcgggcagcaaatcattgcccatatggcgctgaaaccgacctccagcattgacgtgccgggtcgtaccattaaccgctttggcgaagaagttgagatgatcaccaaaggccgtcacgatccctgtgtcgggatccgcgcagtgccgatcgcagaagcgatgctggcgatcgttttaatggatcacctgttacggcaacgggcgcaaaatgccgatgtgaagactgatattccacgctgcgcacaatcgataggcagtttttctaatggctgtattgtcggcgctgacacgctgccgatacagtccgaacattatcaggtcatgcgtaccgatcagcgtcgctatttcggtcacccggatctggtgatgtttatccagcgtctgagtagccaggtgagcaatctgggcatgggtacggtgctgattggcgatatggggatgcccgctggtgggcgtttcaacggcggtcatgccagccaccagaccggactggatgtcgatatctttctgcaactgccgaaaactcgctggacctccgcgcagctcttgcgcccgcaagcactggacttagtttcccgcgacggtaaacacgttgtctccacgctgtggaagccagaaattttcagcttgatcaaactcgccgcccaggacaaagacgtcacgcgcatttttgttaatccggcgattaaacaacaactttgccttgatgcgggcacgatcgcgactggttgcgcaaagtgcgaccctggtgtcagcatcggcgcatatgcatatttgctgacgttgcgcgcccagtgtctggcacatgacttgcctgacccgttagagccgctggaaatcgacggcacgctactgccgcgctatgtgttcattcacggcgggccgcgtgtgttcacctattacacgccgaaagaagagtctattaagctgttccacgactatctcgatttgcaccgtagcaacccaaatctggatgtgcagatggtgccagtgtcggtgatgtttggtcgcgcgccggggcgtgaaaaaggcgaagtgaacccgccgctgcgtatgcttaacggcgtacagaaatttttcgctgtactgtggctcggtcgcgacagttttgtgcgtttctcgccgtcagtttcgctgcgccgtatggcggatgaacacggcacggataaaactatcgctcagaaactgngcgcgcgtggcgcgtatgccactttgcccgtcaacgtctggctgccgtaggcccacgtttgcctgctcgtcaggatctgtttaataagctgctcgcctcccgcgccattgccaaagcggtagaagatgaagcgcgcagcaaaaaaatctcccatgaaaaagcgcagcagaacgcgattgcactgatggaagagattgcggcgaatttctcttacgagatgattcgcctgactgaccgtattctgggcttcacctggaaccgactttaccagggcatcaacgtccataacgctgagcgcgttcgccagctggcccacgacggtcatgagctggtatatgtgccttgccaccgcagtcacatggactacctgctgctttcttacgtgctgtatcaccaggggctggtgccgccgcatatcgccgccgggatcaacctgaatttctggcctgccgggccgattttccgccgtctgggggttatttag

SEQ ID NO: 131964 - DNA, 1460 bp, Homo sapiens
atgctaaagtcggttccaggtgaagcccagaatacggtcagtcaggcgaatcatctcgtaagagaaattcgccgcaatctcttccatcagtgcaatcgcgttctgctgcgctttttcatgggagatttttttgctgcgcgcttcatcttctaccgctttggcaatggcgcgggaggcgagcagcttattaaacagatcctgacgagcaggcaaacgtgggcctacggcagccagacgttgacgggcaaagtgcatacgcgctatgtgttcattcacggcgggccgcgtgtgttcacctattacacgccgaaagaagagtctattaagctgttccgcgactatctcgatttgcaccgtagcaacccaaatctggatgtgcagatggtgccagtgtcggtgatgtttggtcgcgcgccggggcgtgaaaaaggcgaagtgaacccgccgctgcgtatgcttaacggcgtacagaaatttttcgctgtactgtggctcggtcgcgacagtttttcagggattgtcggtgccgcgctactgatggcgggttgtagctccagcaacgaattgagtgctgccggtcagagtgtacgcattgtggacgagcagccaggcgcagagtgccagctgattggtactgcgacaggaggaacaatgtctcaggttcagagtggcattttgccagaacattcgccgcgcggcgatttggatcgaagccaacgtgaaaggggaagttgacgccctgcgtgcggccagtaaaacatttgccgacaaatctggcaacttttgaagcgaaattcccggacgcgcatcttggtcaacaatctgaggccagccttgatatcatgcgtaaccggctgaacatccgccagcagcagcggctggaacaggccgcttacgaaatgacggcgctgcgtgctgcgaccattgagcttggtccgctggtgcgcggtttaccgcatttgcgaactatccatcgccagctgtatcaggatattttcgactgggcagggcaacggcgtatcaccctgataaaccatgggtttgtgcccaagtcaacgacagttgtggaaacgaacggaccgagcgaccaaagcattgcaatgcgcaggccaggtcagactattagtaggatccaccaagtccagaaaaagctgggcatcgagctcaccaactgttatgaacacagcggcttaccagacattaaaaacgtcaccggtattttaatatgtcggcaaacccacgcccgccctgcgcgccttgccaggctcatcttcaccgccaataaaaccaatacgattaacgccctggttgatatagaagtcgatgatttctttactgatgcgtgccagatcgattgttgttttgagacagggtctcactccgttctcgccaggctcggaggggctagtgcgcaagatctccagctcgacgcaacctctgcctcccatggttcgaagtga

SEQ ID NO: 131965 - DNA, 962 bp, Homo sapiens
atggcgaatcacctgctgccggaccgctgttacaggacgacctacggccaagcgctcaacctcaaacgctatggtgccgagtcgcggaacctgattttgtctgccatttgcggccaggtcgcaacaccgtttcgcgccgatgtgttcatcgctcattttggtcccgcgggggtaaccgcagcaaaactccgcgaactgggtgtcattcgcggcaaaattgccactatcttccacggtattgatatctccagtcgggaagtgctcaaccactacactcccgaatatcagcaactgtttcgccgtggcgacctgatgttaccgataagcgatctgtgggccggaaggctgcaaaaaatgggctgcccgagggaaaaaatcgccgtatcgcgcatgggcgtagatatgacgcgctttagcccgcgtcccgtgaaagcgcccgcaacgccgctggagattatttccgtcgcacgcttaaccgagaaaaaaggcctgcatgtggcgatcgaagcctgccgtcagttgaaagagcagggcgtggcatttcgctatcgcatcctcggcattggcccgtgggaaagacgcctgcgcaccctcatcgaacaatatcaactggaagatgtggtggagatgccgggctttaaaccgagccatgaagtgaaagcgatgctcgacgacgcggatgtcttcctgttgccatcggttacaggtgcggatggtgatatggaaggtattccggtggcgctaatggaagcgatggcggtcggtattccggtggtttctactctgcatagtggaataccggaactggtggaggctgacaaatccggctggctggtgcctgagaacgatgctcgcgcactggcgcaacgactggcggcgtttagccaattggaccccgacgaattggctccggtcgtcaaacgcgcgcgcgaaaaagttgaacacgattttaaccagcaggt

SEQ ID NO: 131966 - DNA, 2633 bp, Homo sapiens
  misc_feature (1)...(2633): n = a,t,c or g
ttatacgacgcgtacgcccgcaggcatcatccgctccggcgttaacagcacgctttcactgccgtcatcggtttccgcacacaacagcatgcattccgacgtttcaccacgcattttcgctttttgcagattgcataagaccaccaccgttttccccatcagctcttcttcgctgtagtacggcaccaggctggtcacggtttgcagcgttttttgccccacatcaacctgtacgatgtacagcttgtcggcgttttcatggcgtttcacttccacaatctttccgacgcgcatttccagacgtgcaaaatcagcgtaagccacggtttccattgcttcctccctgcatatcccgacagcaaaagtaggccctgaattaacagtggcagcgaaacggcggtggacagcatcgtcgggctgaaactggactacgcaggtaaagacggctggagcgctagcgctacgctggaaggcgggccgaacctgagctacgcgaagagccagcgtacggcaagcctggcaggcgcaggcagtcagcactttaacgtcgatgacggtcagaagggcggcggcatcaatagcctgacaagcgtcggcgtgaagtacagcagcaaagaaagttcgctgaatctggatgcgtacaatctcggtacaaaatccgttaaccgtcttggttatggcgcgatgcaactggcaggtcctggagtttttgggcccccacgagatcggcacgtcgctataaacgtgctgcgtgaagcgctggcatgagcggtcatcatatggtacagcgactttatggtccgacgtatcaatagaatatcggaaagggttacntacgcccagcgcaatctgccagcagagagtaaatacggcgatcggcggcataaaacggatcgcataacgcgtcatcttgataacgcgattttcgacaaagaccggggcaaggcgtttttccagcggccacgtctttgagtaatgctgtccccggcgaaacaaggccgccagtcgttgcgccagtgcgcgagcatcgttctcaggcaccagccagccggatttgtcagcctccaccaggttccggtattccactgtaaccgatggcaacaggaagacatccgcgtcgtcgagcatcgctttcacttcatggctcggtttaaagcccggcatctccaccacatcttccagttgatattgttcgatgagggtgcgcaggcgtctttcccacgggccaatgccgaggatgcgatagcgaaatgccacgccctgctctttcaactgacggcaggcttcgatcgccacatgcaggccttttttctcggttaagcgcaggcgacgcagaacgatccgcgcgtcaccaaagtggggaactttctgcgccgtacctcgctggatgaattgccgcagtttatcaatgtgctgaccggggggatgtcgattgtcggtccacgtccgcacgcagtagcgcataacgaacagtatcgacagctcattgaaggctacatgctgcgccataaggtgaaaccgggcattaccggctgggcgcagattaacggctggcgcggcgaaaccgacacgctggagaaaatggaaaaacggggtggagttcgcccctgaagtccattcgcgaaatgaagcgtgtggttcggatatcaaaatcgttttcctgaccggtgttcaaaggtttcgttaccaaaccggcatattgatatgagcttacgtgaaaaaaccatcagcggcgcgaagtggtcggcgattgccacggtgatcatcatcggcctcgggctggtgcagatgaccgtgctggcgcggattatcgacaaccaccagttcggcctgcttaccgtgtcgctggtgattatcgcgctggcagatacgctttctgacttcggtatcgctaactcgattattcagcgaaaagaaatcagtcaccttgaactcaccacgttgtactggctgaacgtcgggctggggatcgtggtgtgcgtgccggtgtttttgttgagtgatctcattgacaccgtgctgaataaccagtacttggctccgttgattaaaacattatcgctggcgtttgtggtaatcccccacgggcaacagttccgcgcgttgatgcaaaaagagctggagttcaacaaaatcggcatgatcgaaaccagcgcggtgctggcgggcttcacttgtacggtggttagcgcccatttctggccgctggcgatgaccgcgatcctcggttatctggtcaatagtgcggtgagaacgctgctgtttggctactttgtccgcaaaatttatcgccccggtctgcatttctcgctggcgtcggtggcaccgaacttacgctttggtgcctggctgacggcggacagcatcatcaactatctcaataccaacctttcaacgctcgtgctggcgcgtattctcggcgcgggcgtggcagggggatacaacctggcgtacaacgtggccgttgtgccaccgatgaagctgaacccaatcatcacccgcgtgttgtttccggcattcgccaaaattcaggacgataccgaaaagctgcgtgttaacttctacaagctgctgtcggtagtggggattatcaacttttcggcgctgctcgggctaaaggtggtgaccaaaaa

SEQ ID NO: 131967 - DNA, 3472 bp, Homo sapiens
gagtgttttcatggaatttaccaccggattgatgtcgctcgacaccgcgcttaatgagatgctttctcgcgtcaccccactgaccgcccaggaaacgctgccactggtacagtgttttggtcgtattctggcgagcgatgtcgtttcgccgcttgatgttccggggtttgataactccgcaatggacggctacgcggtgcgtttagccgatattgcctccgggcaaccgctgcccgttgccggtaaatcctttgccggtcagccataccatggtgaatgggctgcgggtacctgcattcgtattatgaccggtgcgccggtgccggaaggctgcgaagcggtggtgatgcaggagcagactgaacaaatggacaatggcgtgcgttttactgctgaatgcgtagcgggcgaaatattcgccgtcgcggggaagatatctctgggggggcgggggtttccccgcgggaatcgcctgagtaacgcgaggtgccggaaatgggtcccgggggggccgcaaaccggggtaccaaaagggtttaaagcattgggtattgccggcccagatgcacggagcaaccttgctggatgctcagcaacgggtgttacgccctgccatttgtggaacgacgggcgctgtgcgcaagagtgcactttgctggaagcgcgagagcataaccattatgcgtacatctacaacgaactggtgtggaacgtgctcaaggacaccgttggtgaggaagaagctgtcttgtttgcccgctcggcctccgtcggtgcgcagaaattcccggtacactggggtggcgattgttacgctaactacgaatcaatggcggaaagcctgcgcggtggtttgtctattggcctttcaggttttggcttctggagccacgatatcggcggctttgaaaataccgctccggcgcacgtttacaaacgctggtgcgcgtttggtttgctctccagccatagccgtttacacggtagcaaatcttatcgtgtgccgtgggcctacgatgatgagtcctgtgatgtggtgcgcttcttcacgcaactgaaatgccgcatgatgccgtatctgtatcgtgaagctgcgcgtgcgaacgcgcggggtacgccgatgatgcgggccatgatgatggagttcccggacgatccggcttgtgattaccttgaccgtcaatacatgttaggcgacaacgtgatggttgcgccggtgttcactgaagcgggcgatgtgcagttctacctgccggaaggtcgctggacacacctgtggcacaacgatgaactcgacggtagtcgctggcataaacagcagcacggcttcctgagtctgcccgtttatgtgcgtgataacactctactgggcgctgggcaacaacgatcaacgtcccgattacgtgtggcacgaaggcacggcattccacctcttcaatctgcaagacgggcatgattctactgtgggcaaatgctctcaaacagcattgcttgctatcgagaaatcttccctgaaagggagagtcaatcaatgtagcaaactcattgttgtcttattttaatctcagaccacagtgcaatcaaactagaactcaggattaagaaactcactgaaaaccgctcaactacatggaaactgaacaacctgctcctgaatgactactgggtacataacaaaatgaaggcagaaataaagatgttgttcgaaaccaacgagaacaaagacacaacataccagaatctctgggacacattcaaagcagtgcgtagagggaaattgatagcactaattgcccacaagagaaagcaggaaagatccaaaattgacaccctaacatcacaattaaaagaactagaaaagcaagagcaaacacattcaaaagctagcagaaggcaagaaataactaaaatcagagcagaactgaaggaaatagagacacaaaaaaacccttcaaaaaattaagaacgtcatcagctaaagcaagccatagagaaaattggcagtcttgatcaggctgttaaggaacgtgataagtcaataatggatcttaaccagaccattgagacgatgaacaaagcagagcaacattttcacagccaggaagtgaaaaatgaatcagaacaagccaagtatgctgacaggcaaatggaacgaaaagctgaagttcagaaacaactggttgcggcgggtaatgttcgccagcgtattcctgctgacactcagcggttgctccgggagtcgatcagcgaatttaacgccgacgccgacaaagggatttttatgtctgataaagtaacagtaaagcaaactatcaacaaagcgacttcaatctacaaaattgagcaaatcactgttggcaagccaggatctgaacaataccgtcgtgctttcgagcttgccgatcagcttggtttaaaacacccggattgcattgagcatgtatttccgacctatgctgatgagcaatgtactcatgttcttaccgaagaggattttttcagcactgaagaacgagaaggcgttgatcgctgcattggtgtgatttgttcttcggtaagtgatgagttattccctaatgtgcctgaatatggtggtattggataccaattcctgtacgagggcgatgagcttaaatgctatgaacatgacattgaaagtaaggcaaaagaactaacagttaattcaaacaacactgtgcagcctgtagcgttgatgcgcttgggggtattcgtgccgaagccatcaaagagcaaaggagaaagtaaagagattgatgccaccaaagcgttttcccagctggagatagctaaagccgagggttacgatgatattaaaatcaccggtcctcgactcgatatggatactgatttcaaaacgtggatcggtgtcatctacgcgttcagcaaatacggcttgtcctcaaacaccatccagttatcgtttcaggaattcgctaaagcctgtggtttcccctcaaaacgtctggatgcgaaactgcgtttaaccattcatgaatcacttggacgcttgcgtaacaagggtatcgcttttaagcgcggaaaagatgctaaaggcggctatcagactggtctgctgaaggtcgggcgttttgatgctgaccttgatctgatagagctggaggctgattcgaagttgtgggagctgttccagcttgattatcgcgttctgttgcaacaccacgccttgcgtgcccttccgaagaaagaagctgcacaagccatttacactttcatcgaaagccttccgcagaacccgttgccgctatcgttcgcgcgaatccgtgagcgcctggctttgcagtcagctgttggcgagcaaaaccgtatcattaagaaagcgatagaacagcttaaaacaatcggctatctcgactgttctattgagaagaaaggccgggaaagttttgtaatcgtccattctcgcaatccaaagctgaaactccccgaataa

SEQ ID NO: 131968 - DNA, 816 bp, Homo sapiens
atggaaggcgctgaatttacggaaaacattattaatggcgtcgagcgtccggttaaagccgctgaattgttcgcgtttaccttgcgtgtacgcgcaggaaacactgacgttcttactgacgcagaagaaaacaggctcacggtccgggtgtggggtttgggagaggatgcaggacagataaccagtacagtgcagtgcagtaattggcaagaggaggtgcttacagatgctgctgatgagatggttttggcttctggagccacgatatcggcggctttgaaaataccgctccggcgcacgtttacaaacgctggtgcgcgtttggtttgctctccagccatagccgtttacacggtagcaaatgttatcgtgtaccgtcgaaaatataccacggaactgggcactgtgcttcctggagataataggctttcagagggttatttgaatatctataacaactattttaaagcgccgtggatgcctgaccgtaccgaggctaaccctaatgagcttaatcaagatgatgctcgttatggtttccgttgctgccatctcaaaaacatttggactgctccgcttcctcctgagactgagctttctcgccaaatgacgacttctaccacatctattgacattatgggtctgcaagctgcttatgctaatttgcatactgaccaagaacgtgattacttcatgcagcgttaccatgatgttatttcttcatttggaggtaaaacctcttatgacgctgacaaccgtcctttacttgtcatgcgctctaatctctgggcatctggctacgatgttgatggaact

SEQ ID NO: 131969 - DNA, 4207 bp, Homo sapiens
gtgattggatcatgtgggtggatccctcgtgaaatcgtcgccgttcatccgcaacgtttaagcgaagtagaaggcgtgaataaccgcctgcaactctcccgtctggagcgtgtttatcagtccgaacaggctgaaaaactgctgttagcaggcgttatgctgcgcgatccagcgcgttttgatctgcatgcgaatctggcagcggcctgtaccattggcccgtttgcccgtttgcgtcctggtgctgagttgctggaaggtgctcacgtcggtaacttcgttgagatgaaaaaagcgcgtctgggtaaaggctcgaaagctggtcatctgacttacctgggcgatgcggaaattggcgataacgttaacatcggcgcgggaaccattacctgcaactacgatggtgcgaataaatttaagaccattatcggcgacgatgtgtttgttggttccgacactcagctggtggccccggtaacagtaggcaaaggcgcgaccattgctgcgggtacaactgtgacgcgtaatgtcggcgaaaatgcattagctatcagccgtgtgccgcagactcagaaagaaggctggcgtcgtccggtaaagaaaaagtgatgtggcagcatcattgagaaaaccacgctgtcatctcgcccgttttactggtgccctggctgccaacactatgccgaccgcttcggcgcataacaaaagcacgataacgacgatcggctgctggcgctgttattactgaatactttcactccccgtgcgcaactcgcctcggcgcttaatttgccagaaacgtgggtagcagagcgtctgccccggttaaaacagcgttatgaacgcacttgttgcctggccagccgccctggtttgggccatttcattgatgagacagaagagaaacgcgttatcttgctggcgaacttgctgcgcaaagatccgtttttaattccgctggcgggcataacacgagacaaccttcagcatttatccacggcctgcgacaaccaacaccgctggccgctcatgcagggtgattatctctccagcctgattctggcgatttacgccctgcgtaatcaactgaccgatgagtggccgcaatatcccggcatcgctcatgacctgcgggagttcttcgatatgtctgaccagatagttgtgtttggtgatggggatagagatgccgtaggtgtccacttcctggaaggcgtcggtgccgatcatcgaggcgggaacctgaccagtgatgcaaatcagcgggatggagtccagccgcgcatcggcaatggcggtcaccaggttagtcgcacccggtctctacggcagtttacgccacaaacaagcaacagtcactggatgaccaatgcccagttactgggcgatttcagtatcgataactaccagttgtatagcctgggccactatccaggcgcagttccggggaacggaacggtacacggtgaagtttatcgtattgacaacgccacgctggccgaacttgatgccttgcgcaccagggcggtgaatacgcgcgccagttgacgctcgggggtattccaaggggggatccccttaagcaagactactcgcgtatgcttatcgatcacgtcgaaaaaggcgcacgttgcaccgttgcttgtatgccagtaccgattgaagaagcctccgcatttggcgttatggcggttgatgagaacgataaaattatcgaattcgttgaaaaacctgctaacccgccgtcaatgccgaacgatccgagcaaatctctggcgagtatgggtatctacgtctttgacgccgactatctgtatgaactgctggaagaagacgatcgcgatgagaactccagccacgactttggcaaagatttgattcccaagatcaccgaagccggtctggcctatgcgcacccgttcccgctctcttgcgtacaatccgacccggatgccgagccgtactggcgcgatgtgggtacgctggaagcttactggaaagcgaacctcgatctggcctctgtggtgccggaactggatatgtacgatcgcaattggccaattcgcacctacaatgaatcattaccgccagcgaaattcgtgcaggatcgctccggtagccacgggatgacccttaactcactggtttccgggcgtgggccgacgcttgagtgtgacatcgaccgcgtgcgcgccatccgtaaaagtcggctggtggaagtggcagaagggcagcctgcgcagggcgatttcccagcctgcctggtcgccaatgaaaattatcaccatttccgcgtggtgctggtgcgtaccgatccggcaaccgagcgtttgattttaaccgccgcacaactggatgccctcaaatgccacgccggggatcgcgttcgtctggtgcgcctatggtgcgattcgccaggtgatgcgccagtgccagttgttgatgattatcgcaaagtggtgcgtaaagacaccaaagggttgatcgctcgttggaagtatttctggatgtcggtcattgcgctgggtgtcgccttcgccctgtaccttgccggcaaagacacgcccgcaacgcagctggtggtcccattctttaaagatgtgatgccgcagctggggctgttctacattctgctggcttacttcgtcattgtgggtactggcaacgcggtaaacctgaccgatggtctcgacggcctggcaattatgccgaccgtatttgtcgccggtggttttgcgctggtggcgtgggcgaccggcaatatgaactttgccagctacttgcatataccgtatctgcgacacgccggggaactggttattgtctgtaccgcgatagtcggggcaggactgggcttcctgtggtttaacacctatccggcgcaggtctttatgggcgatgtaggttcgctggcgttaggtggtgcgttaggcattatcgccgtactgctacgtcaggaattcctgctggtgattatggggggcgtgttcgtggtagaaaacaaacgctgacatctcaatattccagagaagaggatgagtgtgaagggtggtggcgattttaaacaaggtgatcaggaagaccttgtggataacttcgggtctgagcacactccatcaggctgcttccacttactccaatgggctgctggagcagtcagtcatggggccgccagcagcaatgggggcctgcacccgctcagccaagggagggcagaggagaggaatagccatgggacccgaatgcccggatgacgttacagccaaaaccgttctctcctgaaagctcagggggaaacagggagcaggtaaagctgctgagcagctctgttcaaggctcactaaaaaggggtttctcagcccacttccagatgtgggggagggatcatctgactgacttcatggtgcgggtccttctgctgtctggaagcctgagtgctaggccctgccccttggatgaacatgctgcactccccaaggacccctgtgaggcaaggcagaaatggcttcctaggggacccagcaagtccacagggcttttctcactgcttcctctactcctgtatttcggttggctttctaagttcactcagctccagaccttcaggttcctgactgagggtgtgtgtttggggatggaagattccccctttcccacctccacagtttgggcactcacagtatgtgggggtgtttcttggagcctgcaggagcaatccacttccttcagaggtggggtatctccagtgtctgtattagatgaaccagactttaagaattccacgccaccacatgactttgcttttacctcgtttcaccaacttaaaaccaaatcctttgttgaaaccctctctgggagctttgacaagctcagggggtacaagtctctgggccagcttgtttctcacatacccaaagatgagccctttgatcataagcacttcaaaaattttaccttcatgatagaattctttccaaaacgtgttgcatactttcctgccttgaccggaggactttacctcctaggagccgcagcttcctacagaagaccagtgggtgtgccagcgatgttagaatgggtccacgtgccccaggaaggcagccttttccgcagcacagaagtgggagagcatagctggaaggaatggaggacagcggagcagaactcaggaccagagggaggcctgaaggaagttgtcttagtgtag

SEQ ID NO: 131970 - DNA, 493 bp, Homo sapiens
atctataatccggctttgaccgatatttttgttcccgcactcccccgccgccaccatataacaggtggtatccagcgcacgagcggcaagcaacgttgaccagtgatgctctttgagcggcccgcgaacccaggcggcaggaagtaccaggatttcagctccctgtaatgcctgtgccagcgccagctctggaaagcgtaagtcataacaggtcatcagaccgaccttcatcccttccacctccagtaacggagcgatttcattaccagcatcaacacggcgtgattcctgaatggcaaatgcatcatagagatgcagtttggcataacgggcgacgatgtttcctgcctgaagtgccaccagcatattccatgcgcgccccggcgttgaaggaacatgaatcgtcagaattgtcgtcatcatgttacgtttactttctcgccgtaaagtccgaggaattcgccttccagcagctgtgctgatttagccgata

SEQ ID NO: 131971 - DNA, 1203 bp, Homo sapiens
atgacacggtacttttttccagtccgggcttctggcgcggccaaaaaaaccttctcgccagaaagcgaagattatctgaaaaatcctgtgttcgtattccagccagtagtctggcgactctttctggctaccgttaacgatgttctgcttgaacataccgtagtcatagcggatgccgtaaccgcgccccggcaacaatttccggcggacaaacgcaggataagatcccgcagtttggtcagcaaacgccgtatgaaacgtgcggggcaaccggcggaactggcccctgtatatgtttataaacgcatgaagattcaacatgttgcaatagattttgtaggcctgataagcgtagcgcatcaggcattgagcacctaatgccggatgcgtcgtgaacgccttatccggcttcgctttggcggtttcttcgccgaccagacctatcttcaggtaacccgcctgatgcagcgtatccattaccttcatcaacgtctcgtaatcgacggttttgtccgctcggaagaagatggtggtgtctttcttgccttcggttaacgcacacccggggatcctgtagagtcgttcatccgcaacgtttaagcgaagtagaaggcgtgaataaccgcctgcaactctcccgtcgggccaaaatcttcccaggaagccgggattgggattatccatcaggaactgaacctgatcccgcagttgaccattgccgaaaacattttcctcggtcgtgagtttgttaatcgctttggcaaaattgactggaaaaccatgtatgccgaagcggataaattgctggctaaacttaacctgcgctttaaaagcgacaagctggtgggcgatctttccatcggtgattatgcaggcgtggtgcacgcggtcaatgatgtcggtacggcgggtatcaggaatagcgaccgtagtcactggcgtgcggcctggcggcagctcatctatcaccgaggtatcgagatcggcatacgcagtcattgccagcgtgcgggggatcggcgtggcggtcatgatcaactgcaacaacataccgcctgcagccggtttgccgtctacgtcgccggtgcgaataaacaggcgcgtcggcagctgttcagaatttcctgcctgaagtgccaccagcatattccatgcgcgccccggcgttgaaggaacatgaatcgtcagaattgtcgtcatcat

SEQ ID NO: 131972 - DNA, 764 bp, Homo sapiens
gactcaggacaacagctggacgatgtccagcttgctcgctaccttttgtcgggtcaaaatcaacccaaatcagatcgcccatatcgggtacgtatcggcttaccattaccagacttccttatctttcggctctccccagtcgatattctcgtggaggttttcggcgggatgtctttgaccattcaacaagcagcccttcagatacaggcgatcaacaccggcattctgattgccaacggcgcagatatgaaacgctggctggcgaagctgaccaacaataatgctcagggcgaatactacatcaccgacattattgcgctggcgtatcaggaagggcgtgaaatcgtcgccgttcatccgcaacgtttaagcgaagtagaaggcgtgaataaccgcctgcaactctcccgtctggagcgtgtttatcagtccgaacaggctgaaaaactgctgttagcaggcgttatgctgcgcgatccagcgcgttttgatctgcgtggtacgctaactcacgggcgcgatgttgaaattgatactaacgttatcatcgagggcaacgtgactctcggtcatcgcgtgaaaattggcaccggttgcgtgattaaaaacagcggtgattggcgatgattgcgaaatcaatccgtataccgttgtggaagatgcgaatctggcagcggcctgtaccattgggcccgtttgcccgtttgcgtcctggtgctgagttgctggaaggtgctcacgtcgtctctagtcccacccgatga

SEQ ID NO: 131973 - DNA, 1463 bp, Homo sapiens; identical to SEQ ID NO: 131885

SEQ ID NO: 131974 - DNA, 988 bp, Homo sapiens
tggtcgaaaatgtcgcgtgccgttcgcccaagcgactgggagagctggacacagacgcgtgaggtggtgcgacaaaccgtccggtgtagaccagatccgccatctgcagcagtttgtctgactgccagttcgccagcgaattgcggtattcccattggctaatgaatgctggcagagattctggcttaacgcggaagaagttaacatcgacattattaacgttgagcgccattaccggcagcccttcaacgactttgccaggcagcagcgaaccacggctggcatgagcttctgcaaaacgccctggcgcagtagccagcgtggtgatcctcccatcgtcgttggtgaaacggcggtgattgaaaacgacgtatcgattctgcaatctgtgacgcttggcggtacgggtaaatctggtggtgaccgtcacccgaaaattcgtgaaggtgtgatgattggcgcgggcgcgaaaatcctcggcaatattgaagttgggcgcggcgcgaagattggcgcaggttccgtggtgcgctcccggataccccaactgccgccaggcttcatacaccactaccgagaccgcattggacagattcatgctgcggctgtccggcaccatcggaatgcgaatttttggttcagcgggcagggcatcaagaatgctcgctggcaggccgcgtgtttccgggccgaacatcagataatcgccatcctgatagcttacggcgctgtgagcaggtgtacctttcgtggtgagggcgaacaggcgctggggattttctgcttcgaggaacgcgcgatagtcatgatgacgcgtaacggcggtaaactcgtgatagtccagccccgcgcggcgcaggcgcttatcgtcccaggcaaatcccatcggttcgatgatatgcagacgaaagccggtattagcgcaaagacggatgatgttgccagtatttggcggaatttctggttcgtaaagtacgatgtttagcat

SEQ ID NO: 131975 - DNA, 1287 bp, Homo sapiens
atggtggtggtcaaagtagggattattgtcgtgttcggttttgcgatgatcccgcactggaatttcgccaatataaccgccttcccgcaagcctccgtctttttccgcgatgtcttgcttaccattccattttgcttcttttctgcagtatttattcaggtacttaacccaatgaatattgcctatcgtaaacgggaagcggataaagtactggcaacccggctcgcgctgcgtacccaccgaattagttatatcacgctcatcgcggtgatcctgttttttgccttttcgtttaccttctcaattagccacgaagaagccgtttctgcctttgaacaaaatatctcagcactggcgctggccgcgcaggtgatccctgggcatatcattcatatcacctctacggtgcttaatatctttgccgtactgaccgcattctttggcatttatctcggtttccacgaggccattaaaggcattattctcaatctgttaagccgaattattgataccaagaaaattagggtacgagctagagttcgttcaggcggcacgaacataacgccatgggttgctggcatcattgcttttcgcatcacccggacagttagaagaggctacccaccaggcatttttatataccgcaccattaaagacgacataccaggtctgaccgccctgctgtttattccaggcaactacagaagaattagacggaacagtgccctgtgctggtgtagccgaaccgccattagccggcgtattggatgcaggcagtggaagcgaaggagtcaaaaaatgaaaggtgatactaaagttataaattatctcaacaaactgttgggaaatgagcttgtcgcaatcaatcagtactttctccatgcccgaatgtttaaaaactggggtctcaaacgtctcaatgatgtggagtatcatgaatccattgatgagatgaaacacgccgatcgttatattgagcgcattctttttctggaaggtcttccaaacttacaggacctgggcaaactgaacattggtgaagatgttgaggaaatgctgcgttctgatctggcacttgagctggatggcgcgaagaatttgcgtgaggcaattggttatgccgatagcgttcatgattacgtcagccgcgatatgatgatagaaattttgcgtgatgaagaaggccagatcgactggatggaaactccacttgatctgatgggtaccgagctacgagttcgtctatccctcgtgttttatgcagaaaatctgatagagaaacattaa

SEQ ID NO: 131976 - DNA, 958 bp, Homo sapiens
tcaaatacgcctgcatccaatacgccggctaatggcggttcggctacaccagcacagggcactgttccgtctaattcttctgtagttgcctggaataaacagcagggcgctcagacctggtatgtcgtctttaatggtgcggtatataaaaatgcctggtgggtagcctcttctaactgtccgggtgatgcgaaaagcaatgatgccagcaacccatggcgttatgttcgtgccggtagttctgaaaaacatgtccgacttaagcctggaaacgacgctgtttaatgagaaattgtcgatgccggtgggctggctccggtgggtttgtgtggcatgtatgcgcgtcgtggcgaagttcaggcagccaaagcggcggacgcgcatggtattccgtttactctctcgacggtttccgtttgcccgattgaagaagtcgcgccagcatgcaagcgcccaatgtggttccagctttatgtactgcgcgatcgcggctttatgcgtaacgcgctgaagggttttcatgccttgcaggcctatcgcatcggtcactggttgtggaatcaggggcgtcgcgcactggcaatctttctgcaaaaccaggtttctgtgacgttccaggtcgatattcacccggcagcaaaaattggtcgcggtatcatgcttgaccacgcgacaggcatcgtcgttggtgaaacggcggtgattgaaaccgacgtatcgattctgcaatctgtgacgcttggcggtacgggtaaatctggtggtgaccgtcacccgaaaattcgtgaaggtgtgatgattggcgcgggcgcgaaaatcctcggcaatattcaagttgggcgcggcgcgaagattggcgcaggttccgtggtgctgcaaccggtgccgccgcataccaccgccgctggcgttccggctcgtattgtcggtaaaccagacagcgataacccatcaatgt

SEQ ID NO: 131977 - DNA, 5082 bp, Homo sapiens
atgcaggttggcgatttctcgaccggggtagatcttaatggcaacaataacagcgtgacgctggcggcaaaagatctaaaagtggtcgggcagaaagcgacgggcataaacgtttctggcgatgcgaatacagtgaatatcactggtaacgttctggttgataaggataaaaccgcagacaatgcggcggaatatttcttcgatccatccgtgggtatcaacgtttacggcagtgataataacgtgacgctggatggaaagttaactgttgtatcagacagtgaggttacttctcgtcagagtaatttatttgatggcagcgcagagaaaacgacttttgttggcggtaactgtaccgtaagcctgatgttgatgtcgttgggtggtttattcgccaatgatcttgttgattgggtgtccgttgcaacctaccaggccgcttccggcggtggtgcgcgacatatgcgtgagttattaacccagatgggccatctgtatggccatgtggcagatgaactcgcgaccccgtcctctgctattctcgatatcgaacgcaaagtcacaaccttaacccgtagcggtgagctgccggtggataactttggcgtgccgctggcgggtagcctgattccgtggatcgacaaacagctcgataacggtcagagccgcgaagagtggaaagggcaggcggaaaccaacaagatcctcaacacatcttccgtaattccggtagatggtttatgtgtgcgtgtcggggcattgcgctgccacagccaggcattcactattaaattgaaaaaagatgtgtctattccgaccgtggaagaactgctggctgcgcacaatccgtgggcgaaagtcgttccgaacgatcgggaaatcactatgcgtgagctaaccccagctgccgttaccggcacgctgaccacgccggtaggccgcctgcgtaagctgaatatgggaccagagttcctgtcagcctttaccgtgggcgaccagctgctgtgggggccgcggagccgctgcgtcggatgcggcttttactgcaccaccagaaactggcgcatccagcatttccagatcgaatccagccagagcggtagcaatttcttgcgcatcagcactagcgatagtggaagaaaccattactgccgtaccgggtttcagatgttgtgcaacgcctgtttcaccaaacagcacctgtttaacctgggccgcattgaccaccagcaccagcagtgcgtccagtttttcggcaaacgtcgcggcgttatcagaaaccccgcaagcacctgcctctttcaacgtagcgcaggcattgctgttcaggtctgcgccccagtgatcggacatgattcggcgccacaaaatgccactcttagggatgatgaaacgctggcttcccgtcacgcgcaaattgtggcgcgtattgatacggtaaaacagcagtggcgcgacgcagtgggtgaactggatgcgctgatcgaatcttctggtattgatcgacgcaagtttaaccgtagcaatcaggctaaatggatcgacaagatcagcgcctgggcagaagaagagacaaacagttatcagttgccggagtcgctggaaaaattctcccagcgtttcttagaagatcgcacgaaggccgggggggaaaccccgcgacatccactgtttgaggcgatcgatcaactgcttgcagaaccattgtcgatccgcgatctggtgatcacccgcgcattggctgagatccgcgaaacagtagcgcgtgaaaaacgccgccgtggcgaattgggttttgatgacatgttaagtcggctcgattccgcgctgcgtagcgaaagcggtgaggtgttggcagcggcgatccgtacgcgattcccggtggcaatgatcgatgaatttcaggataccgacccccagcagtaccgaatttttcgccgtatctggcaccatcagccggaaaccgcattgttgctaattggcgaagaagacgtggcgaaaaatctgcaatggagccacgatggtaaatgcctgaagcccggtcaactggaaggcgtggaaattaaggctgatttaagccagtccgcattagtcatttcactaccgcaggcttacctcgaatatacctggcccgactgggatccaccttctcgttgggatgatggcatctccgggatcattgcggactacagcatcactgcgcaaacacgacacgaagaaaatggcggcgatgacagtaacgagatcagcggcaacgggacggtcggggttaacctggggccatggcgtatgcgcgctgactggcagaccaactatcaacatacgcgcagtaatgatgatgacgatgaatttggcggcgatgacacacaaaaaaaatgggagtggagtcgctattatgcctggcgggcgttaccgtcattaaaagccaaactggcgctgggcgaagattacctcaattccgatattttcgacggttttaattatgttggtggcagtgtcagcactgacgatcaaatgttgcctcccaatctgcgcggctacgcgccagacatttccggcgtggcacacaccagagcaaaagtgaccgtcagccagatggggcgtgtgatttacgaaacgcaggttccggctggaccgtttcgtattcaggatctcggtgattccgtctccgcatggctggtggcacataaggatgatatagagcgccattacggggaaccactgtacaaagttgttggtgttgtgacgccattttcggcgcaggttaatgctatcaaaatgtcattgcgtaagctggaaattaatggcaaagacgagcaggccttctatccgctcaatgagtcggtcgccattgcccgggcgcgtgacaaattgcgttccatgcaactgctggcgcgtcagggcatcgacctgcctgtcacgggcattgcgcattcgccggatgataccagcgatttaatcgacatggtcggtggtgcgccgctggtggtcaagttggttgaaggcacgcagggaattggcgtcgtgctggcggagacgcgtcaggcggcggaaagcgtgattgacgctttccgcggtctgaacgcgcatattctggtgcaggaatatatcaaagaggcgcaagggtgcgatatccgctgtctggttgttggcgatgaagtggtcgctgcgattgaacggcgggcgaaagagggcgattttcgttccaatttgcatcgtggcggcgcggcaagcgtcgccagtatcacaccacaggagcgtgaaatcgcgataaaagccgcgcgaacgatggcgctggacgttgctggtgtggatattctgcgtgctaatcgcgggccgttggtgatggaggtgaatgcgtcgccggggctggaaggaatagaaaaaaccaccggtatcgacatcgcggatttgtcagaagtggcgctgcgccagcgtattctgaaaaacatgtccgacttaagcctggaaacgacgctgtttaatgagaaattgtcgatgccggtggcactggctccggtgggtttgtgtggcatgtatgcgcgtcgtggcgaagttcaggcagccaaagcggcggacgcgcatggtattccgtttactctctcgacggtttccgtttgcccgattgaagaagtcgcgccagccatcaagcgcccaatgtggttccagctttatgtactgcgcgatcgcggctttatgcgtaacgcgctggagcgagcaaaagcagcgggttgttcgacgctggttttcaccgtggatatgccgacaccgggcgcacgctaccgtgatgcgcattcaggtatgagcggcccgaacgcggcaatgcgccgctacttgcaagcggtgacacatccgcaatgggcgtgggatgtgggcctgaacggtcgtccacatgatttagtggttgtcgtactggtggtgacatttgcgaacgtcttcaccatcattcaacctgtggttgaagccggagactgggacagcacattgtggatgattggcggccctgtcttcttctcgctgttagcgatggcgatttaccagaactattgcagcagagtggcaaaaaatccgcagtgggcgggcgtaaagacaggaaatgttatggatgacaccagccgggacccggcaataaccgaagatgaaatcagggcgctgcaattttctgccggggatgtagcggaaatagagcagacgattctctcttttgtcgatgcctgccacacccgtaaagtggcgatggtggtgggtagcaccattaacaccctcaaagatcgcgatgcgaaattaagcgagcggttaccttatgagtgcgcgcatgtttgtcttatgctgcatctggtttatggtggcgttcctcttctggagcaccagttacaactgttgcaagaagcggtaaacagcaagcgcctgactttaaccgaaaaaacggcgcaggaagccgtctccccggatgaagccgcgcgtattcaggctaatccgctggtgaagcaggaactggaaattaaccagcagttaagtcagcgtctgattaccgcgactgaaaacggtaatcagttgatgcagcaaaacattaaagtcaaaaactggctggagcgggcgctgcaatcggaacgcaatattaaagagcagattgccgtcctgaagggcagcctgctgttgtctcgtatcctttaccagcaacaacaaacgctgccctcggcggatgaactggaaaacatgaccaaccgcatcgcggatttgcgtctcgaacagtttgaagttaaccagcagcgtgatgcactcttccagagcgatgcgttcgtcaacaaactggaagaaggtcacaccaacgaagtcaacagcgaagttcacgatgcgttattgcaagtggttgatatgcgtcgcgaattgctggatcaactcaacaaacagttgggtaaccagctgatgatggccattaacctgcaaatcaaccagcagcagttaatgagtgtgtcgaaaaacctgaaatccatcctgactcagcaaatcttttgggtgaacagtaaccgtccaatggactgggactggatcaagcgtagaccaaatttctgcggcatataa

SEQ ID NO: 131978 - DNA, 258 bp, Homo sapiens
atgaacgtagttgcaaaaatcctcaacaaaatgctagaaaaccaaatccaacagcacatcaaaaaggtaacccattatgatcgagtagattttattcttgggttgcaaggttttcgttatgaaatctttgccattacctatgtcctgaatggtattatggagatgattaacatcgacttactgacggcaatgctgcttgagccacaactgccgcaaatcagtagcgccagcctgacggtggacaaaattgcaaagtga

SEQ ID NO: 131979 - DNA, 2448 bp, Homo sapiens
ttatttcagttcgagttcgttcattgcagcaatgctgaaaccgccgtcaacgtggaccacttcaccggagataccggcagagagatcggagcacaggaatgccgcagagttacccacatcttcaatagtaacggtacggcgaatcggggtaacggcttcgcaatgagccagcattttgcggaagtctttgataccggaggccgccagagtacggatcggaccagcagagatggcgttaacacgcacaccttccggacccatcgcgttcgccatatagcgcacgttcgcttccagagacgcttttgccagacccataacgttgtagttcgggatagcgcgctcagcgccaaggtaggaaagggtcagcagggcagaacccggattcagcatggagcggcaagcttttgccattgcaacgaagctgtaggagctgatgtcgtgggcaattttgaagccttcacgggtaacggcgttaacatagtcaccatccagctgatcgccaggtgcaaaaccaatagagtgtacgaaaccgtcaaatttcggccaaactttccccagttcagcgaacatggtgtcgatgctggcatcttctgcaacatcgcactgcagaacgatgtcagaacccaattgagcggcaaattcttctacgcggcctttcagtttgtcgttctggtaggtgaatgccagttcagctccttcgcggtgcatcgcttgagcgataccgtaggcgatggatagtttgctggcaacaccggttaccagaatgcgcttaccggaaagaaaacccatagctttaatccttattgttgatgcttgttgtgccttctccttctcctcttccttctcctcggggaagaaaagaccttccaattccccaggctcaaggaggctgggctcacctccatccggtgctggtagggcagggggcattgtcactgttgcctgctgagccagactctccacctgcaataccaagcagccaaagatggcaggtagggcctcagccatgatcccattgatgctaactaaggggaccctgaaatagccctgggcagctgatcccgggctgcactcaggcctgccaaagcttgagccacaatgctctctgccaaggtctctgcgattgatagtcagggcttcgccattatcgataatggtcgttcccacatcgtgcactgcttgttgtgtcggctgcgtaccttcgatgaaatactcttcgcggctgttgccaccattagctaactgcccggtgctgcgatcgatattcaccgtcacaatacccggtggcggcgtcagcggctgctccggcacaccttcaagaacggctttcatataagcgtcccatgcaggctgggcactcttggcaccgccttcgtaacctgagatctgatctttaatcgctccggaagccgttgtatgaccgagattacgacggtgatcatcaaagccaatccagaccgaggtcacaacgcccggaccgtaacccgagaaccacgcatctttcgaactgttagtggtcccggttttcccgccgatatcgcgacgctgcaaatcacgacctgcacgccagccagtaccctgccagcctggctcaccaaagatattggtgttcaaagcactcttaatcaggaatgccagcggagtgttgatgacgtgcggtgcgtactcctgcgcgccagtcttcgccactaacgcctgatttgcctgctccagctgcggcattggtacagaaacattctgctgctgtgcatacgaataggactgggacttctgaatggcttggggagttccttggtggaagccacttgtggctgacttaaggcctttccgacagtccctggtgtgagtggggcctggcagttctgaagggccagagtctgtggacttatgaactgagtctaggtgtgcagatggggcagggtctgtagatgtggggacagagcctgttgtaccgagggtagagcttgtggcaaagtggccagggtccagggcaggaggaacaggactggggtgctctccatgggtgggagctgggtgtgtaggtgggctaggtccccaggctaggctttctgggccaacggcctccactgaagcctcagccaaggcagcatctacactagcctcactgatgtggctcagagtccgactgtagggtgcatgcccatttgccaggactggggccacggccccctcctcatccaagggcccagagctgggggtctcaggcctgcggaaggcaacttggatgggaaggggctcgggctgctgcaccaggggcctaggggctggtgagtggcgggcagtgcctgagagctgtgggctggatgagtcgtctgaagattcagatgacagggaccatgctgtcccattctccagctcctcctgccgtcgcagcatgttgcgccctcgccgggtcgctcgtgggctctgcaggcgccgcggcgtcat

SEQ ID NO: 131980 - DNA, 888 bp, Homo sapiens
gtgtcaggttccaaggcagttcattctgccacggtatcagttactacccacatgcagaaacattcatcttcactgaccagcgagagtcctgaggtcaagagctgtgagcccaccacaaaccacagggaaactatcagggtagatgagcagagaaagaaaagcagcagaccaaccactacagatttcagccaacacaaatttctccccggtgacaatgttgattcagaatcatactggctgtacttctatgcttataaaatagccgacccccccgccccgcagcataaaaaagggacaaaatccaaagccaagaattctaattacccggggttagatcctgaactggcattgctcgataccttgctcctactgatggcgatcaacggcgataccaacgttgcatctcgcggtggccagggggggttgatcgatccagccgatcagatctttcggagcaccggcagcgatagcagcctgcagaacgatatcagccgctttgttggcagcatcacccaccgactttatttattctgtgtgaacacagacaaatacatcctggatgagcctggtgggcctaatgcaattaaaagggtcattgtaagagggaagcaagaagacacacatagcattgagtatgactctagaggatctcgtgttttgcgccagcagatccatcgctactttcaggacgccgaaaatacctattttgaccattacgccagacatcaacgccgaagcgtgcgatggtgcggcgtgattggcatcatcagcggaattacgcaattacatgctgttgtgaccttctctggaaaatttcactttgctggcatccttgtccaccttgcccaagacacctggcaacatacaggtttatttgtgaccttttag

SEQ ID NO: 131981 - DNA, 2677 bp, Homo sapiens
atgaactacttcaccgattcggtggggatgttgctgatgtatctgccgcgcatgttgttctataccgatcccatcgctaaaggcggcttcccgcagggctggaccgtgttctactgggcatggtgggtgatttatgctatccagatgagtatcttcctcgcccgcatctcccgtggtcgtactgtgcgtgaactgtgcttcggcatggtgctggggctgacagcgtcaacctggatcctgtggactgtactcggtagtaacactctgctgttgatagataaaaacatcatcaacattccaaatctgatcgaacagtacggtgtggcgcgcgccatcattgaaacctgggccgctctgccactcagcaccgccaccatgtggggcttcttcatcctctgctttattgccaccgttacgctggttaacgcctgctcttataccctggcgatgtccacttgccgcgaagtacgcgatggtgaagaaccacctctgctggtgcgtatcggttggtcaattctggttggcattatcggtattgttctgctggcgctcggcggcctgaaagcgattcaaaccgacattatcggcggaggatgcccgctgttcttcgtcaacattatggtgacgctctactttattaaaaacgcgaacacagactggaaagcttcattaacccacaaaatatcaaaaccccgcacaggtgaagcccagcgcgtcagtacggtgcggctcaataccgttcgggaactgcttctcggtgcgcttacggattttgtccgccagctgcgcctgcatcatattgccggtacgtttttccagcagttctggcagcgaaataccgtcaaccatatccagtgggtcgataacgttacccttggatttggacatcttctggccttcgtcatcacgaatcaggccggtcatgtaaacggtgtggaacggcacctgcggtttgccattttcatctttgatgaagtgcatggtcatcatgatcatgcgggcaatccagaagaaaatgatgtcgaaaccagataccatcacgctggttgggtggaactgacgcagggcgtcggtattttccggccagccaagggtagagaaggtccacagcgcagaagagaaccaggtatcgagaacgtcttcgtcctgacgcaggacaacatcagcaccgaggttattttctttacgcacttcgtcttcgttgcggccaacataaacgttacccgcttcgtcataccatgccgggatacggtgaccccaccacaactgacgagagatacaccagtcctgaatatcgcgcatccaggagaagtacatgttttcgtactgcttcggtacgaactgaatgtcgccgttctcaaccgcttcaaccgccggtttcgccaggacatcggcacgcacgtaccactggtcggtcagcattggttcgataactacgccgccacggtcgccgtaaggaacggtcaggtcgtgcggtttaatttcttccagcaggccaagcgcgtcaactgcggcaacgactgctttacgtgcagcaaaacgctccagtttctggaactctgcagggatttcgctggaataaacgtcagattcgttacctttggtatcgaacacctgggcgctttcacggatatcgccgtcaaaggtcaggatgttgatcatcggcagggcgtgacgtttacccacttcatagtcgttaaagtcgtgcgccggagtgattttcacgcagccggtgcctttttccatgtcggcgtgttcgtcgccaacgatcggaatacgacggttaaccagcggcagaatgacatatttgccaatcagatctttgtaacgcggatcttccgggagatcgtctcgttaatcggccctaacggtgccggaaaaaccacggtttttaactgtctgaccggattctacaaacccaccggcggcaccattttactgcgcgatcagcacctggaaggtttaccggggcagcaaattgcccgcatgggcgtggtgcgcaccttccagcaaagcgaagcgctcgaccgcgccgcgacctggcttgagcgcattggtttgctggaacacgccaaccgtcaggcgagtaacctggcctatggtgaccagcgccgtcttgagattgcccgctgcatggtgacgcagccggagattttaatgctcgacgaacctgcggcaggtcttaacccgaaagagacgaaagagctggatgagctgattgccgaactgcgcaatcatcacaacaccactatcttgttgattgaacacgatatgaagctggtgatgggaatttcggaccgaatttacgtggtcaatcagggacgccgctggcaaacgtacgccgagaaattcgaggcaggccccagtaacagtgacaaaatccattcaggacatgctgaaggcaataaggaagcgcgtggtaaagggatgttgatggcgattgagtttgttgataacgaaatcggctataactttgccagcgagatgttccgccagcgcgtactggtggccggaacgctcaataacgccaaaacgatccgcattgaaccgccactgacactgaccattgaacagtgtgaactggtgatcaaagcggcgcgtaaggcgctggcggccatgcgagtaagtgtcgaagaagcgtaatatcaaatcggatggcgatacgacgtcgccatcc

SEQ ID NO: 131982 - DNA, 1999 bp, Homo sapiens
atgacggcctcagaacgtcacgccagcacagagaatgatattcgcatacggagaacattctccgctgcgaattaccgcctgactttctgcggtttgttgtttgaattgttcatgcgtggtgtaacgaatttcaatggtatttccctggtgtttttgcagctgctcaagaactttagcaacaacgcccgcgccaacggtacggccgccttcacggattgcgaaacgcagaccgtcgtccatcgcgatcgggtggatcagggtaacaaccattttgatgttgtcgcccggcattaccatctctacgccttccggcagttcgatggtaccagtcacgtcagtagtacggaagtagaactgcggacggtagcctttgaagaacggagtatgacggccgccttcatctttggacagaatgtacacttcagattcgaacttgcacggccttcgtccagcagtttcaccagtgacaaacacaccagcgttgatggctactacagccatgatggttcgctggcgcaggttgacctcagtgcgaactaccatgaagggcaatacacctctgcgggcttgtcgttacagggcggcgcaacgcttactacccacggcggcgcacttcaccgtacccagaatatgggcgggacacgcctgctgattgatgccgatggcgttgccgatgttccggtggaaggtaacggggctgctgtttataccaatatgtttggtaaagccgtcgtttctgacgttaacaattattatcgcaatcaggcgtatatcgacctcaacaaattgccggaaaacgccgaagcaacccagtcggtggtgcaagccacgctaactgaaggagccattggctaccgcaaatttgccgtcatcagtggtcaaaaagcgatggcggtggtgaacttcgctgagggtaaagtcagcctggctgtggtgtaaagcctattatgcgcgtccgctgattggtaatgcactttcggccatgcgcgaacatatgccgcatatcgatactcgtgtggcagcaattttccgccacgatcgccccattcgtccgcaaggttcgaccattgttgaagctggtgatgaagtgttctttattgccgcttcacagcatatccgcgcggtgatgagtgaattacagcgactggaaaaaccgtataagcggatcatgctggttggtggcggtaatatcggtgcagggctggcgcgtcgtctggaaaaagattacagcgttaaactcatcgaacgtaatcagcagcgcgctgccgaactggcggaaaagttacagaatacgatcgtcttttttggtgatgagtcggatcaagaactactggccgaagatcatatcgatcaagttgatctgtttattgccgtcaccaaccatgacgaggccaatatcatgtccgccatgcttgccaaacgtatgggtgcgaaaaaggtgatggtgatgtacctgggccgctgcgtggagaagggaacgaaagaccaaatcttcaataacccgcgccatccgtacactcaggcgctactttccgcgacgccgcgcatgaacccggacgatcgccgcgagcgcatcaagctcagcggtgaactaccaagcccactgaatcccccgccgggttgcgccttcaacgcccgctgtcgtcggcgcttcggcccctgcacccagttgcagccgcagctaaaagactacggcggtcaactggtagcatgttttgctgggaatgtgacgttttatcacgaaaatcttgaagaagatgtcacaaagcagccgtgggcgaaaaacggcttcgataaagtgttgctggacccggcgcgagcaggtgccgcaggtgttatgcagcaaattataaaactggaacctattcgtatagtttatgtatcctgtaaccctgcaacgctggctcgggatagcgaagcgttattaaaagcaggatataccattgcgcgactggcgatgctggatatgttcccacacacgggacatctggaatcgatg

SEQ ID NO: 131983 - DNA, 4441 bp, Homo sapiens
aacaaaaccggtatgtcaactatagcaaaatgtgatggggaaagagatgatacaacacaaaacatcacggaggtggctgctgtgaaaagcatttcaccagaagtttctgcctctaggagaaaattagattttaattctccaggtggttcttcaccagtagaaaattctgattgttccacaaatagcagattatctttctctcctgaaaatatcctcatccaaaaccaagacattgtgagagaagctgcagtgcagggagatgggcagaagcaaaggcagcctcaggccacagatctggactccagtgggacacatggcagtgagatgcttccagccacagaagtgactgtgtcaggagggttttctgttgaagaaaccagctgtggagacacagggagatctggtggtgaggccctggctgttgcaaatgattctaccagcacaccacaaaatgctaatggactttggaaattgaaatctacaactcccggtggtgctttgcctgagtgttttggcaccacagacactactttttcttcagcattttgcagaaaacatggagagacacaggatacctcccaaagtagcctgcctggtaccttacattgttacacaggcattcgagaggggggagacgacactgaggtagagagtgaggcatttagctgcagtgaggggagcgaacagcaagatgctcctgatgactcacagaaaaatttaggagacacagatgctgctgtagccgaggtgagaccttccttagaggtaggttatttgacgtcagctctgcaagattttaacataagtactttttctgagctggatagactttccacatcagaggttgtgatgtttcttgagagctgtcagttaggggattatagttcaggggactctgtttctgaatgttctagtaaaggaaccctaagtaaagaaatgaacaaagaattaaaggcaagtgaaataggagaaaaatacagaaagcaaccctgtgaggaagaaacacttggaacctgtgaagagtggattgaatcagaggaagatgattattcgttaaaaaatacaagtcagctcactcagtgttctttggaaactctgtctgaggttctgaccaagattaggcaagaacttcaaacaaattctgaagattgcaatggtaaagatactggcagtttattgctcttaaatgtaaataacaacatgaccactgagaatttaaaagagaaaagtccatttcgggaaacgactggctcctcatcacatgcttcagaaccaaccccacaagcagctgccttggacactgagggcagctctcccatcagcggtatgcctcagaatgaaaaccctcagagcagaccagaggcccgttcagatgcaggcaggcaaaccgatggtggggaagaagacctgccagaacctgtggagccatcagccttgtgctctgactctgtgatggagccatccatagagcaaagttctaactgcgaggccgaaacaacatttcagtgtcagatagcaacagtgacctcagaagttataaacgtacttataaataaggatcagaatctagtcattgaaaagggggacaactggacaatcatcagtggtgtagctgtcttgccacatgtggaccaggtcacactgtgtgacattcctggagacatccctatttctcaggatcaaggagagctggaagctggttgcatcccagtgacttctgctgagaagtccccagaggccagtcacactggccctgcatttcaggaggctccatgtggcaataatctttcatgtccccaagaggatgtttcaagcagtggtcagagcaccaactttgataagagtcgtttgcgaaatagacccgttaagcctagtatatggattagttctcaaatctatgatcaaaacttcgagactcagattgttgcgtctgatcacacatattataactcaaaactagagccatctggcaaaaataagaatcgatcaaagatttcaaacaaagatcagtcaaacaaaccagtaaaaacttcagcgtcgagcagagttgaaactcatcagagtgaagttgctcagtcattttcaggggaaaaagctaatacaaaaactcaaagaagccaaactcagaccattttagcaaatgctgatacatccactcctacagattgttctcctgacacactgagtaaaatacggcaagaggtggggcctcctttgccgcctctgcttgctcctctgatagctacacctccaaggacttcacagccactgtctccactgatatcgagttctagtccttcctcaccagcctctcctgttggccaggtttctcccttccgtgaaaccccagtgcctcctgccatgtctccatggccagaggaccccagacgtgcctctcctccagatccttctccatctccatctgcagcttcagccagtgagagggtagtgccgtctcctctgcagttctgtgcggccacgccgaagcacgcacttcctgtgcctggccgactcccaccctgtgcatctggccacgctgctgtgggagggcctcaggagaattctgtgaaaatccttgacaccatgtatccagagttatctgccagggcccggaccctcaacatcctcaaagggaatattcaactcacacgaggtccgcctgctgactgtaagaatttaccgggacctgccagtgctatgataggattcaaaacgatcacttcagcagcaactgcttttgtcaaaactgggagcagctctggtggtgactgtaaccaagacaagtcaagagatttggggactcagcaggattcaagcgggaaaagaacactgtcaacgtctacactgagaagtgctaaaagactgcgcctggacactgggtccccagaaccagaaaccaggggagtcactgcagaaggaatccacaaaaacctcccagggaacctccctccagctgaagttgcaacaacaaatgaggaaagaagttgttctagtccagccgtcagtgcagtttcacagttgcctttaagcccaaaagaaactgtggagtcccatgataaagccatagctaatgccctgaagaaaattgcagagttttcttttgatctgttacctgtcattcgtagtcatgtgtatgtgggaaatatctccaaaaagcccgtaatgagagatcaagagaaggaagttgtttatgaatttagcacaacaaaaaagcatttagcagagtgcttgcttcactctattctctcagaactaaaaattcagaagatatctatggaccacaattacattcacgccctctgcagggtgtatgtgggtatttgtcggcaactcggagacttggaaagagctcgtttgttttgctacagcctacttaaagaagattttccggagtctgaaaaattaactttgtttattgcaaacatgtggcatgatatatttctctctcaatcggtgattaataaagcaatgcagttagttgccaggcaacgtgctaaaggagaggttctgaactgcttgagagcttttcttaattgggaaaagaatgccccggtagatgttggcttcatggtttctaagctgcttttgaccatacagttatgtccaaaaacagaatttcaacctagtgaaaaatttggtgaagacctaagtgataacacttgggaatacatatttgccattgatctgctctgctgccatcagaaatggatctggacgcatgataacatcataagtaaggagctgtggcctgtgatggataaatggataaaatacagaaaaggacatgcaaacattgcgtatactcctgatattattatagcctcaatactgaggctgattggtcgtttaggccaattgggtttgaaagaaggatttccatctgctgtgaaaaatattagttcggttattggtatgtttatacagcatgctcacgatgaagatataccatggggtatacagttagcagccgtgtatgctctttgtgacttgagtcccagcaatccagcagaaatttccaagatcctggaagcttggcggagagaggcctccaaaagcgttccgtctgcgattgtcagctgcctagaggaagtcagtgccctgagcacagaggagcttggctgacctgggatgccactgaggcttgagaagtgccttgacacattttgaacacaaatagtttgatcagctttcaaaatacaaagggagggttcataactcttagacgtaaaatagattaaacagaccccaggctctccttattgtttggcaaggagacaggagaaacaagcagtcgcatagtcgattttccctaaatctaatacgtttcacttaaggctgttgtgatctgtgacatatgggttatattattgtgtctttgttcaacaacaaaaacttgaacttagccctttttttgctgcagaaagtgtccttttagtggctt

SEQ ID NO: 131984 - DNA, 1990 bp, Homo sapiens
atgagtgaattacagcgactggaaaaaccgtataagcggatcatgctggttggtggcggtaatatcggtgcagggctggcgcgtcgtctggaaaaagattacagcgttaaactcatcgaacgtaatcagcagcgcgctgccgaactggcggaaaagttacagaatacgatcgtcttttttggtgatgcgtcggatcaagaactactggccgaagaacatatcgatcaagttgatctgtttattgccgtcaccaacgatgacgaggccaatatcatgtccgccatgcttgccaaacgtatgggtgcgaaaaaggtgatggtattgatccagcgtcgcgcttatgtggatctggttcaggggagcgttatcgatattgcgatttcaccacaacaagcaactatttctgcgttgcttagccatgcacaacaagcatcaacaataaggattaaagctatgggttttctttccggtaagcgcattctggtaaccggtgttgccagcaaactatccatcgcctacggtatcgctcaggcgatgcaccgcgaaggagctgaactggcattcacctaccagaacgacaaactgaaaggccgcgtagaagaatttgccgctcaattgggttctgacatcgttctgcgtgtaaaaaaagcccagcgtgaatatgccagtttcactcaagagcaagtagacaaaatcttccgcgccgccgctctggctgctgcagatgctcgaatcccactcgcgaaaatggccgttgccgaatccggcatgggtatcgtcgaagataaagtgatcaaaaaccactttgcttctgaatatatctacaacgcctataaagatgaaaaaacctgtggtgttctgtctgaagacgacacttttggtaccatcactatcgctgaaccaatcggtattatttgcggtatcgttccgaccactaacccgacttcaactgctatcttcaaatcgctgatcagtctgaagacccgtaacgccattatcttctccccgcacccgcgtgcaaaagatgccaccaacaaagcggctgatatcgttctgcaggctgctatcgctgccggtgctccgaaagatctgatcggctggatcgatcaaccttctgttgaactgtctaacgcactgatgcaccacccagacatcaacctgatcctcgcgactggtggtccgggcatggttaaagccgcatacagctccggtaaaccagctatcggtgtaggcgcgggcaacactccagttgttatcgatgaaactgctgatatcaaacaagcaatggaaaccgtggcttacgctgattttgcacgtctggaaatgcgcgtcggaaagattgtggaagtgaaacgccatgaaaacgccgacaagctgtacatcgtacaggttgatgtggggcaaaaaacgctgcaaaccgtgaccagcctggtgccgtactacagcgaagaagagctgatggggaaaacggtggtggtcttatgcaatctgcaaaaagcgaaaatgcgtggtgaaacgtcggaatgcatgctgttgtgtgcggaaaccgatgacggcagtgaccagcgtgctgttaacgccggagcggatgatgcctgcgggcatcggatggcgacgtcgtatcgccatccgatttgatattacgcctcttcgacacttactcgcatgccgccagcccttacgcgccgcttttgatcaccagttcacactgttcaatgatatgctggctgatatctgccacgcgttcgataaaggcgctggaacaggaaaaaaaattcccatgtgtcgtgggagggacgccgtgggagatataccatggggtatacagttagcagccgtgtatgctctttgtgacttgagtcccagcaatccagcagaaatttccaagatcctggaagcttggcggagagaggcctccaaaagcgttccgtctgcgattgtcagctgcctagaggaagtcagtgccctgagcacagaggagcttggctga

SEQ ID NO: 131985 - DNA, 903 bp, Homo sapiens
atgcgtatgttgcaggaagagaatatctggatcgtcggtacggcaggcgaggcggatcatacactctatcagagcaaaatgaccggacgcctggcgctggtgataatgcaccacattatgggaaaactctttttcacagtatttgcatttgagcgcgatatcattgataccttaaaagtggtgctgatcccggtgctgatcgccggagcaactgcgctattactgagtcgcgcgctgaacagtttgagcctcggcagcgacaccgcgacggcgctgggcagtcgcgtggcgcgcacacagttgattggtctgctggcgattaccgtgctttgtggtagtgcgacggcaatagttggcccgattgcctttattggcctgatgatgccgcatatggcgcgttggctggtgggtgccgatcatcgctggtcgctgcccgtcacgctacttgctacccctgttgtcaccaccccgtcggcaaaggagccatggattctagcaactaacttacctgttgaaattcgaacacccaaacaacttgttaatatctattcgaagcgaatgcagattgaagaaaccttccgagacttgaaaagtcctgcctacggactaggcctacgccatagccgaacgagcagctcagagcgttttgatatcatgctgctaatcgccctgatgcttcaactaacatgttggcttgcgggcgttcatgctcagaaacaaggttgggacaagcacttccaggctaacacagtcagaaatcgaaacgtactctcaacagttcgcttaggcatggaagttttgcggcattctggctacacaataacaagggaagacttactcgtggctgcaaccctactagctcaaaatttattcacacatggttacgctttggggaaattatga

SEQ ID NO: 131986 - DNA, 942 bp, Homo sapiens
atggtaccggatcgccctgcttatcctgacgtctacgatcagttgcgtttctggcaagccggttcgctggatattcgcaatctacataccttaaaagtggtgctgatcccgggtgctgatcgccggagcaactgcgctattactgagtcgcgcgctgaacagtttgagcctcggcagcgacaccgcgacggcgctgggcagtcgcgtggcgcgcacacagttgattggtctgctggcgattaccgtgctttgtgtgcgacggcaatagttggcccgattgcctttattggcctgatgatgccgcatatggcgcgttggctggtgggtgccgatcatcgctggtcgctgcccgtcacgctacttgctacccctgccctgctgctgtttgccgatatcatcgggcgggtgattgtgcccggcgaactgcgcgtttctgtggtcagtgcgtttattggtgcaccggtgctgatcttcctcgtgcgacgtaaaacgcgaggtatctggggattacgcagcggtgccgtcacgctggaaacctcgcaggtattcgccgcgctgatgggcgatgcgccgcgcagtatgacgatggtggtcaccgaatggcgtttaccacgcgtgctgatggcgctgttgattggcgcagcactgggcgtcagtggcgcgatttttcagtcgctgatgcgtaacccgctcggcagccctgacgtaatgggctttaacaccggggcgtggagcggcgtgctggtggcgatggtgctgtttggtcaggacctgacggctatcgcgctgtcagcaatggtgggcggcattgtcacttcgctgctggtctggctgctcgcctggcgcaacggcatcgacacctttcggttgattattatcggtatcggcgttcgcgccatgctggtggcctttaatacctggctgttgctgaaagcgtcttaa

SEQ ID NO: 131987 - DNA, 1376 bp, Homo sapiens
  misc_feature (1)...(1376): n = a,t,c or g
ctcggtcaccaggtcattgatgccatcgctcatatttttaaagcgcgtcaacggcgaacgagtgaccaccacaaacgcgccaatattcttctgcgggatcatcgccatataggcatgaaaaaatcccgcgtggaagctttcttgattgttaaggacgtcactcacgacaaaaaatggctggatcgcgcgattcgcagtggcttccagtgattatccacgacgtcgccagaaataatcattatcgcgttaacgaacacttcgatacccagtggaatccgctgccggattacaacaaagataacccggcgcatcgcttccgcgcgttcggaggtacaccaggccactggatcgaatggggccgtttaatgctgcacatccatgctgccctggaagcccgttgcgaacaaccaccagcatggctgctagaagatgccaaaggtctgtttaacgccaccgtgcgcgatgcctgggcacccgatggcgcggacgggattgtttataccgttgactgggaaggaaaaccggtggtccgcgaacgtgtacgttggcctatcgtcgaagcaatgggtacggcctacgcgctctacaccgtcactggcgatcgccagtatgaaacctggtatcaaacatggggcgaggggaccgtccggtgcagtttttgggtttgacatcagcctcacgggaggctgtatgtcgttaattaaggtgccttgtatgcaaatcaccaatatgcattgcagtggacagaccgtttcacttgccgcgggggattatcacgcgaccattgtgaccgtcggtgctggtctggctgaattaacctttcagggttgtcatttagtcatcccgcacaaacccgaagagatgccgctggcgcatctgggtaaagtgcttattccgtggccgaaccggatcgccaacggctgttaccgctatcaggggcaggaatatcagttacccattaatgaacatagttcaaaagccgctattcacgggctgcttgcctggcgagactggcaaattagtgaattaaccgccaccagcgttaccctgacagcttttctgccgcccagttacggctatccgtttatgctggcttcacaagttgtttattcgctcaacgcacacacgggtctttccgttgagatcgcaagccagaatatcggcactgtcgcagcgccttatggcgtgggtattcatccttatttaacctgcaacttaacatctgttgatgaattacttgatgaactatntatcggagcgcgcatgggattgcttatctggacttctctactcgatgacgagctgaaggcgctgcccgctttcgaatctaccgcggctggcgatggcgggaatcactgctttccagattgtctcag

SEQ ID NO: 131988 - DNA, 1326 bp, Homo sapiens
tcaggcattgtgcaccaattgccggatgcggcaccggttgtaggccgccgttacattcggccccatcgaaccatcggctttggcaaatggcgctaactcatccggtgtggcatggcgaatggcacgttgctgcggcgttccccagttttcatataccgcatcagcatcggtgaggatcaccagtccatctgcattaatctgctcggcgagcaacgcagcggcgagatctttatcaatcactgcttcactccctgctcggccatcggcacagcacacccgcgccgcacttctggcaatgactggctcatattggccggaaaagctatttttgcggccaaaatcgttctggtaataatcggcaatgtcatagacatcgttttcatcacggcgataattatctttattgtttgcccaaacgtgatcgttaaatgtccggtaatcacgcgacgaataacgccaggccgccagaccaaaacgcgtcgacgtttggctcacaaatttgttgtaggcaatttgataactttgcccgtcaaacacatcgccgttgtcttgtttactatgcgacttagtggcatcgacggaaatggcaccaatgcgtgtattccagccagcccccaaagtaaacgcgtaataattattcgcgaccatcgagccaccatacagcgtcaataaattattaaaaccatactgataacccgcctggacaaaatcactttgtttgctcgccccttcaatatggctacgacccgccgctaaatcatatttcgacacgccgggttgcagcatatttggcaccgctgcataaggcaccagataggtggttaccgagccgctcgtctctttcacgctgacatcaagatctgctccaccaccggccaactgcaaatcggagtcgttgctccatgcctgtctgtcatggagcaacgtacagtgacacaggttaattaccgtgttggttaaagcatgtctttgagcgtattccgggctacatactggcaggatttcttcatccatcagaaagtgatgagtgagttgcgctgacggcgcatcatcaaagtagatcgccaaatcgattccggcacgttgcagattgacgttgtcattaccagtgagcacggtgagcgaaatagacggataccggcgtgtaaagtcacctaatgcgggcaccaaccagcattgggcgatagagggccgggaatacagagttaacgttcccgataactcctgatttttgatatcaagaatttccgcactggggctcagcgacaattcctctgccggcagggcgaaggactgatgcctggcagccacttcaaaagtatgcat

SEQ ID NO: 131989 - DNA, 2055 bp, Homo sapiens
atgcggcagaacacaactgtgccaccgtttaacctaagcgggaaattttgttcacttatccgcaatctgattacggaaagtgaagtggcggtgaaggacaacactaaattccgcttcgtgggggctgatgctttctcacctgacgaactgcgtactgatttgttcagcgatatcggcgggcgggcgctactaatgcatggtactgaaggtgaagtgtatgctaatccgcagcgctgcccgcagatcaatctcattgaccctgaagggatgcgggtgctgtatgaaaaacaggacactgctgctgaaggcagcgatgtgcaagcaggccagtccctgtaccagatcgatcccgcgacctatcaggcaaattatgacagcgcgaaaggcgaactggcgaaaagtgaagccgccgccgccatcgcgcatttgacggtaaaacgttacgttccgctcgtggcgaaaaatgaggtgattatggaaccccttcgtgaaataagaaatcggctgcttaacggctggcaattatcaaaaatgcatacttttgaagtggctgccaggcatcagtccttcgccctggcggcagaggaattgtcgctgagccccagtgcggaaacgacgatgaaagcagtatctcgcgttcacatcaccccgcatatgcactgggatcgagagtggtatttcaccaccgaagagtcacgtattctgctggtcaataatatggaagagatcctgtgccgactggaacaggacaacgaatacaaatattacgtactcgacgggcaaacggcgatcctcgaagattatttcgcggtgaaaccggaaaacaaagaccgtgtgaagaaacagaccgataccacgattgtttctgcggaatccatcgtccgtaatctgatgtacggaatgcgtgactgcctcgcgtttggcgagccgatgaaaataggttatttaccagattcctttggcatgtccgggcaactgccgcatatctacaatggatttggcattacccgcaccatgttctggcgcggatgttcggagcgccacggtactgataaaaccgagtttttgtggcaaagcagtgacggtagcgaagtgacggcgcaggtgctgccgctgggctacgccatcggtaagtacttacctgccgacgaaaacggattacgtaaacgcctcgacagttattttgacgtgctggaaaaagcgtctgtaaccaaagagattttgctgccgaatgggcatgaccagatgccattgcagcaaaatatcttcgaagtgatggataagctacgtgagatctaccctcgacgtaagtttgtgatgagccgctttgaagaggtatttgagaagatcgaagcgcagcgagataatctggcaaccctgaaaggggaatttattgatggcaaatatatgcgcgtgcatcgcaccatcggttctacgcgtatggatatcaaaattgcccacgcgcgtattgaaaataagattgttaatctgctggaaccgctggcaacactggcctggacgttgggttttgaataccaccacggcttgctggagaaaatgtggaaagagatcttaaaaaatcatgcccacgacagtatcggctgctgctgtagtgacaaagttcatcgcgaaatcgtcgcccgcttcgaactggctgaagacatggcggataatctgattcgtttctacatgcgcaaaattgccgacaacatgccgcagagcgacgccgacaaactcgtcctgtttaacctgatgccctggccgcgtgaagaagttatcaacaccactgtgcggctgcgcgccagccagtttaatttgcgggacgatcgcggtcgacctgcattgcacgctgcatggctcagtggctttaacgatttccatttgctgctcaaactgagcgatacgctgcgctgtcgctgtaactgctttttccacgccatcacgggagacttccagattcgacaacacttgctcttcagcggtaatgagattctcaaggcgcgcgatttcttcagcaacttcgttaatcaacgacggattaacgttcttgcttaa

SEQ ID NO: 131990 - DNA, 573 bp, Homo sapiens
atggcacagtggctacagccagtcttcgccagcctcgatgcaaaaacattgcagcaactgaatgccagcattgctgtggaaggactggatgccaaaaaagtggctgccgactaccctgaaacaaaaagggtggacgaagtaatttccccggcgctgccgtttatcagttacgcgcctaatcgtttagtttcgggtgaggggcgtcatctctggcagctgtggccgcaaacgatctggatgctggtgggcgttggttgcgcctggctgacggcctgttttattcccggtaaaaaaggcagcatttgtgcactcattctggcgcaattcgtcttcgtattgctggtgtggggagctggaaaggcggcgacccaactggcgcaaaatggcagtgcgctggcgcgtaccagcctcggcagtggtttctggctggctgcggcgctggcattgctggcctgtagcgatgccatccgccgaatctccacgcatccgctgtggcgctggttgttgcatatgcagattgccattattccgctgtggttgctgtactccggcacgctaacgatctctcactaa

SEQ ID NO: 131991 - DNA, 1281 bp, Homo sapiens
atgcgccggacatccgtgccagcatccaggttccggtcgtggtcgcagcctgctcaacggcaaacaacgggacgaaaacgcttgagcgcgggccgtaatcatgatccgcatcgatttattgagcgcaaagggcccaggtttgtagccagtcaatccagggataatcgccgggcaataaaggcataccgggtccggataccaagtggcggcaccaagtccgggcgaaacggtgccacaaaagaggcggtttggcccgcgtccaagggtccaccgaaaacccacgggaataaggggcgaagacacgcgcggttggagcaggcaggaagaagacgcccaaaaggtcggcaccgagaacacagggcaatggggcgcaaagacaacaagggagagggggcaaaaaccacgaagggggcaaagccggcaacattcacctccaccagcgtgaagaaagacggtgacgaactggatattaccggcgatctgacgctgaatggcgtaaccaaacccgtcacgctggaagcgaaattaattggtcagggcgacgacccatggggtggtaaacgtgcaggcttcgaggccgaaggcaaaattaagctcaaggacttcaatatcaagacagatttaggtccagcttctcaggaagtggatctgattatttcagtggaaggcgtacagcagaattacgcgcctaatcgtttagtttcgggtgaggggcgtcatctctggcagctgtggccgcaaacgatctggatgctggtgggcgttggttgcgcctggctgacggcctgttttattcccggtaaaaaaggcagcatttgtgcactcattctggcgcaattcgtcttcgtattgctggtgtggggagctggaaaggcggcgacccaactggcgcaaaatggcagtgcgctggcgcgtaccagcctcggcagtggtttctggctggctgcggcgctggcattgctggcctgtagcgatgccatccgccgaatctccacgcatccgctgtggcgctggttgttgcatatgcagattgccattattccgctgtggttgctgtactccggcacgcttaacgatctctcactaatgaaagaatacgccaaccgtcaggatgtgtttgacgacgcgctggcacaacatctgacgttgctgtttggtgcggtgctgcctgcgttagtgattggggtgccgtggggcattctgggctacttttcactggtccgcaaggggccaattttctccggtcaaggggatccgacagggcctcggggggggccttag

SEQ ID NO: 131992 - DNA, 659 bp, Homo sapiens
gttgagggagtatccgcaaatggcacagtggctacagccagtcttcgccagcctcgatgcaaaaacattgcagcaactgaatgccagcattgctgtggaaggactggatgccaaaaaagtggctcccggctacttgaaccaaaaagggtgagcgaagtaatttcccgtgacttatttccgtattaatcctgttctggcgctgctgctgttgctgacggcaatcgcagcggcgctgccgtttatctgttacgcgcctaatcgtttagtttcgggtgaggggcgtcatctctggcagctgtggccgcaaacggtctggatgctggtgggcgttggttgcgcctggctgacggcctgttttattcccggtaaaaaaggcagcatttgtgcactcattctggcgcaattcgtcttcgtattgctggtgtggggagctggaaaggcggcgacccaactggcgcaaaatggcagtgcgctggcgcgtaccagcctcggcagtggtttctggctggctgcggcgctggcattgctggcctgtagcgatgccatccgccgaatctccacgcatccgctgtggcgttggttgttgcatatgcagatcgccattattccgctgtggttgctgtactccggcacgcttatcgatctctcacatcaaaacg

SEQ ID NO: 131993 - DNA, 1104 bp, Homo sapiens
ttatttatcagcagtctgattttgctcgcctggacagccgccctcggcgttgctggtctgtggtcggcgtgggtactggtgcctctggccattatcctcgtgccatttaactttgcgcctatgcgtaagtcgatgatttccgcgccggtatttcgcggtttccgtaaggtgatgccgccgatgtcgcgcactgagaaagaagcgattgatgcgggcaccacctggtgggagggcgacttgttccagggcaagccggactggaaaaagctgcataactatccgcagccgcgcctgaccgccgaagagcaagcgtttctcgacggcccggtagaagaagcctgccggatggcgaatgatttccagatcacccatgagctggcggatctgccgccggagttgtgggcgtaccagatatttaagttgatcgcccatggtcgcgaattcatgttcggtaaacggcacaaatccccagttgtgctgccagccagagttgaaaatctcacgcaggatctgcatctcttcggcaaaccgctgacgattgatgcagcgaatggtcacctttttgcgcacctgatccatcagtttttttagcgccggagagaaagtgagatcggttcgctgcatccaccacgccagtaaatcaatgcctttgtgataacccagttgttcaatatgcgcggcataccacggtttgccgtgtggcatcatcgcacagggtggtgtgtcaaaaccttcaatcagtaatccgctttcctgattgatattcaggctgaaaggaccgctgatcttacttgcaccttgtgacttcaaccacgcttccgctgcgccaaacaacgcggcaaaaacctgcggatcatcaatggcgtcaatcatgccgaaatgaccggtatctttgccgtaacgctcgcggtgcaaggtatctatttgcgcggtaatacgcccaactatctgccccgctttttttgccacccacgcctgccagatgatatggtccgtccccggatttttcgcagacaaatgctcgttgcgttcaatgaataaacggggtatccagtttggatcgtcgggataaagtgatgacggaaaagcgataaatgcctgcat

SEQ ID NO: 131994 - DNA, 1866 bp, Homo sapiens
tcatatggcaggggctatagagagcatgaattccagcttcccatgagccagcagaggcagtggaggcccagcctcctgatggactctctgcccgttgccccagcatgactcccactggtgcctttcttgctctacttggcctctcctttgcatggtctggaattcagcttccgttgcgcagtcctgcaaatactgaatggttccgcgatcttccaccgtgtcgcgacagcaggtgagatgcagcaactggaagccatactgttcacgcagctcaacgaagcgatcgatcagtttttcttgcagactgttaaactggtcgctgccctccggcaagttaccggcgttaagctgatcttccagccagatccactgaaagaacgccgcctcgtatagtgacgttggcgtatcggcgttattttccagaagtttaggttcaccagtgccatcccacgccagatcaagacgcgaataaagcgatggctggtgcgtcagccatgactggcgcacaaaactccaggtgtgttttggaatgcggaatttggtcatcagctcatcgctggcgatcactttttccaccactttcaggcacatctggtgcagttcggcggtgacttcttccagcttttcaacctgggcgagggtcaacttgtagtaagcatcttcacaccagtacggctcgccgtacatggtgtgaaaattgaaaccgtattcgtgggctttctcacgccagtccgggcgctcggtaatactgactccgccacgggtaacggtagtggtggtcgccggttttggtcccattccggtcttcggtacggtcatggtgcggcctggctgggctgcgccatagtttttacccgtcgcgtcggtatatttcccgtaagccggactggctggttttttaaagaagaacaggggctgctgtgcaaatccggcgccgccgcccatcagacgccccatcatgtacccgcccatcagcggcttcaagaacctccggcggattggtgggcctgcgcctggttttctggcaaagattaatgtgaaaaagtctatcgccttgcaaagctgttctgccagcgcaatgttctctttgctgccaataccgcgaccgacgctgaccaccatacgggctttgtcgagatcgacgctgttgctctggcgcgcctgggttgccgtgcgggtaatcgccacagccggagcctgccactccacggtgtgcgtttcgccagtgcgtgacgcgtctggctgagccgcatcgaacgtgccgctgctgatggtcagtaccgcataccgcgtggcaatgcgttcttcgccaatcgccagaccaccgtaaaccatgtgtttcactgtcgctttacccgcctgtacgctgacggtgctggcatcgttagacaccgccggggtgtttggcagcagcaccaagccgtatgcgccgtgttggcgaatagtgtcagccatgacaccggcgtaatcttcgatcatccgatcgtccggtttgccgtttaatttccagacatgattagcgccgagctggattgcctgtgcgccgtcggcatcattgaggacaaaggtgttgatttgattagctaaagctttgcgaagattttcagcaaatgcggcgatctgttcttcgccgtcgccttcaatcacgatgcgctgacgttcgcgctgtttcggcgcggcaacctgttgttctgaccaggctgcctctgcgttaaaaccaatatccgccgccgaccatacctggacgggctttttcgccgcgccgagaatggctttcatcgaaggtgatgaactactggcacttgaattctcgtggttaaagattaacacaatataaacaaacttgtgagtaatgtccacctccat

SEQ ID NO: 131995 - DNA, 2883 bp, Homo sapiens
cctttaatcacttcccgcatcaaaccggttaccgcgccacggatagcagcaatctgttgtaaaactgcagcgcattcgtgcggctcgtcgagcattttcttgagcgccacgacctggccctgaatcttactggcacgcgctttcagtttctgtttatcacggattgtatgagacatggcaacacctggttaacaagaatatgaaaaatcatagcactattaatctactggggggtagtatcaggtactgggggggagtagaatcagattgccgaattaatactaagaattattatcatgaccgaatttacaactcttcttcagcaaggaaacgcctggttcttcatccccagcgccatcttacttggtgcgcttcatggcctggaaccagggcactcaaaaacgatgatggcggcgtttatcatcgccatcaaaggcaccattaaacaagcggtgatgctcggactggcagcaactatttcgcataccgcagtggtctggttaattgcctttggcgggatggtgatcagcaagcgctttactgctcaatcagcagaaccgtggctccagctgatttccgcagtgatcattattagcaccgcgttctggatgttctggcgtacctggcgcggcgaacgcaactggctggagaatatgcacgggcatgattatgagcatcatcatcacgatcacgaacatcaccacgaccatggacatcatcaccatcacgaacatggcgagtatcaggatgcccatgcacgagcccatgccaatgacattaaacgacgctttgatgtagagagtcaccacctgcaatttcgttcgcgattgatgcgggcaccacctggcaagccggactggaaaaagctgcataactatccgcagccgcgcctgaccgccgaagagcaagcgtttctcgacggcccggtagaagaagcctgccggatggcgaatgatttccagatcacccatgagctggcggatctgccgccggagttgtgggcgtaccttaaagagcatcgtttcttcgcgatgatcatcaaaaaagagtacggcgggctggagttctcggcttatgcccagtctcgcgtgctgcaaaaactctccggcgtgagcgggatcctggcgattaccgtcggcgtgccaaactcattaggcccgggcgaactgttgcaacattacggcactgacgagcagaaagatcactatctgccgcgtctggcgcgtggtcaggagatcccctgctttgcactgaccagcccggaagcgggttccgatgcgggcgcgattccggacaccgggattgtctgcatgggcgaatggcagggccagcaggtgctggggatgcgtctgacctggaacaaacgctacattacgctggcaccgattgcgaccgtgcttgggctggcgtttaaactctccgacccggaaaaattactcggcggtgcagaagatttaggcattacctgtgcgctgatcccaaccaccacgccgggcgtggaaattggtcgtcgccacttcccgctgaacgtaccgttccagaacggaccgacgcgcggtaaagatgtcttcgtgccgatcgattacatcatcggcgggccgaaaatggccgggcaaggctggcggatgctggtggagtgcctctcggcccagccagaagctgcgaactttgttgctaccgacgtgaccgatatgtttgaacaacagtttatcgaacgcgttgacgtcattgttcttcgccgcttccatctcttccagcacgtacggatggcaacgaatcgctccttgtccgaagatcatcatgctgcgggtcagaatgttagccccttcaacggtgatggcaatcggtgcgccctggtaagcacgcgccaggaagttgctttgcccgagcataatgcctttaccgccggtaatatccatcgcatcaataatcgactgctgcccgcggtgggtacagtgatacttaacgatagccgacagcacggcaggtttttcgccgagcataatgccgtagtaatcagcgatgccgcagcatccatcacgtaggcattaccggcaatacgcgccasgcttcttcaatcccttccatcttaccaatagagattttsaactgacggcgaatgtvagcatacggccggttgccagcgstaccgatttcacgccgccggttgagttggaaggcagcatacatgccgccgtctaccgagaggcactccaccagcatccgccagccttgcccggccattttcggcccgccgatgatgtaatcgatcggcacgaagacatctttaccgcgcgtcggtccgttctggaacggtacgttcagcgggaagtggcgacgaccaatttccacgcccggcgtgtggttgggatcagcgcacaggtaatgcctaaatctttggcggcaaaactgggttatcgccttaaagcggcggtgtctaacgatgccagcaccgtcagcgtacaggacggtaaagcgacagtgaaacacatggtttacggtggtctggcgattggcgaagaacgcattgccacgccgtatgcggtactgaccatcagcagcggcacgttcgatgcggctcagcagacgcgtcacgcacgtggagtggcaggctccggctgtggcgattacccgcacggcaacccaggcgcgcagagcaacagcgtcgatctcgacaaagcccgtctggtggtcagcgtcggtcgcgttattggcagcaagagaacattgcgctggcagaacagcttttgcagcgataggtgcgagttggcctgttctcgtccgttgccgaaaacgaacatggatgaacacgaagctatgtcgtatctcaactgatgctgaaacctgactgtacctgccgtgggatttcggcagattcgccat

SEQ ID NO: 131996 - DNA, 637 bp, Homo sapiens
atgtcggatgcgacgctggcgcgtcttatccgacctacggggacgcatgtggtgtctggtggcagtaaagcgcaacgtgaaccagcgagcaccagaaacgtgaagcaggcacaccgccagtgggcgaaagccacggaagcagaaacgcaatgcgcgcagccaaggcagtcgtgcgttgccggaaacaaactcacaaaactgctcagcactggatggcgaacttgccgccaggcagcgcgtagtgcgggaaacggcgccagagccgcagaatttgctacggttatagtaagtcacctgtgggaaaacgctatgcgcaaatatcgtctaagtgaagaacagcgagcctttagttatcaggaagatggcactaaaaaaaatgtgttattacggcagattatcgccattagcgattttaacgatgtgatagcaggaaccgctggcggctggatcgatcgcgaaacggtgttagcacaagaaggaaattgctggatttacgaccagaatgctattgcgttcggcggagcggtgatttccggtaatacgcgtatcaccggcaccagcgtgctgtggggagaggtttacgcaacggataacgtctggatcgataatagtgaaatcagccagggtgcatatataa

SEQ ID NO: 131997 - DNA, 1150 bp, Homo sapiens; identical to SEQ ID NO: 131892

SEQ ID NO: 131998 - DNA, 585 bp, Homo sapiens
atggattacaccaccggtcagatcctcaccgcgggtaatgagcatcaacagcgcaatcccgccagcctgacaaagctgatgacgggttatgtcgtggatcgcgctatcgatagtcatcgcattacgccagacgatattgtcacccagaagctaacaaattcagtttctggtgaggctctcttcctgcttgcagctgccttcctaccagtgaacgaagaggtcggcaaacggctgctggaggagatggagcatcgccaggttccaggagcgcataaacgggcgggcaccatgtccggcggtgaacagcagtacatcatcaaaggggcgattattatcttcgccgtagcgctggattcactgaaatacgcgcaagtaaaatccacaaaagatgtggtgatcgacgccaaaatgacgctggtcgcctatgaacgctattttaacgccgaagacgactacacccgcgaaagcgcgctacaggaacatatcgcgtcggtgcgtaaccatatccgtttgctgggacgcaaagattatcaacactcagtcgggctcgcctcccccagtgcgagccgggagcgatcgctatag

SEQ ID NO: 131999 - DNA, 2499 bp, Homo sapiens
atggtgccagcatctgcttctggtgagggcctcaggaagcttacagtcacggtagaaggcaaaaagggagccagcacatcacatggctttttacctgccaaatcaaaaggccgccgtgatgcgctaaaagccattgaagcggagccgcgcacgctgattttttatgaatctacccaccgtctgttagatagcctggaagatatcgttgcggtattaggcgaatcccgctacgtggttctggcgcgtgagctgaccaaaacctgggaaaccattcacggcgcgcccgttggcgagctgctggcgtgggtaaaggaagatgaaaaccgtcgcaaaggcgaaatggtgctgattgtcgaaggtcataaagcacaggaagaagacttacccgccgatgccctgcgcactgtggcgctgctacaggcagaactgccgctgaaaaaagcggcggcgctggccgcagaaattcacggcgtgaagaaaaatgcgctgtataagtatgcgctggagcagcagggggaaaacgcctttatggccgcgggattacggaattccgagctccggttaccccttggggactttgctgagtggaaacgaaattggaatggcaaagccaatggcaaccttggttcgaacttgcaggcacaccctttgggggccaagcttcgccatttgaccgttaaggaaaggcttttgccgaaggccattaaggaatgcgccgaaataggaaagtcatcggttggcagtcaggcaattaaagaagcgggcctgaaaccgggcaaagatatcctcacgggttccattgacggtgtaccggacatctacaaagcgatgatggatggcgaagcgaacgccagtgttgaactgacgccgaatatggcaggtcccgccttcgacgcgctggagaaatacaaaaaagacggcaccatgcctgaaaagctgacgttaaccaaatccaccctttacctgcctgataccgcaaaagaagaattagagaagaagaaaaatatgggtacaggtagacttctgagtctctttgataccaacgatttcaacttcttcaccaactttgatgataccgcgttctacacgaccggtaacaacggtaccacgaccggagatggagaatacgtcttcgatcggcagcaggaacggcttgtcaatcgcacgctctggttccggaatgtaagaatccaggaagccagccagttccaggattttcgcttcccactctgcgtcgccttccagcgctttcagagcagaaccacgaacgatcggagtgtcgtcgcccgggaagtcgtactgagacagaagttcacgaacttccatttcaaccagttccagcagctcttcgtcatcaaccatgtcgcatttgttcaggaacacgatgatgtacggaacgcctacctgacgacccagcaggatgtgctcacgagtctgcggcatcgggccgtcagtcgcagcaactaccaggatcgcgccgtccatctgcgcagcaccggtgatcatgtttttaacatagtcggcgtgccccgggcagtctacgtgtgcgtagtgacgggtcggggtgtcgtattcaacgtgagaagtgttgatggtgataccacgagctttttcttccggcgcgttatcgatctggtcgaatgcgcgagcagcaccgccgtaggagagactatttctggaagggaggaggagcagcatttaaccatttacatttgggagagcaagtggaccagacgaggacgggatcctctagagtcgacgttaggcaggattgaccagggcaagaaagaagcgtggtttcagtgttgccagtggttgtcacaaagcaataggaaagtgtttcttgggcaaatcggcgtttgcacgattgatcaggtgttgatatcggtattgccagttaacaccggctttatccgtggtttgggaattggtcgaagtgttttaattgttgatgaagttcatgcttacgacacctatatgaacggcttgctggaggcagtgctcaaggctcaggctgatgtgggagggagtgttattcttctttccgcaaccctaccaatgaaacaaaaacagaaacttctggatacttatggtctgcatacagatccagtggaaaataactccgcatatccactcattaactggcgaggtgtgaatggtgcgcaacgttttgatctgctagctcatccagaacaactaacgccccgcttttcgattcagccagaacctatttgtttagctgacatgttacctgaccttacgatgttagagcgaatgatcgcagcggcaaacgcgggtgcacagattgatggtcctttgggcttcccggttaaacgatcttttctcattcgcttgaaaactgccccggcagcctgggtgatattcacggctaacatcccgcgccagtttcatcattccttcggtgataacgtgctttacctcttcggccgtgatctgatgtttaaccgcgtcaatcagcatcgaagagtccttgcctaa

SEQ ID NO: 132000 - DNA, 1252 bp, Homo sapiens
tctggcgcataatgccgggatcagttttttcaaaagcgtagtttttccggaccactccacgcggcaaaggcgagtaacggaatcatcgtttttcctgccatcggcaagctcctctggcgtattcacgttaacaaatgcatctttatgatcgctgaaatcaaccgcatgaccgccagccagacgcataaataccattacccggcgttctcctgcttgcagatattccagtaataaaggctcaatagcgcggtttaccagagcaatagtcgggtgatcgcgttcaccgtcatggacccacacgacaggcgcatctttgcgctgatgattaagcctggctgctaaatcagggggaatgtaaggcgtatcgcacgggcaaaacaaaaaccactcaccagcttcctgctgcattactgaaagcattcctgccagagggcctgggtaatccgccagtgaatcttcaatcactttcagaccgcttgcctgatagatttcctgatgacgattagcattaaccacgacgtgagagagctgcgtcataagcgcgtcagcgacatgttgccataatggtttgccgtttaattcaagcaatcctttatctacgacgcccattcgtctggctttaccgcctgccagcacacgctctgttatcgtcgtcatcagattcaccgatatcgcctcttttattgtgggattgaccctgctaacgtgtctgtctcaagagtaaggagcatcactatgaaatgtaaacgtctgaatgaagttattgaactcctccaggcagtctggcaaaaagagccagcccttagcctgctgcaatttttgcagaaactggcgaaagagtcaggttttgacggcgaactggccggatttgacggatgacattctgatctatcacctgaaaatgcgtgattccgcgaaagatgcggtgatcccgggtttgcagaaagattatgaagaagacttcaaatccgcgctgttacgcgctcgcggcgtaattaaagagtaaaagtttgtaagcggcgccaccaaaatcatcgtgaaatgatatccttcgtcattcgtaatgttttccggatgatgggatgaataacagcgcttttactttccagactctactcccggtatgccatcatggacgctctgtttgagcatgggatccgggtggattccggtcttacgccgcttaccagctatgagaaccgtgtctatcaatttcaggacgaagatcctctagagtcgcgcggaggcgtgt

SEQ ID NO: 132001 - DNA, 1878 bp, Homo sapiens
atgatcaccggtgctgcgcagatggacggcgcgatcctggtagttgctgcgactgacggcccgatgccgcagactcgtgagcacatcctgctgggtcgtcaggcaggatgtagaggaaggccagcagagggcaaagagcccgagagccgggatcaggagacaggaacgtgttggcgtgtggctctaagcgaaccaaagagactgtctctggtcatccgtgttccccactgttgggtcaatcccacaataaaagaggcgatatcggtgaatctgatgacgacgataacaggcgttgtgctggcaggcggtaaagccagacgaatgggcggcgtagataaaggattgcttgaattaaacggcaaaccattatggcaacatgtcgctgacgcgcttatgacgcagctctctcacgtcgtggttaatgctaatcgtcatcaggaaatctatcaggcaagcggtctgaaagtgattgaagattcactggcggattacccaggccctctggcaggaatgctttcagtaatgcagcaggaagctggtgagtggtttttgttttgcccgtgcgatacgccttacattccccatgatttagcagccaggcttaatcatcagcgcaaagatgcgcctgtcgtgtgggtccatgacggtgaacgcgatcacccgactattgctctggtagaccgcgctaataggggttcatgcaggtgtccagttctcgaacaatttttcccttgccggtaccccggaagcgccaaaagtatctggtgtcaacgtcgccttgaacctgctgatgatctacgcgttgtctggcgtgttctatgcctttggcgggatgttagaagccggacgtatcggctctgccaccaacaacctcggctttatgtatgagctggatgctatcgcggcgtgcgtggtagccggtgtatcgttcagcggcggtgtggggacggtgattggcgtggtgaccggggtaattatttttaccgtcatcaactatggcctgacgtatatcggcgtaaacccagtactggcagtacatcatcaaaggggcgattattatcttcgccgtagcgctggattcactgaaatacgcgcgcagaaaaagccgggtctataacggccttgccggaaatgtggcttggggaagatgaagtcagcaagtcgctgcctatccccaaccattatggtgtggatgattttccggtcattatccaggataaacggagcaaaagtgctgagaatcaatgcataattgatgagtggcattttcacaaaggcttttttaattcccgttttcaaatgcaaatgacattcgataacggtgcacccgatctcaatatcaagccaggccagaaagttgtatttgatgtggatgttgagcacggtccgttgcccatcacaatgttaatgcatggtaatgtcatcccagcactggcagcggcaaaagtgaacttagtgaataatgaactgacacaaccgctatttatcgccgcgaaaaataaatcgcccgtggaagcgacattgcgattcgcgtttggtggctcattctctacgacattagatgttgcccctgcagagtatggaaagttttcttttggtgagggccagtttacttttaatggtgatggtagttcattgtctaacctggatattgaaggcaaagtcgaagatattgttctgcaattatcaccaatgaacaaagtaacggcaaaaagttttaccattgattctctggcgcgattagaagaaaagaaatttccggttggtgaaagcgagtcgaaatttaatcagattaacattatcaatcacggggaagacgttgcccaaatcgatgctttcgtccagggaactcaattgaatgttgattttgtatcctga

SEQ ID NO: 132002 - DNA, 476 bp, Homo sapiens
atgcctgatttccgcaatgaccgctttgttgatgaaagacagtcaacgcgcttgatagcctggcgaagatcatccgatcttcgccttacacttttgtttcacatttctgtgacatactatcggatgtgcggtaattgtatggaacaggagacacacatgaataataagggctccggtctgaccccagctcaggcactggataaactcgacgcgctgtatgagcaatctgtagtcgcattacgcaacgccattggcaactatattacaagtggcgaattacctgatgaaaacgcccgcaaacaaggtctttttgtctatccatcactgaccgtaacctgggacggtagcacaaccaatccccccaaaacgcgcgcatgtggtcgctttacccacgcaggcagctacaccaccgcgattactcgcccaactctctttcgttcgtatcttaatgaacaacttacgttgcggtatcagga

SEQ ID NO: 132003 - DNA, 540 bp, Homo sapiens
atggccgcgccagccccgatcagcgcctatctccacgccggatcgatggtgaaagtgggcgttaacatttttgcccgcgctatgatcgacggcggcaatatcccgcatgtgattggcggcgttggcatggtcatggcactgccagagcaggatatgaagcggttgctagcctggtcgaccatcactcaacgtaggctggatgtactatcggcttggtcggtctccatcttacggctcggcggcatggcgctggagggcagcatcgcctacatcgtaataaacttctgtgatgttaagccacagagatttcggggcttatctgttccagcagccagcattaccgtagtgcttatccagcagttcgttttgcatcgcagggagctgcggcgcaagctggcgcttcccgctcaccatctggtgacgttcacctggggcaatgtcagcgcggtagacgaaacgcggcaatggatggtaatcaaaccttccggcgtcgagtacgacgtgatgaccgccgacgatatggtggtggttgagatatag

SEQ ID NO: 132004 - DNA, 492 bp, Homo sapiens; identical to SEQ ID NO: 127444

SEQ ID NO: 132005 - DNA, 1104 bp, Homo sapiens
gcttcattccagcgctccaatagtcatgacaaagtaaggagaatagttgcagaggagggtcgtacagcaagaaacctaatagcttggagtgttccactagaaagcaaagatgatgatgacggaaccgtttgcgctagccgcattgaccgagttacacgccgacgcacgttatcttggtttaggcggccatcttgtttgccgcgtggggaaattcgggccagcctaccaatgcaagcgtggctaccgaacgcaatggaagcgccaacacggatcagcgcctatctccacgcggcatcgatggtgaaagtgggcgtttacatttttgcccgcgctattatcgacggcggcaatatcccgcatgtgattggcggcgttggcatggtcatggcactggtcaccattctttatggctttctgatgtatttgccacagcaggatatgaagcggttgctagcctggtcgaccatcactcaacttggctggatgttcttcggcttgtcgctctccatcttcggctcgcggctggcgctggagggcagcatcgcctacatcgtcaaccacgcgttcgctaaaagcctgtttttccttgtagcaggtgcgctgagttacagctgcggcacgcgcttgttgccgcgtctgcgtggcgtattgcacaccctgccgttgccaggcgtgggtttctgcgtggcagcgctggcgattaccggcgtgccgccgttcaacggcttcttcagtaaattcccgctgtttgctgccggttttgcgttgtcagtggagtactggatcctgctgcccgccatgattcttctgatgattgaatcggtcgccagtttcgcctggtttattcgctggtttggtcgcgttgtgcctggcaaaccgagcgaggccgtcgccgatgccgcaccgctgccaggatcaatgcgcctggtgttgattgtactgattgtgatgtcgctgatttccagcgtaatcgccggccgtagccgcatgcccaggcatctcctgtgcgacgaaacgctgcgcggcgcgaacgacaccacagccagtaaaggccaggcagcaaaggcatcgccagtagtaacagcaacagtaatgagggggtga

SEQ ID NO: 132006 - DNA, 3243 bp, Homo sapiens
ttagtagacatctcgctgataacggcgctctacgcgcagctcacttaaaaattcatccgccgcttcggtgtccatgccaccaaattcggcaatcacttccagaagtgcctgctcaacgtctttcgccatgcgattagcgtcgccgcagacataaatgtgggcaccatcattgatccagcgccacagctccgcgccctgttcgcgcagtttgtcttgtacgtaaactttttctttttgatcgcgcgaccaggcaagatcgatacgtgtcagcacgccatctttgacgtagcgctgccactccacctggtacaggaagtcttccgtaaagtgcggattaccaaagaacagccagtttttacctggcgcttcgtcggcggcgcgttgctgcataaaggcgcggaacggcgcaataccggtgcctgggccaatcataatcaccggggtttctggattggctggcaggcggaagttatcgttatgttcgataaatacgcggacttcgccctcttcttccacgcggtcagcgaggaagctggaggcaccaccggcacgggcgcggccttccacgttcggtaagcgccacgccaccagcggcgcgtctttgctgtacgggctggtgtggatttcatttaccgcgccagtagcgacggattgcgaaggtgccgcgacaggcgcacgcgatttaagcgcatcaaccacgcgggcgcgccactcgctggcagcagcctggtattcaacatcggcatcgacacggtcgagcaggcgttcaccacccagttccgccagcttgctgtcgaaatctttcccggactggcagaaaaattcataagagctatcgccgaggctaaacacggcaaacgcggtgttttccagctttggcgcttttttggagaacaggaacttatgcagcgcgacggcttcttccggcggttccccttccccttgcgttgacgtcactacgatgagcagtttttcgctggcgatttgtttgaatttatagtcgcccgcgttcaccagcttaacgttcagttttgctgctaataaatcatcacgtaaggcttcagcaaccccggcgcgcatttgccgttttgcgagccggagataatagtaatacccggcatttttgcgtctggcctgggcgtcgaggcctgccgcttttgccgcctgaatatcattgcgtgagtcgccgacaaacagcatctgttgtggggcaattcccatccgctcagccaccagtaacagcgggtccggatgcggttttttgttttgcacatcatcaccaccaatcaccacgctgaagtatttggcgatatctaaggcttcgagcagcggcgcgacgaacggcgtcggtttgttggtgaccaggcctagcggcaggcctttagcctgcaacgcgcccaacgtatcggcaacgtgcgggaacaaaaacgtcccctcttcggcaacctcgccatagtagcgatcgaacagtttacgcagaatacgtacctgttcttctgccggaatgtcgtcatcaacgggcggtttacccattgttttacgctgagtcgcacgttcctgacgcgcccaggtcaatgcgcgctccatcagaacatctgcgccgttaccaatccaggtaataacgcgttcttcacctgcgacgggcaactccagcgcatacagcgccatatctaccgcagcagcaagaccaggagcactgtcgaccagcgtaccatcaagatcaaaagcgacgccgcgaatatcttcaaactttgccagttcactgcgcatttcatcaatgacttttttgtagtctggctggtcgaagattgccgaaccggcgacgaacatatccgcgcccgccgcagcgatttcgccaatgttgttcaccttcacgccaccgtccacttctagtcgaatgtcaaagccagactcgtcgatacggcgacgtacttcgcgcagtttatccagtgtttgaggaatgaaagactgaccgccgaaaccagggttgacggacatcagcaggatcacatccagcttatccatcacgtaatccagatagctcagaggtgtcgccgggttaaataccagacccgctttacagccattttctttaatcagttgcagcgtgcggtcaacatgctcggaggcttctggatgaaaggtaatgatgctggcaccagcggcagcgaaatcaggcacaatgcgatcgacgggtttcaccatcaggtgtacgtcgataggggcggtaatgccatagttacgcaaggatttcagcaccattggcccagtcgtcagattgggaacatagtggttatccatgacgtcaaaatgcacgacatcagcgccagctgccagggcttttgcggtatcttcacccaggcgggcaaatcggcgatagcttttgacgtgcaaccaggtcgcggcgattacgctggaaatcagcgacatcacaatcagtacaatcaacaccaggcgcattgatcctggcagcggtgcggcatcggcgacggcctcgctcggtttgccaggcacaacgcgaccaaaccagcgaataaaccaggcgaaactggcgaccgattcaatcatcagaagaatcatggcgggcagcaggatccagtactccactgacaacgcaaaaccggcagcaaacagcgggaatttactgaagaagccgttgaacggcggcacgccggtaatcgccagcgctgccacgcagaaacccacgcctggcaacggcagggtgtgcaatacgccacgcagacgcggcaacaagcgcgtgccgcagctgtaactcagcgcacctgctacaaggaaaaacaggcttttagcgaacgcgtggttgacgatgtaggcgatgctgccctccagcgccagccgcgagccgaagatggagagcgacaagccgaagaacatccagccaagttgagtgatggtcgaccaggctagcaccgcttcatatcctgctgtggcaaatacatcagaaagccataaagaatggtgaccagtgccatgaccatgccaacgccgccaatcacatgcgggatattgccgccgtcgataatagcgcgggcaaaaatgtaaacgcccactttcaccatcgatgcggcgtggagataggcgctgatcggtgttggcgcttccattgcgtccggtagccacgcttgcatcggtagctgggccgatttcccccacgcggcaaacaggatgccgccataaaccagataacgtgcgtcgccgtgtaactcgctcatcgcgctccat

SEQ ID NO: 132007 - DNA, 1986 bp, Homo sapiens
atggcgggactggtactctcctcgacgctgctcggtcagttgttgttttttgaaattacaggcggctgctcctgggcgttgatcagttattaccagagcgataaagcgcagcgttcagcactaaaagcgttacttatcactcatatcggctcgttggggttgtatcgttgccggcgtcacgctgtttttgcagaccggaacgtttgcgcttatcgcgatgagcgacgtacacggcgacgcactgtatctggtttgtggcggcatcctgtatgccgagtgggggaaatcggcccagctaccgatgcaagcgtggctaccggacgcaatggaagcgccaacaccgatcagcgcctatctccacgccgcatcgatggtgaaagtgggcgtttacatttttgcccgcgctattatcgacggcggcaatatcccgcatgtgattggcggcgttggcatggtcatggcactggtcaccattctttatggctttctgatgtatttgccacagcaggatatgaagcggttgctagcctggtcgaccatcactcaacttggctggatgttcttcggcttgtcgctctccatcttcggctcgcggctggcgctggagggcagcatcgcctacatcgtcaaccacgctagttcatcaccaattatgctcactcgcctgcgcgaaatagtcgaaaaggtagccagcgcaccacgcctgaatgaggcgttaaatattctggttaccgacatctgtcttgcgatggataccgaggtctgttcggtctacctggccgatcatgatcgacgttgttactacctgatggcgacccgggggctgaaaaaaccacgcggtcgcactgtaacgctcgcgtttgatgaagggatcgtcggcctggttggcaggctggcggaaccgataaaccttgcagatgcgcaaaagcaccccagcttcaaatacatcccctccgtaaaagaagaacgtttccgcgcgtttttaggcgtaccaattattcaacgtcgccagttgcttggtgtactggtggtacagcaacgagagttgcgccagtatgacgaaagtgaagaatccttcctggtgacgcttgccacccagatggcagctattctttctcagtcgcagttgactgccttgtttgggcaatatcgccagacgcgaatccgcgcattaccggcagcacctggtgtggcgattgccgaaggctggcaggatgccacgttacctttaatggaacaggtgtatcaggcatcaacgctggatccggctctggaacgcgaacgactgacccgggcgctggaagaagcgggcaacgagtttcgccgctacagcaaacgctttgccggcgcgtgccggtgggatatcgttcagcagggtagcgaggcgagggatcggttctgcggtttccgggctgatgcgcatacccaatttggcggcaaaacgtaccgcgcgcagcatacgtaccggatcttcacggtagcgcgtttccgggttaccaatcagacggataacgccgtccttcagatccttcatgccgccaacgtaatcacggacggtaaaatccgctacgctgtaatacaggctgttgatagtgaaatcgcggcgctgggcgtcttcttcgatggagccgaaaatgttgtcgcgcagcaacatgccgttttgcccgcgttgggaggtcgtgcggtcgctgacgttaccttcgtggtgtccacggaaggtcgcaacttcgataatctccgggccaaacattacatgagccagacggaaacggcgacccaccaggcggcagttacggaacagtttgcgcacctgctcaggcgtgggcgttagtggttacgtcaaaatctttcggctttttgccaagtaacaggtcgcgcacgccgccgccaaccagccaggcttcgtatcccgctttattgagcctgtacattaccttcagggcattttcactgatatctttgcgggaaataacatgctgctcacgc

SEQ ID NO: 132008 - DNA, 825 bp, Homo sapiens
atcacttttccggcaacaatcgaccgcatcatggctaactggaatttttaattcatggcaattagcggcaatggaatataaaattcactcgcgtgtgtctcatattgcctgttgtcgccactatttcatcgcgaggaaagatatgaacggcttacttcgtatccgtcagcgttaccaggggcttgcccagagtgataaaaaactggcggattatctgctgctacaacctgatacggcgcgccatttaagctctcagcaactggccaacgaagccggagtcagtcagtccagcgtcgtgaagttcgcgcaaaaactcggctataaaggttttccggcgcttaagttggcgttgagtgaagcgctggcaagccagcaggactcatcagccgggtccagtcagagtcatatcagcggtgatgatccgttacggctggtcggcgaaaaactgattaaagaaaatactgccgctatgtacgcaacgctaaacgttaatagtgaagagaaactgcatgaatgcgtaacaatgttgcgctctgcgcggcggataattctgaccggtattggcgcttcgggtctggtggcgcaaaactttgcctggaagctgatgaagattggcttcaatgctgccgcagtgcgcgatatgcatgcgctactcgcaacagtacaggcgtcgtcccctgacgatctgttattagccatttcctacaccggtgtacgacgcgagttaaacctggcggcagatgagatgctgcgagtgggcggaaaagtgctggcgattaccggctttactccgaatgccctgcaacagcgtgcttctcattgccg

SEQ ID NO: 132009 - DNA, 843 bp, Homo sapiens
atgctttctgggatagttctactggaacgcgacttcttcgaaacaaaatcagcacgaagagagccgtcgggaccgaatagtgctgctgtaggtcgatctagaggatcccctcggttaccggtcgtaactaacatcttcagcctctggcgggatgatggccgcgcttcctgcggatataacaaaacgatgaggttttacatgcgtaaaattaaagggttacgttggtatatgatcgcactggtgacgctcggcaccgtgcttggttacctgacgcgtaacactgtggcggcagctgcgccaactctgatggaagagttaaacatctccacccaacagtattcctatatcatcgcagcctattctgctgcttatacggtcatgcaaccggtagcaggttatgtactggatgtgctgggtacgaaaatcggttatgcaatgtttgctgtgctgtgggccgtgttctgtggtgcaaccgcgctggcaggtagctggggtggcctggctgttgctcgtggtgcggtcggtgccgcggaagcagcgatgatcccggcgggtctgaaagccagctccgaatggttcccggcgaaagagcgttccatcgcagtaggctactttaacgtaggttcttcgattggtgcgatgattgcgccgccgctggtggtatgggcaatcgtaatgcacagctggcagatggcatttatcatctccggtgcattgagctttatctgggcgatggcatggctgattttctataaacatccgcgcgaccagaagcatctgaccgatgaagaacgcgactatattattaatggtcaggaagcccagcaacaggtgagctcatag

SEQ ID NO: 132010 - DNA, 1728 bp, Homo sapiens
atgctgttgcaggatgcaggctggaatgacaaacgtatttctgatgcgctgaagcagggtgatacacgttacgtcaatattcggcagtcgattccggtgaatctctactacctgacggcctttgttggtgcagatggtcgtacccactatgccgccgtgtttaagtttgactggttctctgccaccggcaccgccattctgtttgctgcaattaccatagcaataggacccccaagttgtagcgctacggcttccacacgacttagtgagaacagcgactgccaggtgtaccattcgctgataaaaccattcagcggaggaatggctgatatcgcgaggcaaccaatccacctgacgctggacggttgctttgttgaagttgaacagaacgtcagacttcagagtgaagtgcttggtctgtacttccggtgccggagctggagccggagcaactactggagctgcttcgccctgaccgaaacggtaggaaacacccaggctcagcatgccgttgtccggacgagtgccgatggtgtacagctgcgccagctccagttcatcaacgagcgccttaagacgtgcagagtcagactgcaacgcgaaattttgtgcctgattgagcggagtattgccgatagacctgctggacgacgaaggcatggcgttcgtcaacgagcagatggatatctaccgcaatatcggttatcgcgtattgatggtttccagccatactcaggatgggctaaaaccgctggaagaggcgttgaccgggcgcatcagcatttttgccgggcagtctggcgtcggcaaatccagcctgctgaatgcgttgctggggctgcaaaaagagatcctgaccaacgatatctcatgacacaggcagaacgccgccatgaccggctggctgtcaggctgtcactgataatcagccgtctggttgcgggtgaaacgttgagcgtgcgcaaactggcggctgagtttggcgtgtcagtgcgcacgctgcggcgtgattttcgtgaacgactgatgtatctggacctggagtatcagtccggatactgccgcttacgcactgctggcagtgagatgcagatggtgcccgacgtgcttatctttgcccaccgcagcgggctggccgggctttttcccggccttgaccgccgtctgcgtcgccattattacggctggttgccgaaagagggaaccgttgagccgctgccgaacggtaagcgtctgccgacagactttaatgaaggggcgaagaacaacacctattctcgtaatgagaagatggtcggctacagcttcgatcacgaatttaacgacacctttactgtgcgtcagaacctgcgctttgctgaaaacaaaacctcgcaaaacagcgtttatggttacggcgtctgctccgatccggcgaatgcttacagcaaacagtgtgcggcattagcgccagcggataaaggccattatctggcacgtaaatacgtcgttgatgatgagaagctgcaaaacttctccgttgatacccagttgcagagcaagtttgccactggcgatatcgaccacaccctgctgaccggtgtcgactttatgcgtatgcgtaatgacatcaacgcctggtttggttacgacgactccatattgtcttcaatacgcagcaaaaaacaggaaaccagttcgccgcgctgctgcttaccgcagttgaggaatgttggcgtggctggctga

SEQ ID NO: 132011 - DNA, 1827 bp, Homo sapiens
atggcaccgttacctgaaatggtcgctaccagtcgtaatattgatgaaaaatataaaaactattacacagcgttaactgaactgattgattatctagattatggcaatactggagcttatttcgctcagccaacccagggaatgcaaaatgcaatgggcgaagcgtttgctcagtacgccctcagcagtgaaaaacttgtatcgcgatatcgtcactgccaacgcagatgattcccgatttgcccagtggcaactgccggttatcgcgctggtggtggtattgattctgctggtggcgtggtacggcattcgccgtatgttgcttactccgctggcaaaaattattgctcacattcgcgaaatcgccggtggtaacctggcgaataccctgaccattgacgggcgcagtgaaatgggcgacctggcgcagagcgtttcacatatgcaacgctctttgactgacaccgtcatatcagcgtccgcaaaggttcagatgccatctatgccggtacccgtgaaattgcggcgggcaacaccgatcttcctcccgtactgaacaggtctcagccgcagcaacagccgcaacagcaacttgctcagcaagagcagaaagacagcgacggtgtagccgttgtagtagccacagcggttagcggcatgtctgtttatgcacaggcagcggttgaaccgaaagaagacactatcaccgttaccgctgcacctgcgccgcaagaaagcgcatgggggcctgctgcaactattgcggcgcgacagtctgctaccggcactaaaaccgatacgccgattcaaaaagtgccacagtctatttctgttgtgaccgccgaagagatggcgctgcatcagccgaagtcggtaaaagaagcgcttagctacacgccgggtgtctctgttggtacgcgtggcgcatccaacacctatgaccacctgatcattcgcggctttgcggcagaaggccaaagccagaataactatctgaatggcctgaagttgcagggcaacttctataacgatgcggtcattgacccgtatatgctggaacgcgctgaaattatgcgtggcccggtttccgtgctttacggtaaaagcaatcctggcggcctgttgaatatggtcagcaagcgtccgaccaccgaaccgctgaaagaagttcagtttaaagccggtactgacagcctgttccagactggttttgactttagcgattcgttggatgatgacggtgtttactcttatcgcctgaccggtcttgcgcgttctgccaatgcccagcagaaagggtcagaagagcagcgttatgctattgcaccggcgttcacctggcgtccggatgataaaaccaattttaccttcctttcttacttccagaacgagccggataccggttattacggctggttgccgaaagagggaaccgttgagccgctgccgaacggtaagcgtttgccgacagactttaatgatagggcgaagaacaacgcctattctcgtaatgagaagatgaacgaaccggaaaccgggtattacggctggttgccgaaagacggaaccgttgaaccgctgccgaacgcttctttcgtggcaattttcccccaggagggatttccctgcagtggacctcctccccattggtaccttcagccatcagaacacctcgctttagatctgtgggtcccaaatttcatcaaatccaatgaccatttctatggaaatcatcccaatatgcctgatgtgcttttcctactttgctacctgtcaacgttgtccatgatgtccctggttgaacaaaaatccttggatttgatgtaa

SEQ ID NO: 132012 - DNA, 362 bp, Homo sapiens
  misc_feature (1)...(362): n = a,t,c or g
ggcacgaggtgttatggtttttgaagttttcaggggtttagtgccgttatctccggatatttgtagattgatctaccttgggtctttactgctgctgaccttcaagtgggctctatgagtggacgtcctttttgttgatgctgatactatnnnnnnnnnnnnnnnnnnnnnnnnnnnnnnnnnnnnnnnnnnnnnnnnnnnnnnnnnnnnnnnnnnnnnnnnnnnnnnnnnnnnnnnnnnnnnnnnnnnnnnnnnnnnnnnnnnnnnnnnnccaagattactgcctgtttcttcctctgcaagctttgtcccagaacggcacccgtcagatgccacccacaggtcttctgtatgagatgtcc

SEQ ID NO: 132013 - DNA, 2643 bp, Homo sapiens; identical to SEQ ID NO: 129288

SEQ ID NO: 132014 - DNA, 1560 bp, Homo sapiens
gctattattcgtgaattgggtggtattccaattgttgcaaacaaaatcaaccattccaaccagagtattaaagagaaagctttaaatgcactaaataacctgagtgtgaatgttgaaaatcaaatcaagataaagatatacatcagtcaagtatgtgaggatgtcttctctggtcctctgaactctgctgtgcagctggctggactgacattgttgacaaacatgactgttaccaatgaccaccagcacatgcttcacagttacattacagacctgttccaggtgttacttactggaaatggaaacacgaaggtggattcatcattcctttccctttatgacagccacgtagcaaaggagattcttcttcgagtacttacgctatttcagaatataaagaactgcctcaaaatagaaggccatttagctgtgcagcctactttcactgaaggttcattgtttttcctgttacatggagaagaatgtgcccagaaaataagagctttagttgatcaccatgatgcagagagcaactgggggaaggggtgctgtgggcgcagtttcagcagacttaaacgtccctgcctgacagctctgaaaagagcactggttctcccagcacagcgttcgagctctgataagggacagactgcctcctcaagtgggtccctgacccctgtgtatcctggctgggagacacctcccagtaggggccgacagacatctcatacaggagacctctggctggcatctgacgggtgcccttctgggacaaagcttgcagaggaagaaacaggcagtaatctttgctgttctgcagcctccgatgttgatacccaggcaaacagggtctggagtggacctccagcaaactccagcagacctgcagcagaggggcctgatcacaactcctcaccagcaagggaagaaaactggacacagaatgagtttgatgaattgacagaagcaggctttagaaggtgggtaataacaaacccctccgagctaaaggagcgtattctaacccaatgcaaggaagctaagaaccttgaaaaaagaaccaatgacaaaaaccacatgattgtctcaatagaagcagaaaaggccttcgacaaaattcaacaacccttcaagttattcaataaactaggtattaatggaacatatctcaaaataataagagctatttatgacaaacccacagccaatatcctactaaatgggcaaaaactggaagcattccctttgaaaaccagcacaagacaaggatgccctctctcaccactcctattcaacatagcattcgaagttctggccagggcaatcaggcaagagaaagaaataaagggtattcaattaggaaaagaggaagtcagattgtctctgtttgcagatgacatgattgtatatttagagaaacccatcatctcaacccaaaatctccttaagctgataagcaacttcagcaaaatctcaggatacaaaaatcaatgtatcacagcattcctatacagaattaaaaatcacaagcaaactcaaaagcgagcagaagaccaataa

SEQ ID NO: 132015 - DNA, 886 bp, Homo sapiens
atggcgccagtatctgcttctgaggacttctggcaatgtccagagacatctttgatttcgcaactagaaagtgcccctggaattcagttgatggaggccagggatgctgataaaagtcttataatgcacgaaatagcccccacctccaacagggaattaccagtccataaaatcagtattgccaaaccttgctctatgctaatgatctcatggttttttgttaataccggacaaagcttccagaggaaggatcaggcagcaatatttgctgttctgcagcctctgctggtgatacacaggcaaacagggtctggagtggacctccagcaaactccaacagacctacagctgagggacctgactgtcagaaggaaaaataacaaacagaaaggaatagcatcaacatcaagaaaaaggacatctacaccaaaaccccatctgcaggatcacagctcctcaccagcaatggaacaaagctggatgcagaaagactttgacaagttggcagaagtaggcttcagaaggtcggtaataacaaacttctccgagctaaaggaggatgttcaaacccatcacaaggaagctaaaaaccttgaaaaaagattagatgaatggctaactagaataaacagtgtagagaataccttaaatgacttgatggagctgaaaaccatggcacaagaactacatgatgcatgcacaagcttcagtagacaatttgatcaagtggaagaaagggtatcagtgattgaagataaaattagtgaaataaagtgtgaagacaagattagaggaaaaagaataaaaaacaaacaaacaaacaaagcctctaaaaaatgtgggactatgtgaaaagaccaaatctacatttgattggtgtatctga

SEQ ID NO: 132016 - DNA, 682 bp, Homo sapiens
  misc_feature (1)...(682): n = a,t,c or g
atttcagcttgtcttcttttaactccgtgattgcttttcacctcatatacaagagctccggctggcatctggcaggtgcccctctgggacgaagcttcccagaggaaggaaaaggcagcaatctttgnnnnnnnnnnnnnnnnnnnnnnnnnnnnnnnnnnnnnnnnnnnnnnnnnnnnnnnnnnnnnnnnnnnnnnnnnnnnnaagtgtcatctggggccatggacggagaggggtgggggctaccagtggacccactgactcgtggacatcaggatgctctgccatggcaaaggtgttatcatccatgttcttcgtcttcagttcctcctcggcaggcctgcagggcagaggagagagtacatggatctaataataccctgagaggtcacttctgccacccactggcaccttctgagcctctgtgctagcccaccttcacctgacagctgctgttttctcttctgctgcctttgtttatcccctcatcctaaaagtcctacagcctcattatagaaaattcgcaaaatacaggaaagtctaaagaagcaagaaaaacaatcacacatcagccagagacaactactgttaccattctggaaactttccttccagatattctacgaaatcatttagattctacagacataatttcacagctagctttgtccatttaacagcc

SEQ ID NO: 132017 - DNA, 489 bp, Homo sapiens
  misc_feature (1)...(489): n = a,t,c or g
ntaggtgctcttctnttcttcacccagtaaattcacggtagctttcttcgcttctttagtgatggcatctgcagtctctttggccttgtctttaaggtccttgaccacactgtccatctgggactcgtgcttcaggaagaaaggacggatgatgcgcttgtagagcagttcagccccattagaagggctcggggccatgcaccacaacaggaagccacagagatgtaggctgggtagccaaatcctatcaggttgcagaggagagaggctccataaccgaacaccaggtacaaggccaccagtccgatgacaccaagagcgatgaagctcctgttcacgccggttttggcctcgagcttggccagaaggtcagtcatgcagttcttctcgtgcaggaaccggtcgaacctctccctcatggccgcagacatggcggggaccgtctcgccgctcggggctgttcctagtgccggacgaaatcgtcgaccg

SEQ ID NO: 132018 - DNA, 669 bp, Homo sapiens
ttagtctttctcgtactgtttgttggttttctctcttgctttaaaagcacatatactcttacttatggggattcgccttccctctgcgatggtcttcttattatttaaataagcaggatagatacaaataaacctgccatagacaatagcataagtggtatcagagatgtaggctgggtagccaaatcctatcaggttgcagaggagagaggctccataaccgaacaccaggtacaagccaccagtccgatacacgtttcgatttctgactgtgttagcctggaagtgcttgtcccaaccttgtttctgagcatgaacgcccgcaagccaacatgttagttgaagcatcagggcgattagcagcatgatatcaaaacgctctgagctgctcgttcggctatggcgtaggcctagtccgtaggcaggacttttcaagtctcggaaggtttcttcaatctgcattcgcttcgaatagatattaacaagttgtttgggtgttcgaatttcaacaggtaagttagttgctagaacccatggctcctttgccgacgcaagagcgatgaagctcctgttcacgccggttttggcctcgagcttggccagaaggtcagtcatgcagttcttctcgtgcaggaaccggtcgaacctctccctcatggccgcagacat

SEQ ID NO: 132019 - DNA, 1431 bp, Homo sapiens
atggtagatcatgtaaaagtcgttgccgatgatcaggctccggctgaacagtcgctacggcgcaatctcacaaaccgacatattcagcttattgccattggcggtgccattggtacggggttgtttatggggtctggcaaaacgattagccttgccgggccgtcgatcattttcgtttatatgatcattggttttatgctctttttcgtgatgcgggcaatgggggaattgctgctttcgaatctggaatacaaatcttttagtgacttcgcttccgatttactcgggccgtgggcaggatatttcaccggctggacttactggttctgctgggttgtaaccggtatggcagacgtggtggcgatcacggcttatgctcagttctggttccccgatctctccgactgggtcgcctccctggcggtgatagtgctgctgctgacgctcaatctcgccaccgtgaaaaatgtcggtgagatggagttctggtttgcgatgatcaaaatcgtcagacccctgtctggaagccgcaccaagaagatgtccaagtctgacgataatcgcaataacgttatcggcctgctggaagatccgaaatcggtagtgaagaaaatcaaacgtgcggtcactgactccgacgagccgccggtagttcgctacgatgtgcagcgaccaaagcgaagcgccctgctggagcgcgcccctgaacgttttcaggaagtctttattttaaaaggccgtgaagataaacgtctgttaccgctgattcacgcccttgagtctcagggcggtggttatccagttggcaaaccgccaatatctcgacgagaaaagcgaccgtgccgtgcatcaggggcatattccccgccagttttattgatcctgattatggatccgctcggaaacctacctattttcatgtccgtactgaaacatactgaaccgaaaagacggcgggcaatcatggtgcgagagttgcttattgctctcctggtgatgctggtgttcctgtttgcgggtgagaaaattctggcatttcttagcctacgagcagaaaccgtctccatttctggcggcatcattctgtttctgatcgccattaaaatgattttccccagcgcttcaggaaatagcagcgggcttccggcaggtgaagagccatttatcgtgccgttggcaattccgttagtcgccgggccgactattctcgccacgctgatgttgttgtctcatcagtacccgaatcagatggggcatctggtgattgctctgctgctggcctggggcggcacctttgtcatcctgctacagtcttcgctatttttacgtctgctgggcgagaaaagggtgaacgcacttgaacgcctgatgggattgattctggtgatgatggcacccagatgttcctcgacggcattcgaatgtggatga

SEQ ID NO: 132020 - DNA, 918 bp, Homo sapiens
atggtagatcaggtaaaagtcgttgccgatgatcaggctccggctgaacagtcgctacggcgcaatctcacaaaccgacatattcagcttattgccattggcggtgccattggatatttcaccggctggacttactggttctgctgggttgtaaccggtatggcagacgtggtggcgatcacggcttatgctcagttctggttccccgatctctccgactgggtcgcctcgctggcggtgatagtgctgctgctgacgctcaatctcgccaccgtgaaaatgttcggtgtcatcggactggtggccttgtacctggtgttcggttatggagcctctctcctctgcaacctgataggatttggctacccagcctacatctccgaatgtccgcccacatacggcgtgaaaccgggtctggtggttggtttgattgctggcggagaatatgccattcagcacgcggtggaaggcgcggaagatagccgggaaggcggtgttaatgatctgaaaaatattaatttaacggcacaggatgtggtggttggcattgctgccagcggtcgcacgccgtatgtgattgccggactggaatacgcacgccagctcggctgccgcacagtgggaatttcctgtaatccggggagcgccgtttcaaccaccgctgagtttgccattacaccgattgtaggtgccgaagttgttaccggttcttcgcggatgaaagcaggtacagcgcagaaactggtgctcaatatgctttccaccgggctgatgattaaatccggcaaagtgttcggcaacctcatggtcgatgtggtcgccaccaacgaagaactgcatgtgcgacaggtcaatattgttaaaaacgccaccggatgtagcgcagagcaagcggaagcggcgttaattgaatggtag

SEQ ID NO: 132021 - DNA, 2385 bp, Homo sapiens
ggtttgctttctacaaagttttaagtttaataaaatgccggtaatcaccactgttttcctccccaaaataaatgctctgatccatattatattagagtgatactgtcacttagtattgatatctttaatattttttacatcatgagacattgttatgatcttacctgattgttatctcaaggtgagctaatcatctttatttgccttaaaaaatactgcactggctggatatttaatcttgttagtttagttatacacttgttttagtctagtttaattcaaaaggactcttaacagtatggtgtaaaactcagattttctagtccagacaaattgctctctataacgatttggcagatcaatggagacatccgttttaactttactgttctgtacttactatgtagtcatgtgcagcttatcaacacaaagaatacggatgagggcatttaaatggactacaagtgactctgacttgtaaactagggaagcctcttgtgtttgacctcaaaggccagagaaaaactgaagatagattgacttaactattgccaagcagattatgggttactttatacttcctttcattctcccagaattgctcttagagctaggtgtcgtcattagcatgttgttgctaatgatacaaacaagaacatacatgtaatcagaggtggacaaatcttcagaagttccttaaactggtttaaaaaagaagattgggaaagaagactaaatcaacatgtttctccgctttgaagataaaaccagaaatggtttccattgtagcatcttgacaatagacaaatatgtaaagtttatagcagataagacagtattactagtttttcagggaattgagagttacagggtactctgtgtgtgtgtgtgtgtgtgtgtgtgtgtgtgtgtgtgtgtgtgtgtgtgtgtaaatttcccgatttatcactagagtgagtaactaactaactaactgctttataaagctatcctggtattcatatgccatatactagggaaacaaccaggccaatctccattcgatttcatttctcactttgttcacttgcatattaatcacgtatttcctaaagtattatttagtagaccacaccagcacaatggttcctccagcttttggcaggtggtcttactgtacagaagttataaatgacacatacaaccttcccctgctccctccccatgagcatgatgcatgttgtagtcagacagtaacatttccatatgtacatgtgcacaaatacattaaaaacatttcagaattatataaaattgtacattataggaagtagaaccataaagattatcctaaatgtaactacagagaaaatgcgtgcagggagagcccagtaaagtacacagcctgtggggtatataattttattttaagtttatatttcctgcaggatagcaacatacatcttttcctacccagaggcaaaatacattttccaaaaacgtggacactgcccactgcattaagtttaaagtgctccctatatatatagacagtaaaagtaagcaaagaaacttacaacacattccaatctttaatatctcaaaaatgtttccaaggcaacattattaaaataattataccacagtccctaatataacatcaagctccagtaggaaggtacagagagggcaggaagtttccatccagtctggtttagtctggtttaggtgctcttcttttcttcacccagtaaatttcacggtagcttttcttcgctttctttaagtgatggcatctgcagtctctttggcccttgtctttaaggtccttgaccaacacttgtccaatctgggacttcgtgcttccagggaaagaaaaggaccggatgatgcgcttgttagagcagtttcagcccccatttagaaggggcttcggggccattgcaccaaccaaccaggaagccacactttcagccatgtagttagaaggggaacccatgacaggaagatatcagagaacgaatttcagcaatgctgaacacaccatacactacccagtaggtcagccactgggtatcatcttctttgttgggactctctatagctttaattgagatgtaggctgggtagccaaattcctatcaggttgcagaggagagaggctccataaccgaacaccaggtacaaggccaccagtccgatgacaccaagagcgatgaagctcctgttcacgccggttttggcctctgagcttggccagaaggtcactcatgcagttcttctcgtgcaggaaccgatcgaacctctccctcatggccgcagtcatgttcggggaccgtctcgccgcccggggctgttcctagtgccggatagactggagcggcgactgcggcggagcagacgaaa

SEQ ID NO: 132022 - DNA, 1206 bp, Homo sapiens
atgaaggtctggtcctcatccgttgcaaagggtaatatgaacgaacaatattccgcattgcgtagtaatgtcagtatgctcggcaaagtgctgggagaaaccatcaaggatgcgttgggagaacacattcttgaacgcgtagaaactatccgtaagttgtcgaaatcttcacgcgctggcaatgatgctaaccgccaggagttgctcaccaccttacaaaatttgtcgaacgacgagctgatgaccgttgcgcgtgcgtttagtcagttcctgaacctggccaacaccgccgagcaataccacagcatttcgccgaaaggcgaagctgccagcaacccggaagtgatcgcccgcaccctgcgtaaactgaaaaaccagccggaactgagcgaagacaccatcaaaaaagcagtggaatcgctgtcgctggaactggtcctcacggctcacccaaccgaaattacccgtcgtacactgaaccacaaaatggtggaagtgaacgcctgtttaaaacagctcgataacaaggatatcgctgactacgaacacaaccagctgatgcgttggctgggcccagtgaatcgccagtcatggcctaccgatgaaattcgtaagctggcttcaagccacgttgatgaaacacaaatgggctatggccatctcgttaattactgggacataacatcaagaggatatgaaattatgagtaccgctaaattagttaaatcaaaagcgaccaatctgctttatacccgcaacgatgtctccgacagcgagaaaaaagcaacagtagagttgctgaatcgccaggttatccagtttattgatctttctttgattaccaaacaagcgcactggaacatgcgcggcgctaacttcattgccgtacatgaaatgctggatggcttccgcaccgcactgatcgatcatctggataccatggcagaacgtgcagtgcagctgggcggtgtagctctggggaccactcaagttatcaacagcaaaaccccgctgaaaagttacccgctggacatccacaacgttcaggatcacctgaaagaactggctgaccgttacgcaatcgtcgctaatgacgtacgcaaagcgattggcgaagcgaaagatgacgacaccgcagatattctgaccgccgcgtctcgcgacctggataaaatcctgtggtttatcgagtctaacatcgaataa

SEQ ID NO: 132023 - DNA, 1199 bp, Homo sapiens
ctttaattgatttaatgaataaaatttgccacgatcataattaatatctatgtattttgattcaacattttaattacatccgtcaaagaggctcgggacaacccgcaaggaaaacaatgttgcagcttaacgagaataaacagtttgcatttttccaaagactggcatttccgctgcgtatctttttgctgattctggtgttctcaatatttgtcattgcagccctggcgcaatattttacggccagttttgaggactatttaacgcttcatgtacgcgacatggcaatgaatcaggcgaaaattattgcctccaatgacagtgtcatatctgcggtgaaaacgcgtgactacaaacggctggcgaccatcgctaacaaattacaaagagataccgattttgattatgtggtgattggggaccggcactcgatccgcctttaccatcctaatccggagaaaattggttatcctatgcagttcaccaaacagggcgcgctggagaaaggggagagctacttcattaccgggaaagggtcaatggggatggcgatgcgcgccaaaacgccaatctttgatgacgatggaaaagtcatcggcgtggtgtcgattggctacctggtgagtaaaatcgatagctggcgggctgagtttttattaccgatggcaggtgtgtttgtcgtgctgttagggattctgatgttgctgtcgtggttcctggccgcgcatatccgtcggcagatgatgggcatggagccaaagcaaatcgcacgcgtggtccgtcagcaagaggcgctgtttagttcggtttatgaagggctgattgcggtggatccgcatggttacattaccgccatcaatcgtaacgcaggggatcctctagggtcgacttgcgagctcgcatctgtatctcgctacgtacgcgactcgttagagagtgtctggcatgtagtaaacccacagaaagtggtaactctaataatgatgcgaaatttattgaataacttgacatgtgtaaaacatatcaccatgagcactgagaaatcagtgcatcaggcagtgggggaaataaatgggatctgtgccgggtaccgagcagtacgcaaagcgattggcgaagcgaaagatgacgacaccgcagatatcctgaccgccgcgtctcgcgacctggataaattcctgtggtttatcgagagataa

SEQ ID NO: 132024 - DNA, 991 bp, Homo sapiens
ccagtacatgttcagcaatgtacggcagcaggtcgatagccagtaaatccatcaggttcatcaggaatacccagacgaagatcgtcagggccagcggagcaatcagcttgcttttgccatggtacatgtctttcacgctaccattaacaaagccgatcaccagctcaatcgcggtctgaaacttacctggcacaccgctggtcgcctttttggctacgctacggaataaaaccaggaacaacagacccagcaccaccgagaagaacatggagtcaatattgattgtccagaaggtggctggggggttttgtggatccaccagcgagaatgtacgcaggtccagctgaaggttattcaggtggtgtcctatgtaatcctgcggcgtcatattttccaccagagagccaatctcttcctgatagttattggctgttttgagaatgtaatcttccaactgcttataactctcagaatgcaataatccgagaatcacatgcaatttattcataaattcgtgggatcgttcacgaagtgcgtcagcatagttgaccagaccgtcgagtcgctgcatcagtttacgtacttcagttttgtccctgaaggttgaaatggcaccgatgataacgccattactgcgcaccggaacggtgttgatcagtaatagccggtctttaatcgtaatctcttcgtcgcggcgcggggtaccgtcgcgtaacacttccgagacatctaccacctgtgaccatgagtggcttagcgtcgacagtttctcatcgtcctgcgacttacggtaattcagcaattcttgtgcggcatcgttgatcagcgtgacctcgccgcgatcgtccacggcaacgacgccttctttgatagactgcaacatggcctggcgttgctcaaacagcgtggagatttcgtagggttccaggccgaaaaggatttttttcagtaccttaaccagaatgcaggtgccaatcagtccgaccagcat

SEQ ID NO: 132025 - DNA, 1125 bp, Homo sapiens
atgacgcgagatgggctagccaacaaggcactggcagtggcgcgtaccctcgccgactcgccggaaatccgtcagggcttgcagaaaaaaccgcaggagagtggcatccaggccatcgcggaagccgtacgcaaacgcaacgatctgctgtttattgtcgttaccgatatgcaaagtcttcgctactcgcatcctgaagcccagcgtattggtcagccatttaaaggtgatgacatccttaaagcgctgaatggcgaagaaaatgtcgctatcaatcgcggttttctggcgcaggctttacgcgtatttacccccatctacgatgaaaatcataaacaaattggcgtggtggcgatcggccttgagttaagccgtgtgacccaacagatcaatgacagtcgctggagcattatctggtcggtattatttggcatgctggtcggactgattggcacctgcattctggttaaggtactgaaaaaaatccttttcggcctggaaccctacgaaatctccacgctgtttgagcaacgccaggccatgttgcagtctatcaaagaaggcgtcgttgccgtggacgatcgcggcgaggtcacgctgatcaacgatgccgcacaagaattgctgaattaccgtaagtcgcaggacgatgagaaactgtcgacgctaagccactcatggtcacaggtggtagatgtctcggaagtgttacgcgacggtaccccgcgccgcgacgaagagattacgattaaagaccggctattactgatcaacaccgttccggtgcgcagtaatggcgttatcatcggtgccatttcaaccttcagggacaaaactgaagtacgtaaactgatgcagcgactcgacgtctatctctttagctaccgttggatcacgcttgggtaccgagctagaagtcgtatcaaggttgtccattttgctgacctcaatgcgccgttaaacgatgatgagcacgcacaacttgaacgcctgctgaaatatggcccggcactcgccagccacgccccgcaaggcaaactcctgctggtgaccccgcgtcctggcaccatctctccctggtcttcgaaagcgaccgatattgcccataactgcgggctacaacag

SEQ ID NO: 132026 - DNA, 2124 bp, Homo sapiens
atgagggatcgacttggatccccgcagttcggtatatccggtgttcgcgcgggtggtactaatagacgcatggcgcggatgatatccatcccgcctgccagcagcagttccagcatgttatccatacgaactggagtcagagccggtttcgttgacgaacggtgcggcgtcgtgcaggtcagggataagcggtgtctggaatttataagtacgcgcacgcgcccattggcggttaccggtgatggtgttgatttcaccgttatgcgccagatagcggaacggttgcgccagcggccagcgcggtacggtgttagtggagaagcgctggtggaacaggcaaatggccgattccagacgcaggtccgcaagatcccgcactatacgcggcctgaggtgttagaagggatggaagttccgccagtgttactgtcgggcaaccatgccgagatacgtcgctggcgtttgaaacagtcgctgggccgtacctggcttagaagacctgaacttctggaaaacctggctctgactgaagagcaagcaaggttgctggcggagttcaaaacggaacacgcacaacagcaacataaacatgatgggatggccaacattattaagcaacttgaacaagagcagatgaagcaggacgtaccttccttccgtccgggtgataccgtggaagtgaaagtatgggttgttgaaggttccaaaaaacgtctgcaggcattcgagggcgtggttatcgctattcgtaaccgcggtctgcactctgcattcactgttcgtaaaatttccaacggcgaaggcgttgagcgtgtcttccagactcacctgcgttgccggattatcaataatggcattgatatggcaactgaagcgattctggcggacttgcctccggtgcgcgaaacccagggcaagccgaaaatcgcggtggtggcgcatgatctgcgttacgacggcaaaactaaccagcaactggtacgcgagatgatggcgctgggcgacaaaattgaactgcatacctttggtaagttctcgccgttcaccgctggcaacgtggttaatcacggctttgaaaccgacaaacgtaagctgatgagcgcgctcaatcagatggatgcgctggtattcagttctcgcgtcgataactacccgctgattttgtgtgaggcgctatcgattggcgtgccggtgattgccacccatagcgatgcggcgcgggaagtgttgcaaaaatccggcggtaaaaccgtcagcgaagaagaggtgctgcaactggtgcagttaagcaaaccggaaatcgcgcaggcgatatttggtaccacgctggctgagttcagccaacgcagccgcgccgcctacagtggacaacagatgctggaggaggataatatatccggatcggtaccgagcattgattgtatcatgtcaatcgactttaccgccttacgctgcattttcggcgctctcgttttattcatcgtccttttattacgtggtcgcggaatgcgcccgacaccgtttaaatacaccttagccattgccctgttacaaacctgcgggatggttggtctggcgcagtgggcgttggtcagcggaggtgcggggaaggtggcgatcctgagctataccatgccgttctgggtggtgattttcgccgcgttgtttctcggtgaacgcctgcgacgtgggcaatatttcgcgattctgattgccgctttcggcttatttttggtgttgcagccgtggcaactcgatttctcttcgatgaaaagtgccatgctggcaatcctctccggcgtcagttggggggcgagcgcgattgttgctaaacgtctgtatgcccgtcatccgcgcgtggatttattgtcgttaacatcctggcagatgctgtatgcggcgctggtgatgagtgtggtcgctttactggtgccgcaacgtgaaattgactggcagcccaccgtgttctgggcgctggcctacagtgcgattctggcgacgggtgtcccacaaatctatgctgccaaatccgaagctaacagagccaatacgcgtctgatgctctcagatgtcgtacatcgttctcacgatcggccaccgttttgtattagtataggtcggtga

SEQ ID NO: 132027 - DNA, 1710 bp, Homo sapiens; identical to SEQ ID NO: 124845

SEQ ID NO: 132028 - DNA, 1338 bp, Homo sapiens
atgtctcggaagtgttacgcgacggtaccccgcgccgcgacgaagagattacgattaaagcaccggctattactgatcaccaccgttccggtgcgcagtaatggcgttatcatcggtgccatttcaaccttcagggacaaaactgaagtacgtaaactgatgcagcgactcgacggtctggtcaactatgctgacgcacttcgtgaacgatcccacgaatttatgaataaattgcatgtgattctcggattattgcatctgaagagttataagcagttggaagattacattctcaaaacagccaataactatcaggaagagattggctctctgctgggtaagatcaaatctccggttatcgctggttttttaatcagcaagattaaccgcgcgaccgatttaggccatacgctgattttaaacagtgaaagccagctgccagacagcggcacggctgcttgtgggcagtcgctgaacgttctttaccagcgtatagtgggcgaacgaaaactacacactggatctctcatgtctgccgcaggaaagagcaacccactggcaatcagtggcctggttgtgctcacacttatctggagttatagctggattttcatgaagcaagtcaccagttacatcggtgccttcgactttaccgccttacgctgcattttcggcgctctcgttttattcatcgtccttttattacgtggtcgcggaatgcgcccgacaccgtttaaatacaccttagccattgccctgttacaaacctgcgggatggttggtctggcgcagtgggcgttggtcagcggaggtgcggggaaggtggcgatcctgagctataccatgccgttctgggtggtgattttcgccgcgttgtttctcggtgaacgcctgcgacgtgggcaatatttcgcgattctgattgccgctttcggaatctgtaccgcaacgcaaagaaatcgcctgctgccatgtaaaaaccagccctgcaaagcgaatcagtaccagggaactggcgatgtgctaaatcagttacatattgattttagagcctttagcggtgtcatggttgctggctctaggcaaatatttgctaatgaaatttcgtcaggagcaagtaatgtaggagtagttatattttctactcaggattcggcgaatacattcaatgttcttaatgcttcaggcggatctcgttccgtttatccagtaatgtcggatgacatgaatggttcatcctggaaatttagcacccgaatgcaaaaaatcgatcctgcattgagtgttacatctggtcaacttatgagccatgtgttagtggatatttactacgaataa

SEQ ID NO: 132029 - DNA, 1500 bp, Homo sapiens
atgctgctggctgacgtcggtatgttggggatgccaaacgcgggtaaatcgacctttattcgtgcggtatcggcggctaaaccgaaagtggcggattatccgtttaccactctggtgccaagtctgggtgtggtacgaatggacaacgaaaagagcttcgttgttgccgatattccaggactgattgaaggcgctgcggaaggcgcaggtctgggcattcgcttcctgaagcacctggaacgttgccgcgtcctgttgcacctcatcgatatcgatccgattgacggcaccgatccggttgaaaacgcgcgtattattatcagcgagctggacaacaattaccagccaggatctggcgacgaaaccgcgttggctgaagaagcgaaacagccagagaaagtcgaattcatgtgggatgattatcatcgccagcagcttgaagagattgctgaagaggatgatgaagactgggatgacgactgggacgaagacgacgaagaaggcgttgagttcatttacaagcccagaaagatcaaccgctatgcactgcgcggcaacccgggcgcacgcaccgagcagctgtacgacacgctatttacgacttccgatgacgaaccaggcagttattacccgctgattgctgaaagcgcacgctatgctgacgattattcctgggtggaggtcgctattaatccgcgcgcccgttttcatgatggttcgcccattactgcccgcgatagtatcctcgcgctctacgccaggcgcataatcataaacttcgatgcggcgaggacgatgaaggtaatcacaaacaggatcaggcccgacaatcagcgtggtgcgcagcaacgtactgtctgcaccgcccgcctgcgggtagaaaatgttcccgatccgggcgttgaacaggcagatgatattattctgcgtattacggcaacggcgatctgtggctctgacctccatctttatcgaggcaaaatacctcaggttaaacatggcgatatttttggtcatgaatttatgggggaagtagttgaaaccggaaaggacgtaaaaaatttgcaaaaaggcgaccgagtggtaattccgttcgtcattgcttgtggcgactgttttttctgtcgattgcaacaatatgccgcctgcgaaaatagcaatgcgggtaaaggcgctgcgctcaataaaaaacagataccagctccagcggcattgtttggttatagtcacctgtatggcggcgttcctggcagcaaaaaatgcgcagatccacaaggttcaagcgttgcagtctatggtgctggtcctgtgggattgttgacaatcgcctgtgcacggttgctcggtgcggaacagatttttgttgttgatcatcatccctaccgcttgcatttcgccgccgaccgctacggcgcgatcccgattaattttgatgaagacagcgatccggcacagtcaattattgaacaacggcaggtcaccggggcgtggatgcagtaa

SEQ ID NO: 132030 - DNA, 826 bp, Homo sapiens
cgacccaacttttggcaagaagagctttgagcagaccttgacagtggagctctgtggcacagcaggtgagccagggggcttccactggcaggtgccttcaggaaaacacccgtgcatctctgagtttttcatcatgcatgggcaagctgaacacaacaaaaatgatgatggggaaggtatgacgccgttacgcgtttttcgtaaaacaacacctttggttaacaccattcgcctgagcctgctgccgctggccggtctctcgttttccgcttttgctgcacagatgattgtgcgcatactgctgctgtttatcgctctgttcacctttggtgtgcaggcgcaggctatcaaggaaagctatgcctttgccgtgctgggcgaaccccggtacgcgtttaatttcaaccattttgattatgtgaaccccgccgcgccaaaaggtgggcagataacgttgtcagccctcggcaccttcgataatttcaaccgctatgcactgcgcggcaacccgggcgcacgcaccgagcagctgtacgacacgctatttacgacttccgatgacgaaccaggcagttattacccgctgattgctgaaagcgcacgctatgctgacgattattcctgggtggaggtcgctattaatccgcgcgcccgttttcatgatggttcgcccattactgcccgcgatgtagagtttacttttcaaaaatttatgaccgaaggcgtgccgcaatttcgtctggtctacaaaggcaccaccgtcaaagccattgcaccgttaaccgtgcgcattgagttagctaaacatcattggggccaccaataa

SEQ ID NO: 132031 - DNA, 1968 bp, Homo sapiens
atgggcctcctcatgatgcgagatgtcccctgcggtttcaacgacccagccagacgccagccacaggctttcctgataatccacgcgcgaaatagaacagttacgcagacaggtacgcaagtatcaaacggccacagtgcgaaggtgcagcagtgcaatgccgggctgctttcgcccagggctcgtcagcggagcctgtgcttcaacatgaatgccggcttacacgaagcgagacttgaatctgtgaccgctgtttgccgagtggaacgatcatttccgcgatgctgcccgtcgtttctggatagcggtaaacaacggcgcatcctgacggaactctggcgtacggcccatgactgccgccagatcaaagcggaaaccatcgacgtggcagtcattcgcgtggttgcccgagatggtacacgctacagctacatcgtgtggatggacaccgaatcgaaattaccgatgcgggttgatctccttgatcgcgatggtgaaacgctggaacaatttcgcgtgattgcttttaacgtcaatcaggatatcagcagcagtatgcagacgctggcgaaggcaaatttgccgccgttgctttctgttcctgtaggtgaaaaagctaaattcagctggacgccaacctggttgccacagggttttagcgaagtttccagtagtcgacgtccgctaccgacgatggacaacatgcctatcgaatcacgtctctattccgacggattattcagcttctcggtaaacgttaaccgcgctacgccatcgagcaccgatcagatgttgcgcaccggacgcagaaccgtcagtacaagcgtacgtgataacgccgaaatcaccattgtcggtgaactgccgccgcaaacggcgaaacgcattgctaaactctcgtacccgaccaggcccccaggccaaatccgtctaccggtggaccagccgaataccgataagcccccgtcggctaacggctggtctgcatattgtacttttcctcttactcgacttaaccagtaccaacccagcttctcaacggatttataccatggcactttaaagccagcatcactgacaatgagcggtatggtgttactcggtagaatgctcgcaagaccagtcaacaagtacaatgggcatcgtattgcccgaacagataaagctagcatgccaacggtatacagcgagtcgctctttgtggaggttacggccaagttcggggattcatcagtgctgggcgcggaactgcagattaccaacatgttcggtaataccttcctgcacagcttcgacaaagatccgatgtttgccagcagctttattgtgcagcatgcgtcaatcatcatgtcgatttcgcagatctctgaaaccctgttcattctgaccatcccgttcttcttaagccgctacgaacgtaatgatgatcagtattgtggcgtggatcctgcgttttgcgctgtttgcttacggcgacccgactccgttcggtactgtactgctggtactgtcgatgatcggtaccgagctcgattcgtatctgtcataccggttattggtctgacgctgcttgataaaaacccgcaggcgaaagtggtgttggtcgatgaatcgccgatggcggttgcttccagccgtttgaacgttgaaaccaacatgccagaggcgttggatcgctgcgagtttatgatcaacaacgcgctctccggcgtggagcctttccgctttaatgctgtgctctgcaacccgccgtttcaccaacaacatgcgctgaccgataacgtcgcctgggagatgttccaccacgcccgccgctgcctgaaaatcaacggcgagctgtatatcgttgccaaccgtcacctggattacttccataaactgaagaagattttcggcaactgcaccactattgcgacgaataataaatttgtggtactgaaagcggtgaagctgggacgtcgtcggtaa

SEQ ID NO: 132032 - DNA, 3879 bp, Homo sapiens
atgaaaaagaaaagacccgtacttcaggatgttatggagagaaatggcacgtctagtgatgaaatgtgcaacttatacattatgtattacatggaagccaagcatgcagtttctttcatgacctgtacccagaatgtagctccagatatgttcagaaccataccaccagaggccaacattccaattcccgtgaagtctgatatggttatgatgcatgaacatcataaagaaatacaaactaccatcagagaatactacaaacacccctacacaaataaactagaaaatctagaagaaatggataaattccttgacacatacactctcccaagactaaaccaggaagaagttgaatctctgaatagaccaataacaggacctgaaattgtggcaataatcaatagtttaccaaccaaaaagagtccaggaccagatggattcacagccgaattctaccagaggtataaggaggaactgagattattcgccgcccacatcattgaacagaccacaaaaagtagccgcgtatcccgcttcctgtgggtggagggtaaaatttctacgggttgggtaacgacaggaatatttctttgtattgatggcaaaaacaaccagactatcagtccgcaaacaacaaatgcgatggcagcgcgcgattccagaactggtcatacattgccgtatgcgacgcttgccgcgtcttatccggcctggatgtacgtgctgtacgtaggccggataaggcgtttacgccgcatccggcaacagtgccaactgcctgatgcgacgcttgcgcgtcttatcaggcctacaaattcccgcaccatccgtaggccgataaggcgttacccgcatccgcaacagttgaaaagctggagaaaatgccgcatcaccgacgataccgccgagaatcgccactgcgttcagaccgatttggaccacggtaaagaacatgccgggattttcctgcatattcagaacgcgttgggcatttatattgccttcatcagccaccagtttaagtttgattttgcgccagatcctcggaaggggaagttgattaatttgtgtgaaatacacattgaaagccgattcgaagaaagtgaaccggcatttctcagtggcatagtactacgccgtcatatgacagacgccaattccgccaattccaaaatgcatgcagctgccttaccccaccacgtgctaagggcaggagttgagtcagctgtggcctgccctgggggctggggtccttggggagaacacgggcatgttgatttggacactcattcagcaaacatctacgaagcacctgctgtagaatgcactggacgttgccaatccgtacaacaggtgatagtgaacgccaagagaggccccctttgtcctcacggaccttctcttgtaggagcaggaagagtgaggaaaacttttaacagctcccagcagatgcccgtatgtctcattgagcctgtgttcgcttctaaactgatccctgttagagcgatcttcggatcaatcggtccgatcgtgcagggtaaatcgaccctgttccgtatgatctctgctcaggaacagccggacagcggcaccatcactttgggtgaaacggtgaaactggcgtcggttgatcagttccgtgactcaatggataacagcaaaaccgtttgggaagaagtttccggcgggctggatatcatgaagatcggcaacaccgagatgccaagccgcgcctacgttggccgctttaactttaaaggggttgatcagggtaaacgcgttggtgaactctccggtggtgagcgcggtcgtctgcatctggcgaagctgctgcaggttggcggcaacatgctgctgctcgacgaaccaaccaacgacctggatatcgaaaccctgcgcgcgctggaaaacgccctgctggagttcccgggctgtgcgatggttatctcgcacgaccgttggttcctcgaccgtatcgccacgcacattctggattaccaggatgaaggtaaagttgagttcttcgaaggtaactttaccgagtacgaagagtacaagaaacgcacgctgggcgcagacgcgctggagccgaagcgtatcaagtacaagcgtattgcgaacttcagcaccaagttactttttgtcgacctgcttaagaatgcctacctatacgatctccatttaccgttgttaaacctgatgctgacgccagatgagcgcgaagcgttggggactcgcgtgcgtattgtcgaagagctgttgcgcggcgaaatgagccagcgtgagttaaaaaatgaactcggcgcaggcatcgcgacgattacgcgtggatctaacagcctgaaagccgcgcccgtcgagctgcgccagtggctggaagagaatcaccgcaggcaacggcaaagtagccgaacgcgcctcgccgcgctggctggcgttttcaatcaccacccaactgaaagtgctgtcaccatcgatgccagcttcaatcgccacccaggtgaggagacgaggcaaagccgatacgaggacgaaggagaagacacccgagagcgaggagtgatattatctgtacatggggagccaaagcagcaatctccagcaaagtcgcgcgttattcagtttttccagcagggctttgttatccggacgtacagcgatgcccaggccggtgccaaaatattgcggatcggtcactttctcagtagcaacaccaagttgtggattggttttcagccattcgtttaccaccgctgtgtcaccaaataccccatcaatacgaccatttttcagatcgataaaggcattctgataactgtcataagagacagttttcacttccgggtgctgatcctgaatatatttctggccagtacagggggtcacttcctgtctcgtattacctgtcgggtccagtactttctcagcaaatccttgcgtatttctgggagttttctgtggtcgaaaagggcacggttgttcagcttctgcggaggtggattacccgcgtatggaccactccgggttatttggctttggatgctgctggatctgcgttcatgtctgccggcaccgatgtcttctcgtggatccggtcaccgttgtttcggtgattcccagccggccaccgttgttctgcgcaccagacgctggaaactgttcctgatcccggaagagtattcgccgccgcaggtgctggttgataccgatcggttccttgagatgaatcgtcaacgctcccttgatgatggctttatgcacgcagtgtttaacccgtcatttaacgctctggcaaccgcaatggcgaccgcgcgtcaccgcgccagtaaggtgctggaaatcgcccgtgaccgccacgttgaacaggcgctgaacgagacgccagagaagctgaatcgcgatcgtcgcctggtgctgctaagcgatccggtgacgatggcccgtctgcatttccgtgtctggaattccccggagagatattcttcatgggtgagttattacgaagggataaagctcaatccactggcattgcgtaaaccggatgcggcttcgcaataaaaacgtagttgcctgatgcgctacgcttatcaggcctacatcgttcctgcaatttattgattttgcaagactttgtgggtcggataaggcgttcacgccgcatccggcaaaaacaacgagccaataaaaataccggcgttatgccggtatttttttacgaaagaggtatcaaatgcgtttaattgtggtgagcatcatggtgaccttgctgagtggctgtggcagcattattagtcgcactataccggggcaggggcatggcaaccaatattatcccggtgtgcaatgggatgtgcgtgactccgcctggcgttatgtcac

SEQ ID NO: 132033 - DNA, 2055 bp, Homo sapiens
  misc_feature (1)...(2055): n = a,t,c or g
atgcaatgcaaaggagtcacgggagacggtctaacccatccacttaagagagaatttcccaccattagtctaagagttagggtgaaaaaaaggtcgactctagaggatcccccgtggtggatctgcgtttcctgttctggctggcaccgattgtcttctcgttgatcctgtcaccgtttgtttcggtgatttccagccgtgccaccgttggtctgcgcaccaaacgctggaaactgttcctgatcccggaagagtattcgccgccgcaggtgctggttgataccgatcggttccttgagatgaatcgtcaacgctcccttgatgatggctttatgcacgcagtgtttaacccgtcatttaacgctctggcaaccgcaatggcgaccgcgcgtcaccgcgccagtaaggtgctggaaatcgcccgtgaccgccacgttgaacaggcgctgaacgagacgccagagaagctgaatcgcgatcgtcgcctggtgctgctaagcgatccggtgacgatggcccgtctgcatttccgtgtctggaattccccggagagatattcttcatggttgcctgatgcgctacgcttatcaggcctacatcgttcctgcaatttattgattttgcaagactttgtgggtcggataaggcgttcacgccgcatccggcaaaaacaacgagccaataaaaataccggcgttatgccgtcactaagagtaaaagccaaagtccttaaaaagaacagcctgggtgtggtgctgatcaaagtgccgaaaacactggcattgctggaacagcaactgcgtgcgctgcgcaaagtggtcacgtcggatacacgtattattgccggtgccaaggcccgtgacattcacacttccacgctggaactgttcgaaaaagtgctcggcccaaccaccaccacgctggcatggaaaaaagcgcgcctgattaattgcactttcaatgaaccgcagctggccgatgcgccgcagaccgttagctggaagctggaaggtactgactggactatccacaaccatgcgaaggtcttcttcccgtaccgggcttgagatcggcgcgcgcttctttatgcaacatctgccagagaatctcgaaggggagattgtcgatctcggttgcggtaatggcgttattggtctgacgctgcttgataaaaacccgcaagcgaaagtggtgtttgtcgatgaatcgccgatggcgggtgcttccagccgtttgaacgttgaaaccaacatgccagaggcgttggatcgctgcgagtttatgatcaacaacgcgctctccggcgtggagcctttccgctttaatgctgtgctctgcaacccgccgtttcaccaacaacatgcgctgaccgataacgtcgcctgggagatgttccaccacgcccgccgctgcctgaaaatcaacggcgagctgtatatcgttgccaaccgtcacctggattacttccataaactgaagaagattccgcagggaccctatggacgctatacttggggntaccgtgaacttggcatcgaaatatttgttcgacgaggtaagcgactgctgggcatgactgaaccgggcaaagcattactggtcattgcagaacgtattctgaatgaagccagtaatgttcgtcggcttgcagacctgtttaccaacgatacgtctggcgttctcactattgcaacgacgcatactcaggcacgttatagcttgccagaggtcattaaagcttttcgcgaacttttcccggaggttcggctcgagctaatccaggggacgccacaggaaattgcgacattgttgcaaaatggcgaagctgatattggtatcgccagcgagcgtttgagtaatgacccgcagctcgtcgccttcccgtggtttcgttggcaccatagtttgcttgttccacacgatcatcccttgacgcaaatttcaccattgacgctggagtcaatagcgaagtggctcaaaatcacttaccgacaggggattaagcaagttttaggattgtggtatgtcaaatcattttcacaaaataacctttga

SEQ ID NO: 132034 - DNA, 351 bp, Homo sapiens
atgtcgattgacgtggtcgatcgcgagttgtgtttgggattctggaaagggaacatggtagtctaccgagttcgtggagttgctgtggacagaggaaagaggctttccaacaagggtgtctcacttactcagccggcagctctcaaccccttatgggagagtaagcgcgcagatccgaatacctccgtgctgctgcttgaagcgggcggcccggactatcgctttgacttccgcacccagatgcccgctgccctggcattcccgctacagggtaaacgctacaactgggcctatgaaacggaacctgaaccgtttatgaataaccgccgcatggagtgggggacgcggtaa

SEQ ID NO: 132035 - DNA, 894 bp, Homo sapiens
atgacccagcattttgacattcgcaccgtccaacgtaccgatagtcagcgcaccgttaagcgcaaactttatgttactggtgccggaagcttccgtccctgccaaaaaaatctgttaaaacagatctgccgccggaatgatcaactgcgccaggctaacgctgtagttcgggatgaacacgactttcagcttattgccaatctggggatcggtggtgaacactttcgctacgtgattgaacaaaagaataatgtgcttcgccatgtaataggcccaaaccgcctttcccgcaaaaatatttacgcgcggggggcgagaaaaccaatgtgcccccccaaaaaaaaaagcacccgcccgtatcacgataccaacttatttgcctataccgacaacgtattgcgttttgcgctgctggggtgggttggggcagaaatggccagcgggcttgacccattctggcgtcctgatgtggtgcatgcgcacgactggcatgcaggccttgcgcctgcgtatctggcggcgcgcgggcgtccggcgaagtcggtgtttactgtgcacaacctggcctatcaaggcatgttttatgcacatcacatgaatgacatccaattgccatggtcattctttaatattcatgggctggaattcaacggacaaatctcttttctgaaggccggtctgtactatgccgatcacattacggcggtcagtccaacctacgctcgcgagatcaccgaaccgcagtttgcctacggtatggaaggtctgttgcaacagcgtcaccgtgaaaggcgtcttttcggcgtactgaacggcgtggacgagaaaatctggagtccagagacggacttactgttggcctcgcgttacacccccgatacgttggaagaataa

SEQ ID NO: 132036 - DNA, 679 bp, Homo sapiens
ctcggtacccgtggcgcatacaacacctatgaccacctgatcattcgcggctttgcggcagaacgccaaagccagaataactatctgaatggcctgaagttgcagggcaacttctataacgatgcggtcattgacccgtatatgctggaacgcgctgaaattatgcgtggcccggtttccgtgctttacggtaaaagcaatcctggcggcctgttgaatatggtcagcaagcgtccgaccaccgaaccgctgaaagaagttcagtttaaagccggtactgacagcctgttccagactggttttgactttagcgattcgttggatgatgacggtgtttactcttatcgcctgaccggtcttgcgcgttctgccaatgcccagcagaaagggtcagaagagcagcgttatgctattgcaccggcgttcacctggcgtccggatgataaaaccaattttaccttcctttcttacttccagaacgagccggataccggttattacggctggttgccgaaagagggaaccgttgagccgctgccgaacggtaagcgtttgccgacagactttaatgatagggcgaagaacaacgcctattctcgtaatgagaagatgaacgaaccggaaaccgggtattacggctggttgccgaaagacggaaccgttgaaccgctgccgaacg

SEQ ID NO: 132037 - DNA, 2505 bp, Homo sapiens
atgaggccattagagaggtctctaatccaatcctcacaggaggaaatttggacacacagagaagctgtccctcctgttcagctactgacggggtggtgcgtaacggcaaaagcaccgccggacatcagcgctatctctgctctcactgccgtaaaacatggcaactgcagttcacttacaccgcttctcaacccgccgggcagtgacgtcatcgtctgcgcggaaatggacgaacagtggggctatgtcggggctaaatcgcgccagcgctggctgttttacgcgtatgacagtctccggaagacggttgttgcgcacgtattcggtgaacgcactatggcgacgctggggcgtcttatgagcctgctgtcaccctttgacgtggtgatatggatgacggatggctggccgctgtatgaatcccgcctgaagggaaagctgcacgcaattttggttacatttgaggaaaaatttcaagaagaacctgtgaagaaacaaatcatcatggttagcatttcggtttctgacacgggagggaaaaaagagaagccaaagttgatcaacctttcgtccaagacaaatggcttacagaacaccactgaagcccagctgtgtgaaacaaaatctgattttgagctctccttttccgggttcaatcctatatccatagacactgaagacatgaaaactggctgctgctttcaagaacagtcagttagaagggcatatttcaaagctacttcaagccccaggagagggctgattatcactaaactgacaacaagagtggatggttatgtggcagatgatccttcccgcagatattcaggacacggagacttgctctggcccaatgcaggaaacagctgtgtggaaacaactgtgggttcccttctgtgtgaagttcaagctgctcccaccccacacacactggagggtaaacatggctgtcgaaataaggaaaagaaaagattaacccattcaggggcatgcacctacaccttctcagagttgggcttggaactgtgggcttggaactgtgggaaaactgaagtgaatctgggtgcagtaggaaaaggagttggtggagatagaggcttcaagaaaatacatgccaaaagccagttcacttgctcagttctttacacttttacaataaaacagggtatttctctgactttgtggtctaaagtcatgcatattttggagcacctaaaagaaaacagcaaacagcttacttctatttgtaccaggtatcagagagtatttggtcccacctggttgcatgaaacaatcttttgcaaagtggcccttacagccacacttcttgcagaacttgaaaagacatccacactgcagacgtttctggataagatatggatccttggggcccagcaacatacagggtcacaagaaccctcccaagctctgctgacttgtgaccctgcctggaaaaaagcactgaggaaggtcacacagaaaggtggagcattctttggagtcgataacttgggttctagtctcagtcctactactgatttattgtatgaagagcagagacttacttccctctctggatcttggttccccatctgtgtaatggtggagttgactctaagggcaggatcgtctccggggggcaggctctatgtagagttcgaccaagctgtcaccaaagaacctcgttttttgcaatacaaacattactgggatggggcagtagctggatccagcatcttacggcaagattcatttgtcgcggaggcttctactaccattacgcgtatcgagtctcctagcgttccatctcgttcaagtacctttcttgatgatttctccatcacacagcagcaccgccgccacgccggcttgtctgtcatgctgtccctgataatcagcccgcctgttcgcgggctgtgtcaggagcgcacgctgcggcgtgattttcgtgaacgactgatgtatctggacctggagtatcagtccggatactgccgcttacgcactgctggcagtgagatgcagatggtgcccgacgtgcttatctttgcccaccgcagcgggctggccgggctttttcccggccttgaccgccgtctggtgaatgcactgctgatgtgcgatgagtctccctgcgtgatagcaccagccaatccggttccttcgccttcaggagcattgtctttctggagactgattcaggccattaccgggcgcaggcgggtgacgctgattgcagaggggcgacgctgtgagcgcctagctccctgccggttactcatccaccagcagacctggtatctggtggctgaacacgaagggcatatcgccgtattcacacttgatgaaatccatctgattcagcctttgcaggagacttttcgccgcaatgacagtctgtgtcgcctggttgaagacccggtcttcattcaggccttaccccattttcgctttatccagcattcactgcttacgtttgttccggccgacagcccaccggaatag

SEQ ID NO: 132038 - DNA, 1242 bp, Homo sapiens
tcactctgaggaagccagtccacaattttcacatttgcagccaggtggacatctttgggccaatgagaacactgacacttccatatcaccccttggggtaggtgagcaaaggcattgttcatctccttgaagatttccggattctgacaggtgttcaccatggagcccaaggtcacaaggacaaaaccagagtccccaaacttggcaatgaagttctccaagtcgatactgggtacgaccatctgcaccaacaaaggccgtcaggtagtagagattcaccggaatcgactgccgaatattgacgtaacgtgtatcaccctgcttcagcgcatcagaaatacgtttgtcattccagcctgcatcctgatcctgactggctaccacaccggctttgctggtatcgacctgaggtccattaagcaaactctggttttcacgttttggacgcgactcctgttccgggatgttttccaacagcaccatcagcaactggcgttcgatctcctgaatgacatccatcatccgcttaatgacctgcggagatcctgaaaatccggccactggtgggctcaaggtttgggagcacctgatgatgctggtggccagggctgcagacttgtacctgtttgcagaaacagaagggtggaagcagcattcaatgacagctatcagcagcttaggcttgacacaaaaggaaccaatttttaacatttgtgccggttgtggccggccttccaaccttggtcccccggccttttttcccaaaggttccgggtgcacaaaacaccttggttccggttggcgccaaggctttggcaattttaaatttggacctttctggggcccaaactggccccaggggcagttttttcccccccccttgtgaaaggcgtcccccttccgctgtggggcggtcttccctgggtttcccgaaaccccgttgcggcgttttcccggggataaccttgttgcggccgttttcttcccattcttttttaaaaccttgggggaagcggaaaggttaggttctccgggggaaaccaaaggataagagggggtttggcccatggccaagccaaccccaaatgccccattggaaggccttggaaaggccagggggcaaggcatcgcctcacccaggaagcgcaaggggtcaggggaattccctttctcattgccagcacagcagtctgagaccaaactgcaaagcagcagcgaggctgggggagggatgcccaccat

SEQ ID NO: 132039 - DNA, 1728 bp, Homo sapiens; identical to SEQ ID NO: 132010

SEQ ID NO: 132040 - DNA, 520 bp, Homo sapiens
atgagcatcaagcgcctgatggatcttggttgctatcgcgtttgcgtcatcgtcgtggtctcccggttcgcggtcagcgtaccaagaccacgcacgtacccgccgcgaatctactatcgtgctctgaacgccgcaggtttccgcatcactaacattactgatgtgctccgatccctcataacggttgtcgtccgccgaaaaaacgtcgcgtataacgcctcgttttccaggtttgttggagaagagaaaatggcaagatatttgggtcctaagctcaagctgagccgtcgtgagggcaccgacttattccttaagtctggcgttcgcgcgatcgataccaagtgtaaaattgaacaagctcctggcagcacgctggaatgagggcctggttcccacacgtcattcacagtctgggcggctactgaactacatcccacgagaccacacactaagcatcacgcacaagggacagtgcagcactctgagcaatccatggagattcccatccacaaatacctga

SEQ ID NO: 132041 - DNA, 682 bp, Homo sapiens
cctggcgcacaaactggcgctgtaactggttttgcagacgaatgcccagcacggaaggcggcagcgttggcaaaagcatcagtgaacaaggtagtttttcattcaaccaacgccacagtttgtcatcggccagaccgaagcaggcgggcatcaggatcatttcgcaggtattggcgacaggaataagcgcatcaagtaacagcggccagttttgccagaagaaagagagctgcttttcgatcagcttttcgaagatgtcatatttttgctgatcgtagcgagccacgttgaccggctgaccaaagaacatcggttctttgagctgatcatttttcgtctgtgaaaaggtggtatatgccatgagtgtgtcctgttgggagtttaatgccggataaggcattttacgccgcatcctgtgcctgatgcgacgctggcgcgtcttatcaggcctacaaatccgagccgtaggccggataaggcgttcacgctgcatccggcacccggagcctgatgcgacgctggcgcgtcttatcaggcatgcgccgctttcgcagccatcgtcctggattgacggcaccagatcgtcttgtgcgtcttcagcgccgtcacgggtgttctgataatacagtgttttgaccccgaatttgtaggcggtgagcaggtctttcagcaactgctgcat

SEQ ID NO: 132042 - DNA, 1157 bp, Homo sapiens
cagttcagattacagactacatccacttctacggttatcgcccggttaaatctttcgctattcgcattcctgccagttacaccattcacggaatagatgtttcgcgctggcaggagcggatcgactggcagcgggtggcaataatgcgcgacaatggtatccgcttacagtttgcttttattaaggcgacggaaggcgaaaagctggtggacccctatttttcgcgtaactggcaactaagccgcgaaaatggcctgctgcgtggggcgtatcattatttctccccgtcggtatccgcttcagttcatgcgagattatttctgcaaacggtggatttctcacaaaggcgatttcttgccgtgctggacgtagaagaacgggggagaattatcggcaaaagaatttacgcaagctggcagcaatacaatcgtggcgacagcgccatcctgcgcggcttacttgatgccatcaacattctcaatccacacgccgaagtggatgtgatgagccgctatccggtcagttcttcctggctgctcaaccgcccggtaatgggcgatccgctgttcctgcaaatgaaacaacacaacagcgcggcgggcgttgtcgggcgcgttaaaaaagtcctccgtcgccgctaccagcatcaggtattgctctcacgcgtcaccgacactggcaagctgcgcaatatcgccatcgcccagggattcaccgacttcgtgcgcctgctgtcaggttacgacgccattatccaggtcggcggatcgttttttgtcgatctctatggcgtgccgcagtttgaacatgcactttgcacgtttatggcgaaaaagccgctgtttatgattggtcacagtgttggcccgttccaggatgagcaatttaaccaactggcgaactacgtttttggtcactgcgacgcgctgatcctgcgcgaatcggtcagctttgatctgatgaaacgcagcaatatcaccaccgcaaaagtggaacatggcgtcgataccgcgtggctggctttggcaaaccacgccacgggcgcaaagctggataaacgcatcaccgccagcatcgtgccccacaaaataccaatcactaccgccgtgacggtgattttcagggtgatcaccagcccgtcgagcagatatggcagg

SEQ ID NO: 132043 - DNA, 696 bp, Homo sapiens
ggttatgttccggtttgtaggcctgataagacgcacagcgtcgcactcaggcaacggctgtcggatgcggcgtaaacgccttatccgacctacggttatgttccgcttgtaggcctgataagacgcacagcgtcgcgtcaggcaacggttgccggatgcggcgtaaaacgccttatccgacctacggttctgtgctcgggacttgatgccatcaacattctcaatccacacgccgaagtggatgtgatgagccgctatccggtcagttcttcctggctgctcaaccgcccggtaatgggcgatccgctgttccagaatggtgtgtttgccgtagcgagtgaaaaagccgtccatactgtcaagcacggttttgccggttaatttttccaccacttcgcggcccatcactctggcgataaaaaagcaaagcgccgcgccggccatcgaactggtccacgacagcaagccgccccagaacgcgccaaacagcgacgcattggcaaaggtgatcaaaaacgcaggtagcggtgcagcaatggcctgcaaaatcatcaacaagaacgagacaactgccgccagtgcgccgtaagactgaataaagcgttctataccctgttggtccacgcgggcaaacgccgcaacgctgcgattgataaactcatggacgccgggaagcagcgcccatgccagcagcat

SEQ ID NO: 132044 - DNA, 3824 bp, Homo sapiens
tcacagcgcgttaacgctcatcaggcagagatacagtttttcattcagctcgcgcaggctaacggtcacagttttaccgttaacggtgtgggtaccttcgcccagcagatgccagtagctggtcatttcgatcagctcatcgtaatagctggagatcccttccgcacgtttctggatctgctcgttggtgacgatatcgtcaaacacaacagacggttcgttaacgatattacgaatgatatgagtataggaacgggaatgaatcgtttctgagaacgcccaggtttcgacccaggtttccagttccggaatagaaataagcggcaatagcgccacgttcgggctacgaccctgaatggaatccagcagcgtctgatatttcaggttgctgataaagatgtgtttttcgtgctccggcagcgcctggtaatctatacggtcgcgggagacgtcaacttcttccggacgccagaagaaagagagctgcttttcgatcagcttttcgaagatgtcatatttttgctgatcgtagcgagccacgttgaccggctgaccaaagaacatcggttctttgagctgatcatttttcgtctgtgaaaaggtggtatatgccatgagtgtgtcctgttgggagtttaatgccggataaggcattttacgccgcatcctgtgcctgatgcgacgctggcgcgtcttatcaggcctacaaatccgagccgtagccaggataaggcgttcacgctgcatccggcacccggagcctgatgcgacgctggcgcgtcttatcaggcatgcgccgctttcgcagccatcgtcctggattgacggcaccagatcgtcttgtgcgtcttcagcgccgtcacgggtgttctgataatacagtgttttgaccccgaatttgtaagcggtgagcaggtctttcagcaactgctgaatcggcacttttcctgacgggaagcgtgacggatcatactgggtgtttgcaaaaatcgactgatcgataaatttctgcatgaaactcaccagttgcaggtaaccacggttaccgtaatttcccaaagtactcataaggttcttgcaagtgctcgaaatctgacaaaactggcggaaaataacggttttgaaccttgaatcatcaagttctgcctgtctgcgaagcagcgcccatacccgacgataaccatacgttggcagctctccgataacatggtgtatacggagaagcacatccgtatcatcagtgtgacgactgcggcggccatccatccagtcatcggttcgtctgagaatgacgtgcaatccccatccccgggcaataagggcgcgtgcgctatccacttttttgcccgtccatattcaacggcttctttgaggagttcattttccatcgttttcttgccgagcaggcgctggagttctttaatctgcttcatggcggcagcaagttcagaggcaggaacaacctgttctccggcggcgacagcagtaagacttccttcctggtattgcttacgccagagaaataactggctggctgctacaccatgttgccgggcaacgagggagaccgtcatccccggttcaaagctctgctgaacaattgcgatcttttccttgatgccatcaacattctcaatccacacgccgaagtggatgtgatgagccgctatccggtcagttcttcctggctgctcaaccgcccggtaatgggcgatccgctgttcgacgccattatccaggtcggcggatcgttttttgtcgatctctatggcgtgccgcagtttgaacatgcactttgcacgtttatggcgaaaaagccgctgtttatgattggtcacagtgttggcccgttccaggatgagcaatttaaccaactggcgaactacgtttttggtcactgcgacgcgctgatcctgcgcgaatcggtcctctttgaacgcctgagacatgcagtaccgccagcattgcccccccacccccaacatggcacatgtatacatatgtaacaaacctgcatgttgtgctttgaatttgatcaggatggagttagcgatacctttttcgataccttctttcaggatcttggtgttggttacgaacaggtcgtcaccaaccagctggattttgtcgcccagaactttggtctggtatgcgaaaccgtcccagtcagattcgtccagaccgtcttcgatagaaacgatcgggtactgtttggtcagttcttccaggaagtgagtgaattcttcagaggtgaacgctttgttgccttcgccagccagaacgtatttaccatctttgtagaattcagaagctgcgcagtccatcgccaaagtgatgtctttgcccagttcataaccagcagctttaacagcttcagcgataacagccagagcttcagcgttggaacccaggttcggcgcatagccaccttcgtcaccaacagcagtgttcatgcctttcgctttcagaacttttgccaggtgatggaaaacttcagaacccatgcggatggcttctttcacagttttcgcgccaaccggctgaatcatgaattcctggatatcaacgttgttgtcagcgttctcaccaccgttcatgatgttgatcatcggaacagagttgagaggcaagggattgagctgattcaggggtacgatgccagccagctcgagccgcagccggatctggtgattattggcaacgccatgacccgtggaaatccgtgtgtggaagcggtactggagaaaaatatccttttttttatcgaatcggatgagtatgactgcgcctttttcgacaaacgctctaaatttgttcattactgcccgcgtacgctgatcctcaacaaccttgagttcgatcacgccgatatctttgacgacctgaaagcgatccagaaacagttccaccatctggtgcgtatcgttccggggcagggccgtattatctggccggaaaatgacatcaacctgaaacagaccatggcgatgggctgctggagcgagcaggagctggtgggtgagcagggtcactggcaggcgaaaaagctgaccaccgatgcttccgaatgggaagttttgctggatggcgaaaaagtgggcgaagtgaaatggtcgctggtaggcgaacataatatgcacaatggcctgatggcgattgcagcggctcgccatgttggtgtagcgccggcagatgccgctaacgcgctgggttcgtttattaatgctcgtcgccgtctggagttgcgtggtgaagcgaatggcgtcacggtatatgacgattttgcccatcacccgacggcgattctggcaacgctggcggctctgcgtggcaaggccggtggtacggcgcttttggaaattgagagcaatgtgtgtatcacgggctgtaactactactccggtggtaatattcagttcacccgtgcctaattggatttgcccatatatttccagacatctgttatcacttaacccattacaagcccgctgccgcagatattcccgtggcgagcgataacccagcgcactatgcggatgccattcgttataatgctcgaacgcctctgcaaggttctttgctgccgttaacccgtctggtttgggcatgatactgatgtagtcacgctttatcgttttaacgaagctctctgctattccgttactctccgggctccgcaccgccgtgttcttcggctcgagtcccaacatccgggcgaactggcgtgtttcattagcccggtagcatgaaccattatccgtcagccactccactgggcacgacggaagatcggtgccgaagcggcattccaccgctcccagcat

SEQ ID NO: 132045 - DNA, 1312 bp, Homo sapiens
atgcggaacacctgcaccgcacgacgcctcgcccgaccaccggctgcaacagcacaacagaagagattccccaaaccgatgtccgcagcggaagatcccgccggcggcaccagcccacgggccacaccgcacacagcatcagaaacggaggagccacacacaaccgccagattctacgaagagcagcccccatatccagtagacatgaaattatacacccccttatcctccctcatcaccatccatcagtccggtcacaatctccctacatccatccatgctccctccaatcgaaagggcattgatcctcgtgaaaattgccatccgttccgctgattttaacgcaattgatgaacctggcgtttattggtccgttgaaacatgccgggctgtcactttctattggtctggcggcgtgtctgaatgcttcgctgctttactggcagttgcatcgttaagcacagcggacatctggtcgaggatctctgcaagacgtgtcatacgatcagttactctgcaagtcttgctgcgcttcgttgatcagcgcatcggcaattttgccggggtccatttttagttcaccgttacgaatcgccagtttaaggaccgagcagggaaattaagtaaatgtgaatttttctccgtgcgatctgaaaacgagtcatacctcaaaacttcttttgcaaaaagcggcaacgaacaatacttacgcagcctcacctggcatcaaatttatgaggaaaaaatgaaattacttattctgggcaaccacacttgcggcaatcgtggcgacagcgccatcctgcgcggcttacttgatgccatcaacattctcaatccacacgccgaagtggatgtgatgagccgctatccggtcagttcttcctggctgctcaaccgcccgcatcaggtattgctctcacgcgtcaccgacactggcaagctgcgcaatatcgccatcgcccagggattcaccgacttcgtgcgcctgctgtcaggttacgacgccaatatcgcagggtcgattcgacaattcaaaggactcccggggtgccggatgcagcgtgaacgcctaatccggcctacggctcaggatttaccggtcaacgtggctcgctacgatcagcaaaatatgaatcttcgaaaagctgatcgaaaagcagctcttctttcttctggcgtccggaagaagttgacgtcttcccgcgaccgtatagattaccaggcgctgccggagcacgaaaaacacatctttatcagcaacctgaaatatcagacgctgctggattccattcagggtcgtagcccgaac

SEQ ID NO: 132046 - DNA, 1761 bp, Homo sapiens
atgtcggtgcacagattcgccaggcacaatgaaacactggaagaggtgctccgctcctctggcgatcccgccgatcagaaatatgttgagctgaaagcgcgtgcagaaaaagcgctggatgatgtgaaaaaacggaagctgtattgctggagacggcggcagatctgcgctttgcgccggataagtcgctcgccatatcccgggcaccaactcgagtgcatcgctagcttcgtgaggtggttcaacctcgttgttgaaagagtttcatccagttcattgactttagcttcgcgtagtaaatcagagacaaaaacagagtctttcttcgagagtcttggcggcggttatttactactgcaaatgatcaaccgcatcgccctgcccgccggattatatccattgctggcattaagtggcggtattctgattttctcattaactactgcgctggaagggcggtattctaaagagaaactggatcggtggttgaaagatggcatcaccacgccgggtggaaaactcccttcagaaagagagctgggagaactgctgggcattaaacgtatgacgctgcgccaggcgttgttgaacctcgaggcagaatccaaaatcttccgtaaggatcgccccttccgcaacttcatatcaacgatatcggccagaccttccacgaacggctgcaccccgacgcctgccgtttccaatgccatcctggttcacaataaaaaaggtggcccgctggcagacggtatcgtgattacaccgtcccataacccgccggaagatggtggaatcaaatacaatccgccaaatggtggcccggctgataccaacgtcactaaagtggtggaagacagggccaacgcactgctggccgatggcctgaaaggcgtgaagcgtatctccctcgacgaagcgatggcatccggtcatttgtgcaggtcactctttctatatcttcgagcagggctgtccggacatcaggcacagcagctgcacttctctgatgcccctttgcagatgcagccctgggcacacttggcacagctcatggggcagcaggagcagcagcctggggaagaagggagacgtaatccaatggatacccacgccaaagccattgacggctatacgccgcgcgattacttaacccactggttaagtcagtgggtccgcgactatgggattgatggttttcgggtcgataccgccaaacatgttgagttgcccgcctggcagcaactgaaaaccgaagccagcgccgcgcttcgcgaatggaaaaaagctaaccccgacaaagcattagatgacaaacctttctggatgaccggtgaagcctggggccacggcgtgatgcaaagtgactactatcgccacggcttcgatgcgatgatcaatttcgattatcaggagcaggcggcgaaagcagtcgactgtctggcgcagatggatacgacctggcagcaaatggcggagaaattgcagggtttcaacgtgttgagctacctctcgtcgcatgatacccgcctgttccgtgaagggggcgacaaagcagcagagttattactattagcgccaggcgcggtacaaatcttttatggtgatgaatcctcgcgtccgttcggtcctacaggttctgatccgctgcaaggtacacgttcggatatgaactggcaggatgttagcggtaaatctgccgccagcgtcgcgcactggcagaaaatcagccagttccgcgcccgctgtttccccagcccctga

SEQ ID NO: 132047 - DNA, 2511 bp, Homo sapiens
  misc_feature (1)...(2511): n = a,t,c or g
atggtgaaaccccggacaccaaataaacaaccgcccgcccacaaacaaacggggggttccaaaaacccagaggccccccccccccccccaaagaaggaccgaccccaagaaccgagcgaccgcaccaacgcaacaacccacgaacagagagaaagcgccaaaaagagggagccaacgaacccaacaaagacgcagcgcaaaaaaggaaacaaggacccagcgacccaacaccgaagacaggaaacaagaaaagaaccaccaaacgcaagcaagaaaaccgaaacggacaaccagaaaagacccacggcaaagcgcggaaacgcaagcagcggcccaccgacccaaggacaaaccgaaggcacgcacccaccaaagcgcggagaggagggcagaaacacacagggagcccggcacaaggaaaggggaacgaaagaaaccaccgcaaaacaggccagcaccaaagaaccaaaggacagaaaaggccccaccgggcaggagaccgaggaacggccaggaaggcgcaagaaggagagagcagccagacggggacgcgccaaaagccaagcaagcacgcacgcccgacaaggacggaagccaccaacaggacaacgcaaccagacgcgcaagcccacaaacaacacgagacgaagcgacccaaaccgccgacgcacacaaacgaacacgcacacggaaaaacgcacggacacagaaccgaaacaagacaagcacgcgccaacgcaaagcgaagaccgcaggacaacacgcacccgcaccccgcccaaccggacggagcgcaacaacggagcgcacaccaccaacacggcaacggcaagaagacgcagacccagacagcgcaacagaagcggggacgccaagcagaagagacaaaaaacagcccagaagcccaaaggtgaagacaaacggcaggcaacaaaggcagcaaacgaaccccgggccccgcaaaaggcgcgggaagacaaggcaaggaaccaccagaccgcgaccaaaggaaaacaagcaaaggacgtcagcccaggagaaaaccgcaggaaccgaaggccagaaagaaggcagggaacggaacggaggcgacgcaacgaacggaagagaagcaaacgccaaggaaagcgaacggaaggcgagcctaacgacagcgaagcggaagcaacggaacgggaaacaaagagcaccccaaggccagcgaaggcaaggctagcggaaagccagagaaaagcgcaagcaaagcgaactgattggtttaacgtcgcccaactgacggcgcaatattatgtactgaaaccagaagcagggaatgcggagcacgcggtgaaattcggtacttccggtcaccgtggcagtgcagcgcgccacagctttaacgagccgcacattctggcgatcgctcaggcaattgctgaagaacgtgcgaaaaacggcatcactggcccttgctatgtgggtaaagatactcacgccctgtccgaacctgcattcatttccgttctggaagtgctggcagcgaacggcgttgatgtcattgtgcaggaaaacaatggcttcaccccgacgcctgccgtttccaatgccatcctggttcacaataaaaaaggtggcccgctggcagacggtatcgtgattacaccgtcccataacccgccggaagatggtggaatcaaatacaatccggcaaatggtggcccggctgataccaacgtcactaaaatggtggaagacagggccaacgcactgctggccgatggcctgaaaggcgtgaagcgtatctcccttcacgaaacgatggcatccggtcatgtgaaagagcaagatctggggccgccgcggagacgaacggaagccgaacctcgagccaagccacagtcatatgcaaacgcaagcgaaagcaaaggaaagcgaagcaaccccgaacggcaagaacagcgtaccggaagcacagccaaagccaaccgtaaggaacaactcacggaaaacctacggcaacgcagaaggcaaccaaagggaagagtaatgcgcaccggcaaggtaaagctacgccaaacgcatcgacaaggcaaagcaagagaaaactccgcgcaacggcagacgacagccaaggcgcaagccacccgcaaacggacgctcaaacgacaacgcaaacgcaatccgacaggaacccatcgccgaacagacaacgaaagcagaacgcaaagccaacaaaaacacaacagtaacgcgaaggcaaaaagaaaacatcccacaaccacaacgaaaaccgtgccccaaacgcgaatccaacacccaaagccaagggcacaccgcgaacggcgaacgacaagcgaaaaggcgaaggcaaaagcgctaaggacaacggcaacggctaaagacaaaatcgcaacagctaaacgagcacaccaccaccctaaacgacaacccgaaagncgcaacgcgaaacggccaaggcgaaacggccacagcgcacccgcgctaagagaaaacctaaaaggcaaagagtaa

SEQ ID NO: 132048 - DNA, 537 bp, Homo sapiens
agtcaagaggaactgctccaacaagcactcgtcgcgcaactggcgatagtgaacagcttgaaggtgtgcaactgccggagccggatgaaccttcagcacgtcacgccttacccgccaacgaaccgcgcattgtgctgaacaatggcgtggtttcttataacgatcgccccattcttaataaccttagctggcagcatatcggttacgtcagcagtagtttgcatctggattaccgggtcagcactaccgtgcgtaatgtgattctttctggctattttgattcgattggcatttatcaggccgtttcggatcgccagcaaaaactggtgcagcagtggctggatattctcggcattgataaacgcacggctgacgctccgttccatagtctttcctggggacagcagcgtctggcgctgattgtccgcgcactggtgaaacatccgacgttgcttattctcgatgaaccactacaggggcttgatccgctgaatcgccagcttatccgccgttttgttgatgtgctgattagcgaag

SEQ ID NO: 132049 - DNA, 536 bp, Homo sapiens
catatcggttacgtcagcagtagtttgcatctggattaccgggtcagcactaccgtgcgtaatgtgattctttctggctattttgattcgattggcatttatcaggccgtttcggatcgccagcaaaaactggtgcagcagtggctggatattctcggcattgataaacgcacggctgacgctccgttccatagtctttcctggggacagcagcgtctggcgctgattgtccgcgcactggtgaaacatccgacgttgcttattctcgatgaaccactacaggggcttgatccgctgaatcgccagcttatccgccgttttgttgatgtgctgattagcgaaggctttattcccggtgactggatcaaagaaggcgcaattgtgattgatgtcggcatcaaccgtctggaaaatggcaaagttgtgggcgacgtcgtgtttgaagacgcggctaaacgcgcctcatacattacgcctgttcccggcggcgttggcccgatgacggttgccacgctgattgaaaacacgctacaggc

SEQ ID NO: 132050 - DNA, 1319 bp, Homo sapiens
atgatactgaccgatccagaatggcaggcagttttattaagcctgaaagtttcttccctggctgtgctgtttagcctgccgtttgggatcttttttgcctggttactggtgcgttgcacgtttccgggcaaagctctgctcgacagcgtactgcatctaccgctggtgttaccgcccgtggtcgtcggttacttattattagtttcgatgggacggcgcggatttatcggtgaacgtctgtatgactggtttggtattaccttcgcctttagctggcgcggcgcggttctcgctgccgccgtcatgtcgtttccgctgatggtgcgggcaattcgtctggcgctggaaggggttgatgtcaaactggaacaggccgcaagaacactgggggccgggcgctggcgcgttttctttactatcacgttaccgctgaccttaccgggaattattgttggtacggtactggcttttgctcgttctctcgaatcagggtaccgagctcaagctgagatcattcaggatgaagtaaaggatgccccgcgttgcatgcaactggcgcagcagttcggtattaccgccttcctcgaccaacgctttaaatacctttccactggcgagacgcgaaaaaccctgctgtgtcaggcgctgatgtcggagcctgacttgttgattcttgatgagccgttcgatggcctggatgttgcctcacgtcagcagctggctgagcgactcgcctcgttacatcagtccggtattactctggtactggtgctcaatcgcttcgatgagatcccggagtttgtccagtttgctggcgtgctggcggattgcacgttagcggaaactggcgctaaagaggaactgctccaacaagcactcgtcgcgcaactggcgcatagtgaacagcttgaaggtgtgcaactgccggagccggatgaaccttcagcacgtcacgccttacccgccaacgaaccgcgcattgtgctgaacaatggcgtggtttcttataacgatcgccccattcttaataaccttagctggcaggtgaatccaggcgaacactggcaaattgtcgggccaaatggtgcaggaaaatcgacgttattaagcctggttactggcgatcatccgcaaggttacagcaacgatttgacgcttttcggacgacgtcgcggcagcggcgaaaccatctgggatatcaaaaagcatatcggttacgtcagcagtagtttgcatctggattaccgggtcagcactaccgtgcgtaatgtgattctttctggctattttgattcgattggcatttatcaagccgtttc

SEQ ID NO: 132051 - DNA, 341 bp, Homo sapiens
  misc_feature (1)...(341): n = a,t,c or g
acctcccagtaggggacaacagacacctcatacaggagagctctggctggcatctggtgggtgctcctctgggatgaagattccaaaggaaggaacaggcagcaatctttgnnnnnnnnnnnnnnnnnnnnnnnnnnnnnnnnnnnnnnnnnnnnnnnnnnnnnnnnnnnnnnnnnnnnnnnnnnnnnnnnnnnnnnnnnnnnnnnnnnnnnnnnnnnnnnnnnnnnnnnnnnncaatagcatcaacatcnnnnnnnnnnnnnnnnnnnnnnnnnnnnnnnnnnnnnnnnnnnnnnnnnnnnnnnnnnnnnnnnnnnnnnnnnnnnnnnnnnaagaaactg

SEQ ID NO: 132052 - DNA, 182 bp, Homo sapiens
ccctttttgcctgggtattaccagcagaggctgcagaacagcaaatattgctgcctgatccttcctctggaagcttcgtcccagaggggcacccaccgatgtgaggtgtctgttggcccctactgagaagtgtctcctagtcaggaggcatggcggtcagggacccatttgatgaggtagtc

SEQ ID NO: 132053 - DNA, 745 bp, Homo sapiens
atggcaactgcctcaggggaggccatcactgttgcctcaggagtgcatggttgttctcctcagagaaagcatcagctaatcgggcaaaaggtgaacactgattcaagggtggggtcaactaacacctcatacaggagagctctggctggcatctggtgggtgccctctggacgaagcttccagaggaaggagcaggctgcaatctttgctgttctgcagcctctgctggtgatactcaggcaaacagggtctggagtggctccccagcaaactccagcagacctgcagcgggaaaatgaacaaatgaaaaggaatagcatcaacatcaacaaaaaggacatccacacaaaaaccccagaaaccccatgcgaaggtcacaaacatcaaagaccaaaggattacaactccttgccagcaagggaacaaaactggacagagaatgagtttgatgaattgacagaagtaggcttcagaaagagggtaataacaaactcctccgagctaaaggagcatgttctaacccaatgcaagaaagctaagaaccttgaaaaaaggttagaggaattgctaagtagaataactagtttagagaagaacataaaagacctgatggagctgaaaaatgcagcacgagaactttgtgaaccatacacaagtatcagtagccaaatcaatcaagtggaagaaaggatatcagagattgaagatcgacttaatgaaataaagcaagaagacaaaattagag

SEQ ID NO: 132054 - DNA, 663 bp, Homo sapiens
ggggaagcaaacacattcttcttcacatggcggcagcaaggagaagtgcgcagtgcagcaaagctatggccagactgcttctctagattcctcctcactgggcagggcatctctcgtacaggaaagctctggctggcatctagtgggtgcccctctgggatgaagcttccagaggaaggaacaggcagcaatctttgctgttctgcagcctctgctggtgatacccaggcaaacagggtctggagtggaactccaacaaactccagcagacctgaagtgtcatctggggccatggacggagaggggtgggggctaccagtggacccactgactcctggacatcaggatgctctgccatggcaaaggtgttatcatccatgttcttcgtcttcagttcctcctcggcaggcctgcgcctcaccggcttcatgcagctcttcagctgcctggcctcagcctccacgggaccctggcactcgggctgtggctccagctgcggcagctgctgctgctggggcagcccttcggcatcagtgggtgtgggagcgggtgcgatccggagcaggactgtgtagttgcggccgtggttgttggcccagaaagtgccctcaggggtctcatagcgcaccacgaagtcgaggcgcgccccatcgcccgcgccct

SEQ ID NO: 132055 - DNA, 297 bp, Homo sapiens
ggttggggaaaacggccactatacactggaaggtgaagagttcaccgtcaatggtatggtcggccagcgtctggaaaaagatggcgttgcgctgactatcgcggacattaaggccaaaccaggaacacagtttgtcctgagccagcgtacccgaactgaagtgcgcagcgagctggaccaagcggaagaaaaactcaacgtttatcgccagcagcgcgattcggttgaccttaacctggaagccaaagccgttcttgagcagattgtgaacgttgataatcaactcaatgagctgac

SEQ ID NO: 132056 - DNA, 453 bp, Homo sapiens
tcagtaagtacctgcaaactcgctgtcagcgattgcacttttccggcgtgaaagcgtgacgccgctggctgcgcttgcagcttctccagtctgtgcgggccgatttgtgctgctcaaaaaccatcgccgagatttgccgtagatttcagtgccggttaactcctcgagcaattccgcgcgttctttggtttggcattcaggaaggcagcaaattgccccggactggagcagcaaagacgactttatgcgtctgggtaaaccgaatcgtttttcggtgttactgctggcaacatggattcgatgatcaaccgttatccgccgatcgccgtttacgtcatgacgatgccgcgcattatgattactggtccgataccgtgcgccgttccggctggtggattcgaaagccgacatgctgatggcaggtaacggtgaggtcctgtacaagtggcgcat

SEQ ID NO: 132057 - DNA, 1344 bp, Homo sapiens
atggtccataggttcggtatccgggtacggttcgtagcgctagggttttaccaggatgtcatcttaccggttcgcgcacatcggcacgagtggggccattatgtgcacttgtgcgcaagcatccagcgccagatcgatgtctcgtttgcccgagacgccacttcgcacagcagctgcccggtcaccggcgtcagattctggggctacccattcgccgccaataaagtcgtcatagcgggctttgaacttgagggggaaaccatgactcgcccgggcttaatctgtgctgaagggggattattggtcatgatcgtctccttgcggtctgagctttacgacagctatcacgaatttacgaggcaacgggttacagagatagttgaaaaagcggctaaccatttgccagccgttgtggaaatgatgactctacatcgctgcgcgataaatcgccacaatttcgttcgtcgcgtaggacctgccgggatatccactttcttcgccagttcaccggatggcgttaatgcaggcttcagcaccttccgcgtcgtttttacctgtcaacgttcacgcccattgcagcggcacagtcacgcagacgtgcagacggcgactttgctgttgaataccgtgaaccttgagcaaaaacaggccaacgccattctcagcggcctgagcgatatgatccctaactcatcgcccgagtctgcaccggagatccaactgctgcaatcgcgcatgattctcggtaaaaccattgctgaactgaatctgcgcgacatagttgagcagaagtattttccgattgtgggtcgcggctgggcgagattaaccaaagaaaaaccaggtgagctggcgatcagctggatgcatattccacaactgaatggtcaggatcagcaactgacactcacggttggggaaaacggccactatacactggaaggtgaagagttcaccgtcaatggtatggtcggccagcgtctggaaaaagatggcgttgcgctgactatcgcggacattaaggccaaaccaggaacacagtttgtcctgagccagcgtaccgaactggaagcgattaacgcattgcaggaaacctttaccgttagcgaacgcagtaaagaaagcgggatgctggaacttaccatgactggtgatgatccccagttgattactcgtattctgaacagcatcgctaacaactatttgcaacagaatatcgctcgccaggcggcgcaggattcacaaagccttgaattcttacagcgccagttacctgaagtgcgcagcgagctggaccagcggaagaaaaactcaacgtttatcgccagcagcgcgattcggtga

SEQ ID NO: 132058 - DNA, 1578 bp, Homo sapiens
ttagaatccctttaggcctgataagacgcggtccttaaaaggaatcccccattttttcccactccgcttaccatccacaccaaaataacgatcatcacgacataatttttctttaacatcgcaaaatacaccgttagcgaatgtaaattcgctgggatcgtagccttgtaatgattgtaagttttcagcggctttttcgccgagatatttccttgttaactctggggaaatcctcatgctccatggcaccctgtgcccatgcagctccccagaacagccaccactacctggctccccactgagagtgctgggctgggcaagaggcactgtgcttgagggtgtctgagagctgcagatcaccaaggatacttcatcggcgggtaacgtcaacgtgatcgccgcaagcgcattaagtttttgctcagcatgggttaactgttgctgccattgccgcacatgctcgcgatcgctggtttgttgggagaactgcgcacgccaacccgccggttcgttgttccactgacggaagcggtcgtgttcctgtaaccaggtattcaggctttgttgctgctgctgtaattctgctgactgcttcgccgcgtggtggcgaatgctcgcgcgaagcgccattgtgctctgtaagcgagtatttacttcttcaatctgctggcgaatatgcgccagcgccgcgctgtgttctgcgatgcgttcccagtgtggacgaagatttcgtgccggttgtgccagactaagcgccgccagttgaggttgcgctttttcttcttcggctaacgcctgttgcaaggcctgctgacggcggctggcttcttgctgcaattcgtcctgacgcgttaaccagtttagcgattgttgttcttgctgctgcgcggtaattaactgtttttcttcgtcagtaagtacctgcaaactcgctgtcagcgattgcacttgttccggcgtgagcaacgtgacgccgctggcctgcgcttgcagcttctccagctctgtgcgggccgatttgtgctgctcaaaaaccatcgccgagatttgcccgtagatttcagtgccggttaactcctcgagcaattccgcgcgttctttgggtttggcattcaggaaggcagcaaattgcccctgcgaaagcagcatcgaacgggtgaagcgcccgtaatccagcccggttaacgtcgctgtcagttccagcttatctttcactttgtcggcgagaattttgccgtcggcgcagcgcgccagctctacgcgtggcaccacaagcggcgttccggcaactggatcgtcaatgatcatgcagcgcagaccataaatgcgctcaatcagttcagcagtgacaatctccttcggcgctccctgagcaacaattttcccttcccgcaatgcaatcaaatggctggcgtaacgacaggcctgattaagatcgtgcagcaccgccgccagggtatagcctttttcgcggttcagttcgcttaacaactccagcaaatcaatctgatgactgatatccagccaggtcgtgggttcgtcgagcagcataattgccgtttcctgggccagcaccat

SEQ ID NO: 132059 - DNA, 1118 bp, Homo sapiens
  misc_feature (1)...(1118): n = a,t,c or g
atgctcctgaatgaccagtggatcaatgacaagattaagaagaaaattgaaaaatattttgaaacaaatgataatggaaacacaacataccaaaacctatgggatacagcaaaagcagtaccagaagggaagtttattgctgtgaagaagctaagtctcagaaagataactcacccaagaggacacaaggataaacctgatacccatggcagtagaaagcctacacttacccactcagatgctcatcaatggaggagagacttatgcctggaggaactggaaaagagggggacaatacaaatcagcgacactgaatacggggcaacctcatgtccgagctcgcgagctcgtcgacagcgacacacttgcatcggatgcagcccggttaacgtgccggcacggcctggcgttgcccgcgttattcacgttgatcgctgtcgcttacttcgctgttaagcacaccaatttatcaggcagatactctggtccaggttgacaaaaacaaggcaacggccattctcagcggcctgagcgatatgatccttacttcatcgcccgagtctgcaccggagatccaactgctgcaatcgcgcatgattctcggtaaaaccattgctgaactgaatctgcgcgacatagttgagcagaagtattttccgattgtgggtcgcggctgggcgagattaaccaaagaaaaaccaggtgagctggcgatcagctggatgcatattccacaactgaatggtcaggatcagcaactgacactcacggttggggaaaacggccactatacactggaaggtgaagagttcaccgtcaatggtatggtcggccagcgtctggaaaaagatggcgttgcgctgactatcgcggacattaaggccaaaccaggaacacagtttgtcctgagccagcgtaccgaactggaagcgattaacgcattgcaggaaacctttaccgttagcgaacgcagtaaagaaagcgggatgctggaacttaccatgactggtgatgatccccagttgattactcgtattctgaacagcatcgctaacaactatttgcaacagaatatcgctcgccaggcggcgcaggattcacaaagcctngtttattaa

SEQ ID NO: 132060 - DNA, 785 bp, Homo sapiens
atgcccgtcgcttttggtaaagtaaatgtattccgaaattataaccgttttcgttttatcgagaagaacggtcattataaaccgaaaccgtttgggaagtttaggcgtatcatccggatcgtccggtattatctcatctccgccaggagttgggggaactggagtgtcgtctgattcatcgtcagggggtgtcgttcggtacgctggctcaggaaaactgtgttcctggtttggccttaatgtccgcgatagtcagcgcaacgcatctttttccagacgctggccgaccataccattgacggtgaactcttcccttccagtgtatagtggccgttttccccaaccccgcgacccacaatcggaaatacttctgctcaactatgtcgcgcagattcagttcagcaatggttttacgagaatcatgcgcgattgcagcagttggatctccgcgatgcacttgttccggcgtgagcaacgtgacgccgctggcctgcgcttgcacttctccagctctgtgcgggccgatttgtgctgctcaaaaaccatcgccagatttgcccgtagatttcagtgccggttaactcctcgagcaattccgccgttctttgggtttggcattcaggaaggcagcaaattgcccctgcgaaacagcatcgaacggttccagcttatctttcactttgtcggcgagaattttgccgtcggccagcgcgccagctctacgcgtggcacctgcaaattaccgtcgggttggtacgcgcccgattctggctccagaatgcacg

SEQ ID NO: 132061 - DNA, 282 bp, Homo sapiens
cgcacaggtcgttgggtgctagccgactctagaggaacctgatagtcttgtcttattgacaatcatcgctatatgcgtttacaaacgagacctggcttgtctagtgaaatgattatgacttcaatgacccttgatttacctcgccgcttcccctggccgacgttactttcggtctgcattcatggtgctgttgtggcgggtctgctctatacctcggtacatcaggttattgaactacctgcgcctgcgcagccgatttctgtcacgatggttacgcctgct

SEQ ID NO: 132062 - DNA, 1201 bp, Homo sapiens
atgaaaaatagtgtattgacggcgtttataactgtggtatgtgcaatgtttgcaggtcatttccgcacttcttatttgccgcgcataatccctcgttttaccgatgcccctttaattttggcgaaggatttgtctatggctgggaatgttcaggaaaaacagttgcgatggtacaacattgcgctgatgtcttttatcactgtctggggttttggcaacgttgttaataactatgccaaccaggggctggtggttgttttttcatgggtgtttatctttgcactctatttcacaccttatgcgctaattgttggtcagttaggctcgaccttcaaagatgggaagggcggggtcagtacctggattaaacacacgatgggacccggactggcttatctcgccgcgtggacctactgggtggtgcatattccctatctggcacaaaaaccccaggcaattctgattgcgctcggttgggcgatgaaaggcgacggttcgctaatcaaagaatattcagtcgtagcgttacaggggttaacgctggtgctgtttatcttctttatgtgggttgcttcacgcggtatgaaatcgctgaaaatcgtcggttctgtggcagggattgccatgtttgttatgtcactcctgtatgtggcgatggcggtaccgcgcctgcaattactgaagtgcatattgcgacccacaacattacctgggaaacgttcattcctcatagcgaccttatctacagtaccaccgattcaatgctggttttcgcggttggcgaatagacagagattctccttacgttatcaaacgcgcaacccaggattagagttccgctgcagctggcttttcaccggcagcggttggggcttcaaaccgtactttgctaagcgttatacagatcaaacctattacactggcgacaacggctatgtcgccggctgggttgcaggttacaactttatgctgggcagcgagaaattcactcttaccaactggaacgagtacgagtttgaccgtgacgctacctatgcagcggccattagcgcattgccctggtctcgtaccacgtcccataaagcttcagcggcggtggaaagtgaacggttcttcctgcgcaccagcatcaactggcgttcaacaaccggcgtaatgcgctttaccaccagtgggctaccttcaggcaatggtagcgcca

SEQ ID NO: 132063 - DNA, 621 bp, Homo sapiens
atgattgccaaaaaaatttcgttaatcgccaaaggatccttcaaccacgctggcgtaatacaattcccccaccccaaagacgaacttccacagaaaacagggtcttccttcactattcgcaaagaggggctggtgtccaatgtcaagaaggaaaccattctatttggcaaccgtggtgggatgtacgtgtccagcggacaggaattccaggtttacgctgtcatctcatatttctacaattgcctgctggacaaccccagacagacaattaaaatcaggcccacctccaccccagcttacctgcccttcctccccgttaggggacaaatgtacgggttctacgactgggaaaacttctataacgggcgccataataaaccatgtagcgagcagcgttatacctttaaaaataccaagccgtatttatcctgggttgacaccggatttagtctctacttgcatgcgtatggcacctacggttctgcgaatcgcgtgaatttcctcgacgatatgttcctgtacggtatcggctacaatttcaccggcagcggttgcaactttatgctgggcagcgagaacttcactcttaccaactggaacgagtacgagtttgacctgtga

SEQ ID NO: 132064 - DNA, 1045 bp, Homo sapiens
atgctgtgtacaaagtgggataaactgggcttggagaaaaacgcgggtaaaaataaaaacgcgtacaaatggtatgggtggcccgcaaatgcacctgatgaaccgcatattgaacaattggttggcgagtgccgtgttatgcggcaattaaaacgactcattagccgtattgcacccagcccatccagcgttatggtggttggtgaaagcggcacggcgatacctgttgtatctcatgcagaatttaaaggcggttttgcagatatcggcgtgcattatctggactggaccagccggactaccgaaaaatcgtcgaccaaatcacacaaagatgattttggttatcttgaatttgaaggtggcgctaactttagttggggagaaatgtacgggttcttcgactgggaaaacttctataacggtcgccataataaaccaggtagcgagcagcgttatacctttaaaaataccaaccgtatttacctgggtgacaccggatttaatctctacttgcatgcgtatggcacctacggttctgcgaatcgcgtgaatttccacgacgatatggttcttggccgggttcgggttccaattttaaccggcgggggggtggggggttcaaacccgttctttgctaagccgttataccagatcaaaaccttattacacttggcgacaacggctatgttcgccggctgggttgcaggttacaactttatgctgggcagcgagaaattcactcttaccaactggaacgagtacgagtttgaccgtgacgctacctatgcagcggatttcctgccgttatacgacgttgactgccaggacaatggcaatctggaatatgacacctattcccaaccggaatggaaacataacttgttcgaccattatctggcggtgctttaccgctttaaagatgaaagtggcaaagaacaatttagcggcgcagtggtgaaaacgcgtgaagcaacgccgggtaaagaaatagaagcgatcactcgccgaatgcttgatttcagcccacgactgaaaaaactcgcgg

SEQ ID NO: 132065 - DNA, 1755 bp, Homo sapiens; identical to SEQ ID NO: 128995

SEQ ID NO: 132066 - DNA, 1180 bp, Homo sapiens
atgtgccggcaacgaattcgaggtacagagaataaaacccggaaccaggtcaatacggctaaagcccccgtggcaaaggtcggcccggtacacatatcgacgctccgcaaaacggatattcgtttacgcgtttatgagcgtggggcaggagaaacccaggcctgcggcagcggcgcgtgtgcggcggttgcagtagggattcagcaaggtttgctggccgaagaagtacgcgtggaactccccggcggtcgtcttgatatcgcctggaaaggtccgggtcacccgttatatatgactggcccggcgatccttagcaagctggatgatgatcgcatcaaagatgacgatgtgcgtcacgatggtcgtcacgcccacgattatgactatgtccaccgcgttcgtgatattgaagccgacacgcccgcacgttataacgccgatcctgatcggttatttgaatcttctgggtgcgcccgggaagctggcggtctttgcagtacgtcttgataccttcgaagcggaaaaaaatcagcaggtgttttatatgcagtgcagcctacgggtaatgacttgtaggccggataagggcgttcactgccgcatccggcactggttgcctgatgcgacgcttgcgcgtcttatcaggcctacggtttacgccattcacggttggcacaccacacatcagacgttgcatattctaatccccaaaagtaactatatagttacacaaacagcgagatcggctgtaactgtaaataattacatgacaaatcttaacgccgtgttccagtttggtgttgataacggttacctggcagataatccgtttaaggggatctcgccattaaaggaatcaagaaccattccggatcctctttcgcgggaagaatttatccgtcttatcgatgcgtgcagaaatcagcaagcaaaaaatttatgccttcagatgctctcctggatcacatcgcggagagaatgcaacattcgtgattctgtatctcccatcaactgcgaatatatcatatcccgcgtttatcaattcatgttcgcaactgggcatagggaaacatacgaagtaccgagaatgtgcacgagttggaacaaggttccaaccgtgcataaggtcacgaaccgatgtcgaaagaaacctcggcgggcaaaagacgatgcgcggtga

SEQ ID NO: 132067 - DNA, 1398 bp, Homo sapiens
atgccatcagatatatcgctcgccagttgccggctacgcgcaacctcacgcttatttaccgatcaccgcaggcaatcagactgtatgactgctattaatcgcatccctattgtggatgatgaagataatgttcgccgattcgaaacacattgtgcgaacaacgtacgcacagcattacacctgtttgccgatattcaccctgatgtggtgttgatggatatccgcatgccagagatggacggcatcaaggcactaaaggagatgcgcagccatgagacccggacacccgttattctgatgacggcctatgcggaagtggaaaccgccgtcgaagcgctacgctgcggagccttcgactatgttattaaaccgtttgatctcgatgagttgaatttaatcgttcagcgcgctttacaactccagtcaatgaaaaaagagatccgtcatctgcaccaggcactgagcaccagctggcaatgggggcacattctcaccaacagcccggcgatgatggacatctgcaaagacaccgccaaaattgccctttctcaggccagcgtcttgattagcggtgaaagcggcaccgggaaagagttgattgccagagcgattcactacaattcgcggcgggcaaagggggcgttcattaaagtcaactgcgcggcgctgcgggaatcgttgctcgaaagtgaactgtttggtcatgaaaagggattatttgaacgagccaacgaaggtactctgctcctcgacgaaattgggcgaatgcgctggtactacaagcaatactacgcattctacaggaacgggaatttgaacggattggcggcatcagaccataaaagtgatatcgcatcattgctggcaccaacgcgactgcaggcaatggtaaaagaaggcaccttccgtgaagatctcttttatcgccttaacgttattcatttaatactgccgcctctgcgcgatcgccgggaagatatttccctgttagctaatcactttttgcaaaaattcagtagtgagaatcagcgcgatattatcgacatcgatccgatggcaatgtcactgcttaccgcctggtcatggccgggaaatattcgagagctttccaacgttattgaacgcgccgtcgtgatgaattcaggcccgatcattttttctgaggatcttccgccacagattcgtcagccagtctgtaatgctggcgaggtaaaaacagcccctgtcggtgagcgtaatttaaaagaggaaattaaacgcgtcgaaaaacgcatcattatggaagtgctggaacaacaagaaggaaaccgaacccgcactgctttaatgctgggcatcagtcgccgtgcattgatgtataaactccaggaatacggtatcgatccggcggatgtataa

SEQ ID NO: 132068 - DNA, 774 bp, Homo sapiens
atggatttgattgtcctcggctgtcgattcagccagcgtaacgccccgccccagtcgatcagttgctcgccgggtaaatccatcatcggcgcatcactgggtaatgaaatgcgccataagagcgctggcggaccaactgctcaacaggtactactgaatatcctgatcaatgccgtccaggctatcagcgcacgagggaaaattcgcattcaaacctggcaatacagcgactcacaacaggccatttcgatagaggacaacggctgtggcattgatctctcgctgcaaaaaaagatcttcgatccctttttcaccaccaaagcctcaggaaccgggcttggtctggcgttaagtcaacgcatcattaatgcccatcaggggaaatcagactgtatgactgctattaatcgcatccttattgtggatgatgaagataatgttcgccgtatgctgagcaccgcttttgcactacaaggattcgaaacacattgtgcgaacaacggacgcacagcattacacctgtttgccgatattcaccctgatgtggtgttgatggatatccgcatgccagagatggacggcatcaaggcactaaaggagatgcgcagccatgagacccggacacccgttattctgatgacggcctatgcggaagtggaaaccgccgtcgaagcgctacgctgcggagccttcgactatgttattaaaccgtttgatctcgatgatgaatactcggctacacctcatgaaaagagatccgtatgccggcactga

SEQ ID NO: 132069 - DNA, 2157 bp, Homo sapiens
  misc_feature (1)...(2157): n = a,t,c or g
atggcgatggtcgatgattttcgctgcgtagtcatcaaactggcggagcgtattgctcatctgcgcgaagtaaaagatgcgccggaagatgaacgtgtactggcggcaaaagagtgtaccaacatctacgcaccgctggctaaccgtctcggaatcggacaactgaaatgggaactggaagattactgcttccgttacctccatccaaccgaatacaaacgaattgccaaactgctgcatgaacggcgtctcgaccgcgaacactacatcgaagagttcgttggtcatctgcgcgctgagatgaaagctgaaggcgttaaagcggaagtgtatggtcgtccgaaacacatctacagcatctggcgtaaaatgcagaaaaagaacctcgcctttgatgagctgtttgatgtgcgtgcggtacgtattgtcgccgagcgtttacaggattgctatgccgcactggggatagtgcacactcactatcgccacctgccggatgagtttgacgattacgtcgctaacccgaaaccaaacggttatcagtctattcataccgtggttctggggccgggtggaaaaaccgttgagatccaaatccgcaccaaacagatgcatgaagatgcagagttgggtgttgctgcgcactggaaatataaagagggcgcggctgctggcggcgcacgttcgggacatgaagaccggattgcctggctgcgtaaactgattgcgtggcaggaagagatggctgattccggcgaaatgctcgacgaagtacgtagtcaggtcttgacgaccgggtgtacgtcttacgccaatcagccgaggatcccgacactgatcattcgcggctttgcggcagaaggccaaagccagaataactatctgaatggcctgaagttgcaggacaacttctataacgatgcggtcattgacccgtatatgctggaacgcgctgaaattatgcgtggcccggtttccgtgctttacggtaaaagcagtcctggcggcctgttgaatatggtcagcaagcgtccgaccaccgaaccgctgaaagaagttcagtttaaagccggtactgacagcctgttccagactggttttgactttagcgattcgttggatgatgacggtgtttactcttatcgcctgaccggtcttgcgcgttctgccaatgcccagcagaaagggtcagaagagcagcgttatgctatagcaccggcgttcacctggcgtccggatgataaaaccaattttaccttcctttcttacttccagaacgagccggaaaccggttattacggctggttgccgaaagagggaaccgtcgagccgctgccgaacgcatggcaagatctcacttcgggacgggttatttccggtggcagcacgctcactatgcaggttgctcgtctgcttgatcctcaccccaaaacatttggcggcaaaattcgccagctctggcgcgcgttgcaactggaatggcatctgtctaagcgtgaaattcggaccttgtatcttacccgcgctccgttggccggtacgttgcaggggatcggtgcggcaagttgggcttatctcggaaaatcgcctgcgaatttaagctattccgaggcggcaatgctggcggttttgccgcaagcgcccagccgtcttcgcccggatcgttggccggagcngtgcctgaagccgcggcgtaataaagtgctcgaacggatggccgtgcaaggtgtgtggtcccgtgagcaggtaaaagagtcaagggaagaacccatctggctggccccccgacaaatgccgcaactggcaccgctgttttcgcgcatgatgctcggtaaaagcaaaagcgacaaaatcactactacgttggatgccggtcttcaacgacgtctggaagaactggcgcaaaactggaaagggcggttgccaccgcgcagctcactggcgatgatcgtggttgatcataccgatatgcgtgttcgcggctgggtgggatcggttgatctcaacgatgattcacgctttggtcatgttgatatggtcaattcgatccgatcgccaggatcagtgctcaaaccgtttgtttatggtctggcgctggatgaaggcttgatccacccggcatcactgctgacagaaataaaacacgagcaaatatga

SEQ ID NO: 132070 - DNA, 1263 bp, Homo sapiens
tcagggctgtgcctgggagcaagagggactcaaagacccagagcatctgtttgcttgctgttttgaattcacgccatcccgcttgagtttttcttctgtttgggtagctcgaaagagattagccgccagttctgttgaacccatatgatccaggatcttctgattctttttcagccccttccgctgatgaatagctttctgatctaatccaccatacagcccctggtaaccatgattctgaaatatggcgaaatcagtagctgtcgctaccccagcttgctgtgctgcctcaaccaattgtttgttatgttctttcaactcatttctcagaaacagacgcttttcgtcttcacgaagttgcttaaatgcttcatcgtcagcaagctcctgccgtcgggtagccactgtgtttgcttgctgttttgaattcacgccatcccgcttgagtttttcttctgtttgggtagctcgaaagagattagccgccagttctgttgaacccatatgatccaggatcttctgattctttttcagccccttccgctgatgaatagctttctgatctaatccaccatacagcccctggtaaccatgattctgaaatatggcgaaatcagtagctgtcgctaccccagcttgctgtgctgcctcaaccaattgtttgttatgttctttcaactcatttctcagaaacagacgcttttcgtcttcacgaagttgcttaaatgcttcatcgtcagcaagctcctgccgtcgggtctgaatcgccagcggcatcagcaccttgtcgccttgcgtataatatttgcccatggtgaaaacgggggcgaagaagttgtccatattggccacgtttaaatcaaaactggtgaaactcacccagggattggcccttctgtcatgtaaagacacagtaaagcagatctgacccaccgccactgtggtggaattccagagcctcagagtgtctcctttggcagcagtcagcatggtggaggccagttcccaccgctgtgattccaagtgtccaagcgagaaccagggaggataatggctgcaccagctcttcagcacctggacacaggaccgtgcttcgcacatcttgctcagcacggtgccctgcctcgtttcttcttgaacatgacacgcgtagaactgtggaacctcagcattcagtgtcggtgccatccaggctgttctcaggatacagctgaaaacctggacaccattatcatcagtgtatccttccaaacccagcaccat

SEQ ID NO: 132071 - DNA, 2049 bp, Homo sapiens
atggcggtagcattgttcagggacttccagtgcggaaacctgaagtaccagggggaccctggctatcgagggcttaatgcccgctaccatgcgttaaccagcattagcccaaatgcggaagtcagcctcgataatactcaggggttaggcagaggaaatattgcccatgacggtctgttaacgctaaaaaacgtgactggcgaactgcgtaatagcataagcgggaagggtatcgtgagcgcaaccgccaggacagatgtagagttggatggcgataatagccgctttgtggggcaattcaacattgatacaggcagcgcgctcagcgtcaacgagcagaaaaacctgggtgatgcttccgttatcaataatggcctgctcaccatctccactgagcgtagctgggcgatgacgcacagtatcagcggtagcggtgatgtgacaaaactgggtaccgggatcctgactcttaacaacgattccgcggcgtatcagggtacgacggatatcgtggggggggaaattgctttcggttccgactctgccattaatatggcaagtcaacacattaatatccataacagcggtgtgatgtcgggaaatgtcaccactgcagtacaaaacggcgaccctgcgaaaccggtcattgcggcagggcagacttattttgctatccagacccgacggcaggagcttgctgacgatgaagcatttaagcaacttcgtgaagacgaaaagcgtctgtttctgagaaatgagttgaaagaacataacaaacaattggttgaggcagcacagcaagctggggtagcgacagctactgatttcgccatatttcagaatcatggttaccaggggctgtatggtggattagatcagaaagctattcatcagcggaaggggctgaaaaagaatcagaagatcctggatcatatgggttcaacagaactggcgctgaccggtgacgccctgttcagcttgcgctgcgattgtggcttccagctcgaagcggcattgacgcaaattgccgaggaaggccgtggtattttgctgtatcaccgtcaggaaggtcgtaacattggtctgctgaataaaatccgcgcttacgcactgcaggatcaaggttacgataccgtagaggctaaccaccagttaggcttcgccgctgatgagcgcgacttcactctttgcgctgatatgttcaaactccttggcgtcaatgaagtccgcttgttaaccaataaggggcttaaaaatttttttcccgggggaatctttttccccaaggggaaacccattgaaaaaccaagggcgtcccatgctggacacgatatccggaccttaaacgttcggacagcgcagaaatctttaaaacgcctgcaaacgcgtcaggccgaacgtcaggctcgcttggatgtgccgcacagttggagaaagtcgcagacggtcgcgaccttgacgaaaagctggccgaagccggaattggcggtagcaataaaacgtctgtttggcaaggataataagccagctatcgctcgtggtccgctgggacttcatctcaatagtggctttacgctcgacacgttagcgtttcgtttgctggaagatgaattgctgattgcgctgccgggtgaggaatttacggtagccgccgtcagccacatcgatctgggcggcggtagtcagattttccgctactacacttcaggcgatgagtttctgcaaatcaataccaccggcggcgaagatattgatgacattgatgatatcaagctctttgtctatgaagagagctacggtatcagtttgaataaatcccgagcttcgcgttttccacaccctcctgaggccctgaagagaactgactgtcgagtcatagtgtacctgaagtttgagctgggtataactaccactcatcacgaaagacctagtgtagataataaaaagtccaaagtttgtgaaaaggtagtggcagttgtttctcttgccttcatcatcgtaatcatcaccactgccactaccactgtcatcattatcaacgagcactga

SEQ ID NO: 132072 - DNA, 2392 bp, Homo sapiens
ctgttgtcgatccacggaatcaggctaccgccagcggcacgccaaagttatccaccggcagctcaccgctacgggtaaggttgtgactttgcgttcgatatcgagaatagcagaggacggggtcggagttcatctgccacatggccatacagatggcccatctgggttaataaccacgcatatgtcgcgcaccaccgccggaagcggcctgggtcgccggagtgaatttcacgttcagcaacgtaccgttaacagcagcgtgttatcgagcttactgactgacttcagtaccgctgttggccttgtgcgtcctggcccagcatgggtgacaagccgccgtctgccagctttctccggcaaaacgaccgtctggcgtcgcgccaaccaccgatcccaacggaccgcacacgctaggcgtataagcggcgatagtgcttgccaaggtcgatataatgttggtgtgtacttccagagggccatcgggttctttccggcagattcgcactgcgcgacatggggcgacgcgcggcaaggcactatccggcaagggttcgcttcatcagccataatccggcgaatgatccacgccgcccccgacgacttaaaggccgttcaagcagcggatcgtcaggctgtaagcgcaatttgccgccttgccgtggcgagcaaacgcggtatacgctgccgccatatcttccattttgcaccagcgccgccgagaatgagtgaaagattcggcgcagcaccgtgggcaaatataacggcaatccaacattgcgtaactttgccgcaaaccgttcggtccataggcttccagcacctgcacagcagttttgcgccagttcttccagacgtcgttgaagaccgcatccaacgtagtagtgattttgtcgcttttgcttttaccgagcatcatcgcgaaaacagcggtgccagttgcggcatttgtcggggggccagccagagggttcttcccttgactcttttacctgctcacgggaccacacaccttgccggccatccgttcgagcactttattacgcgcggcttcggcacgctccggcaacgatccgggcgaagacggctgggcgcttgcggcaaaaccgccagcatgccgcctcggaatagcttaaattcgcaggcgattttccgagataagccaattgccgaacgatccctgcaagtaccgcaaagggacgcgtcgtcatcccagcttcatcatcctcttcagcaatctcttcaagctgctggcgatgataatctcccacatgaattcgactttctctggctgtttcgcttcttcagcctgcagaccgggttttcaatgataaagatccggctggtaattgttgtccagctcgctgataataatacgcgcgttttcaacggatcggtgccgtcaatcggatcgatatcgatgaggtgcaacaggacgggcaacgttccaggtgcttcaggaagcgaatgcccagacctgcgccttcgcagcgccttcaatcagtcctggaatatcggcaacaacgaagctcttttgttgtccattcgtaccacacccagacttggcaccagagtggagcccaaggccaatgccggggctcgagccccaggcaaggccgtgacccaaatggaggcttttaaacccgagccagagagtttcacgaacgccaggtacagtgcgatgagaataatcggcaccagggtaatgccgccgccatcggcatattgccaatcgccccctgctgggaataaacatattgccgataaaatatcctggaggaccaaccagctgcgggacgataaatcgcccagtgtgagtgagaagtgtcagcagcgagccgaaatagacaatgccaaacacattagcgggccaagcagcagtaaaaacagccccagccccggattatccagaagaaaccggacaccttacccagacctggacgtgaaggtgattgcatacattcatcgccattcacctctcctcaaccagcggcaccatcacatccgcgaccaggaaaccatcacctgttgtccgggccggaatttctctgatctcgctctggctacctacgccgacgagcattacggggtgatctggccgcgggacaagaagaaccgcttatcgccaactcatgggttgcggtgtataccgtacaaggatggggaaaattcttttaaagaatggcgaacaaataacactgcatggcaacttattatattcttaaagccaatggatattcactcttatcactgtgaaggcagcaaaagagacctggccaaagctgtgctggcggagctgccccaacaagttgtgcagtatttaagcataaaaacctgccccccaccaactcggagcccgactgagctccaggcccagcagcagcatgtcagctga

SEQ ID NO: 132073 - DNA, 1410 bp, Homo sapiens
atgcagcaggcgagcattaagcacattgagttccgtgacgatcgctttgtggcggcggttgccgttgatgaataccaaccggtaacgctggtgtatctggcgcgggcggtgacgccgggaacgtatcagcgtggggagcagataaactctggcctctaccgctgcatgaagtcaatcccgcacgagtggtcgtggcgcaggatggtacgccgctctggcgcttcgccgatgctgacggcatctggcgttatccgagcaaacactgaactgcggcagatggcatcgcaggtcattcaagcggatagcgaatcgacgaatattttatgggccagcgccattttgttggggattgcactggtgattggcgcaggcatggtttggtggatcaaccgctctattgcccggctcactcgctatgctgattccgtcactgacaataagcccgttcctctccccgatctcggtagtagcgagttgcgtaaactcgcgcaggcgctggaaagtatgcgcgtgaagctggaagggaaaaactatattgagcagtatgtttacgcattaactcatgagctaaaaagcccactggcggcgattcgtggagcggcggaaattttacgcgaaggtccgccgccggaagtggtggctcgttttactgacaacattctgacgcaaaatgcgcgtatgcaggcattggtagaaacgttactacgccaggcaagactggagaatcgtcaggaagtcgttctgactgctgttgatgtggcggcattattccgccgcgtcagcgaagcgcgcaccgtgcagttggcagaaaaaaaaatcactctgcatgttacgcccaccgaggttaacgttgctgctgaaccggcgttactggagcaggcgctgggaaatttactggataacgccatcgattttacccccgagagcggttgcatcacgctaagcgccgaagtggatcaggaacacgtcacgcttaaggtgctggataccggtagtggtatcctgactacgcgctgtaccagcaactgcgaatatagagtaaacagtttgctactcaacgacggtgatgtttatttgtcagcacaaacagcagcgcctgccacaactaacggtatctacaatacgctgacaaccaatgaactttccggtagcggtaatttctacctgcataccaacgttgcaggctcccggggcgatcaactggtcgtcaacaacaacgccactggtaattttaaaatctttgttcaggataccggcgtcagcccacagtctgacgacgcgatgacgctggtgaaaacagggggaggggatgcttcgtttacgctgggcaataccggcggtttcgttgatcttgggacctatgagtatgtcctgaaaagacggcaacagcaactggaacctgaccaatga

SEQ ID NO: 132074 - DNA, 978 bp, Homo sapiens
tcatcggtaccgtaatgctgcggatatatcttctaaaccgtcacgttttaaatgctcgcagatttctgcggtacgacggcactgccagacaatggcgttatagataggcttgccggtttctttttcccagacaatagtggtttcacgctggttcgtaataccgatagctgcaatttgatcggaactgatatcggctttcgccagcacttctaccagcgtggagctttgggtggcccagatttccattgggtcgtgttctacccaacctggttttgggtagatttgctcaaattcgcgctgcgacacgctaatgatattggcatcgtgatccattacgaccgcgcgggagctggtggtgcccaattgtttgttatgttctttcaactcatttctcagaaacagacgcttttcgtcttcacgaagttgcttaaatgcttcatcgtcagcaagctcctgccgtcgggtctggatagcaaaataagtctgccctgccgcaatgaccggtttcgcagggtcgccgttttgtactaccaggtaacaggcatagcgggagagtacgatgtcttttaatgctcttttggcatttgagccaattttgaccatatcgaggatctcctcgaaatggtcatcaattgtgtgaccactgttctcacaggctttcagaggatccctttgtgcgttatagtaaccattgccaatcaataagcaattaccggtgtgataagccacctgttcgaccgctttcaccattgcaccaaaaaacggatcggaaacatcaccaacgaccagaccgaccgtttcagtggtctgctgcgccagcgcacgggcgttggcgttcgggtgatagctaagagactccattgcactatgcacagccagccgggaagcttcgctggctttgggtgaattattaatgacgcgggaaacggtggcgactgaaacgcctgccagtcgggctacatcctttatggtcgccat

SEQ ID NO: 132075 - DNA, 1174 bp, Homo sapiens
ccggatcatgtgggtcgaggaaatcggccagcgattcggtaaccatccattcggtgcgtcgctgctcttctgtggtggtaacgctcacatccgcaatgcggatatctacaaaaccacacttcttcagccagtttttcagcgccagcgcggaagggatgaaatagacattacgcatttgcgcgtaacgatcgcctggtaccagcaccgtgttctcatcaccatcaataaccagcgtttccagcaccagttcaccttcattgaccagttgatctttcaactgccatagatgctccagcggtgaacggcgatggtaaagcacgcccatcgaaaagacggtatcaaaggctttcagtgccggaagttgttcaatactaacggtaacaaatgcgcgcgcatctgctcgaagtgcctgcatcatctcaataaccgcagctgtgagcggcagttgtgcgccgacgccgtgagaagtatccagcgcattcgccagatccttaatatgcagatcaatacggaagcccggcttgaagttgcggtccatcaccatcggcgctttggcatccaaaacggtactgcccgccagtccaccgcgaattgcctgataaaccaggtccgggttaacgcccgctttagttgccagcgttaacgcttctgacatcgcggcaatattcagcgccacaatgacctgatttgccagtttggtgacgttacctgcaccgatttccccggtatgcaccacggaacccgccatcgctttcatcaaatcatagtatttgtcgaaaatagccttgtcgccgcccaccatcactgacagcgtaccgtcgatggctttcggttcaccgccgctcaccggagcatccagcatatcaatgcctttcgctttcaacgcttcgctgaattcacggcttgccagcggtgcgatagaactcatatcgatcaataacgtaccttgcttttcgccctttattaatggcatttttacccacggccacctttttacatgaggagagtttggcagcatggttatgatgacgtcgcactgttcagcgatcgctttagccgtagacgctgtttctgcacctgcagcaatcacgtcagcaatagcttctgggttacggtcagcaaccaccagcgagtaacctgctttcagaaggtttttactcattggtttacccat

SEQ ID NO: 132076 - DNA, 1822 bp, Homo sapiens
atgggtaaaccaatgagtaaaaaccttctgaaagcaggttactcgctggtggttgctgaccgtaacccagaagctattgctgacgtgattgctgcaggtgcagaaacagcgtctacggctaaagcgatcgctgaacagtgcgacgtcatcataaccatgctgccaaactcccctcatgtgaaagaggtggcgctgggtgagaatggcattattgaaggcgcgaagccaggtacggtattgatcgatatgagttctatcgcaccgctggcaagccgtgaaatcagcgaagcgctgaaagcgaaaggcattgatatgctggatgctccggtgagcggcggtgaaccgaaagccatcgacggtacgctgtcagtgatggtgggcggcgacaaggctattttcgacaaatactatgatttgatgaaagcgatggcgggttccgtgtgcataccggggggtccgcttccggcggtgccccgggaagtaccggtcccgcaccggtgggggcccaaggatgtcccccatggcggggaacgggcccggctgaaattcgctgatgcgtggggagcagataaactctggcctctaccgctgcatgaagtcaatcccgcacgagtggtcgtggcgcaggatggtacgccgctctggcgcttcgccgatgctgacggcatctggcgttatccggtaacaatcgaagatgtttctccacgttaccttgaagcgctgatcaattatgaagatcgctggttctggaagcatccgggggtgaatccattctcggtggcgcgcgcagcatggcaagatctcacttcgggacgggttatttccggtggcagcacgctcactatgcaggttgctcgtctgcttgatcctcaccccaaaacatttggcggcaaaattcgccagctctggcgcgcgttgcaactggaatggcatctgtctaagcgtgaaattctgaccttgtatcttaaccgcgctccgtttggcggtacgttgcaggggatcggtgcggcaagttgggcttatctcggaaaatcgcctgcgaatttaagctattccgaggcggcaatgctggcggttttgccgcaagcgcccagccgtcttcgcccggatcgttggccggagcgtgccgaagccgcgcgtaataaagtgctcgaacggatggccgtgcaaggtgtgtggtcccgtgagcaggattttcccagttctgacgcagtttatgtacgtgccagagccccgattgcgtgccccaggatggtcttcgaggagcctgcggacgattagtcagttagccatgcgccatgatatctatctgaacggtgaattattcgcgcggacccgacggcaggagcttgctgacgatgaagcatttaagcaacttcgtgaagacgaaaagcgtctgtttctgagaaatgagttgaaagaacataacaaacaattggttgaggcagcacagcaagctggggtagcgacagctactgatttcgccatatttcagaatcatggttaccaggggctgtatggtggattagatcagaaagctattcatcagcggaaggggctgaaaaagaatcagaagatcctggatcatatgggttcaacagaactggcggctaatctctttcgagctacccaaacagaagaaaaactcaagcgggatggcgtgaattcaaaacagcaagcaaacaccacacactttgacgtgggtcgcaaggtgaggcaaaccattcaggaacttggcggaaccatgcctgaggagttgccgaccccgcaggtcagcatcaagcagttggaaaacagtgtaaaaattacagagaagaaatag

SEQ ID NO: 132077 - DNA, 1653 bp, Homo sapiens
atgtgtggcctaacttaccattttaccgtatgcccctatcccgctgaatggcgactacatatgggatatgatcctcatacctgtcagttcactgattttgagctaaccgacagcagagacgctgaacggctggaccgatttgcgcaaacggcagacgagatacgcattgctgaccggggattcggttcgcgtcccgaatgtatccgctcacttgcttttggagaagctgattatatcgtccgggttcactggcgaggattgcgctggttaactgcagaaggaatgcgctttgacatgatgggttttctgcgcgggctggattgcgaaaaagtaaaccttggtctggataataatacctggggcggtggtttttccaaatattgtctggttcctggtgaaattctcaaaattcatcgtcatgcgttgtgggaaatccctgatggtgttgattatgaggacgcagccgtacttgaccctatctgtaatgcctacaaatccatcgcgcagcaatcgaaattccttcctggtcaggatgtggtcgtcatcggcactggcccactcgggctgttctccgtacaaatggcgcgaattatgggggcggtaaatatcgtcgtcgttggtctgcaagaagatgtggcggtccgcttcccggttgcaaaagaactgggtgcgacggcagtagtaaatggttctaccgaagatgtggtggcgcgctgccagcaaatttgtggcaaagacaatctgggactggtgattgaatgctccggtgccaatatcgcactgaaacaagccatcgaaatgctccgcccgaacggggaagtgatggcgggcgcgatcggcgtcacgcttggcttcctgctggtgcaaattatcaacaccattctgagttacttcgtgatgattaaaccggttcttggttccagttatcgccagtacatcctgagtttatggctgccgttttatctctcgctgccgacgctggtggtcagttatgcgctgggcattgtgctgaaagggcaactggcgctggggatgctgctggcggtgcaaatagccacgggggtgctggcgtttgtggtgatgattgtgctgtcgcgccatccgctggtggtggaagtgaagcgtcagttttgtcgcagcgaaaaaatgaaaatgcttttacgggcgggcaccagacggcgtgggctctactctctctcggaaatggatgacccacaatgggtcggcaatggcatggataaatttgaaagcgccgagtgtgaaaaaaggttcaaggctcgcaaggtcctgcagtgggctgaagaatatagcttgcaggataacgatgaaaccattcttgcggtaacgagggatggggaaatgagcctgccattattgccttatgtacaaacgtcttcaggtaaacaactgctcgatggccaggtctacgaggacctaagtcatgaacagcagtatgaggcgcttgcacttaatcgcgtcaatgtacccttcacctggaaacgtagtttttctgaagtagtagatgaagatgggttactttggctggaagggaaacagaatctggatggatgggtctggcagggtaacagtattgatattacctatacaggggatgaagggatgaccaaagtcatccctgcaaaatccaaataa

SEQ ID NO: 132078 - DNA, 2739 bp, Homo sapiens
tcaagcaacagcgcattctgggcgcatgatccggtaaacacgtttggcattgatcgcaggcataccatcaagttctgcctgtctgcgaagcagcgcccatacccgacgataaccatacgttggcagctctccgataacatggtgtatacggagaagcacatccgtatcatcagtgtgacgactgcggcggccatccatccagtcatcggttcgttccccatccccgggcaataagggcgcgtgcgctatccacttttttgcccgtccatattcaacggcttctttgaggagttcattttccatcgttttcttgccgagcaggcgctggagttctttaatctgcttcatggcggcagcaagttcagaggcaggaacaacctgttctccggcggcgacagcagtaagacttccttcctggtattgcttacgccagagaaataactggctggctgctacaccatgttgccgggcaacgagggagaccgtcatccccggttcaaagctctgctgaacaattgcgatcttttccttgatgccatcaacattctcaatccacacgccgaagtggatgtgatgagccgctatccggtcagttcttcctggctgctcaaccgcccggtaatgggcgatccgctgttcgacgccattatccaggtcggcggatcgttttttgtcgatctctatggcgtgccgcagtttgaacatgcactttgcacgtttatggcgaaaaagccgctgtttatgattggtcacagtgttggcccgttccaggatgagcaatttaaccaactggcgaactacgtttttggtcactgcgacgcgctgatcctgcgcgaatcggtcctctttgaacgcctgagacatgcagtaccgccagcattgcccccccacccccaacatggcacatgtatacatatgtaacaaacctgcatgttgtgctttgaatttgatcaggatggagttagcgatacctttttcgataccttctttcaggatcttggtgttggttacgaacaggtcgtcaccaaccagctggattttgtcgcccagaactttggtctggtatgcgaaaccgtcccagtcagattcgtccagaccgtcttcgatagaaacgatcgggtactgtttggtcagttcttccaggaagtgagtgaattcttcagaggtgaacgctttgttgccttcgccagccagaacgtatttaccatctttgtagaattcagaagctgcgcagtccatcgccaaagtgatgtctttgcccagttcataaccagcagctttaacagcttcagcgataacagccagagcttcagcgttggaacccaggttcggcgcatagccaccttcgtcaccaacagcagtgttcatgcctttcgctttcagaacttttgccaggtgatggaaaacttcagaacccatgcggatggcttctttcacagttttcgcgccaaccggctgaatcatgaattcctggatatcaacgttgttgtcagcgttctcaccaccgttcatgatgttgatcatcggaacagagttgagaggcaagggattgagctgattcaggggtacgatgccagccagctcgagccgcagccggatctggtgattattggcaacgccatgacccgtggaaatccgtgtgtggaagcggtactggagaaaaatatccttttttttatcgaatcggatgagtatgactgcgcctttttcgacaaacgctctaaatttgttcattactgcccgcgtacgctgatcctcaacaaccttgagttcgatcacgccgatatctttgacgacctgaaagcgatccagaaacagttccaccatctggtgcgtatcgttccggggcagggccgtattatctggccggaaaatgacatcaacctgaaacagaccatggcgatgggctgctggagcgagcaggagctggtgggtgagcagggtcactggcaggcgaaaaagctgaccaccgatgcttccgaatgggaagttttgctggatggcgaaaaagtgggcgaagtgaaatggtcgctggtaggcgaacataatatgcacaatggcctgatggcgattgcagcggctcgccatgttggtgtagcgccggcagatgccgctaacgcgctgggttcgtttattaatgctcgtcgccgtctggagttgcgtggtgaagcgaatggcgtcacggtatatgacgattttgcccatcacccgacggcgattctggcaacgctggcggctctgcgtggcaaggccggtggtacggcgcttttggaaattgagagcaatgtgtgtatcacgggctgtaactactactccggtggtaatattcagttcacccgtgcctaattggatttgcccatatatttccagacatctgttatcacttaacccattacaagcccgctgccgcagatattcccgtggcgagcgataacccagcgcactatgcggatgccattcgttataatgctcgaacgcctctgcaaggttctttgctgccgttaacccgtctggtttgggcatgatactgatgtagtcacgctttatcgttttaacgaagctctctgctattccgttactctccgggctccgcaccgccgtgttcttcggctcgagtcccaacatccgggcgaactggcgtgtttcattagcccggtagcatgaaccattatccgtcagccactccactgggcacgacggaagatcggtgccgaagcggcattccaccgctcccagcat

SEQ ID NO: 132079 - DNA, 1346 bp, Homo sapiens
cagttcagattacagactacatccacttctacggttatcgcccggttaaatctttcgctattcgcattcctgccagttacaccattcacggaatagatgtttcgcgctggcaggagcggatcgactggcagcgggtggcaataatgcgcgacaatggtatccgcttacagtttgcttttattaaggcgacggaaggcgaaaagctggtggacccctatttttcgcgtaactggcaactaagccgcgaaaatggcctgctgcgtggggcgtatcattatttctccccgtcggtatccgcttcagttcatgcgagattatttctgcaaacggtggatttctcacaaaggcgatttcttgccgtgctggacgtagaagaacgggggagaattatcggcaaaagaatttacgcaagctggcagcaatacaatcgtggcgacagcgccatcctgcgcggcttacttgatgccatcaacattctcaatccacacgccgaagtggatgtgatgagccgctatccggtcagttcttcctggctgctcaaccgcccggtaatgggcgatccgctgttcctgcaaatgaaacaacacaacagcgcggcgggcgttgtcgggcgcgttaaaaaagtcctccgtcgccgctaccagcatcaggtattgctctcacgcgtcaccgacactggcaagctgcgcaatatcgccatcgcccagggattcaccgacttcgtgcgcctgctgtcaggttacgacgccattatccaggtcggcggatcgttttttgtcgatctctatggcgtgccgcagtttgaacatgcactttgcacgtttatggcgaaaaagccgctgtttatgattggtcacagtgttggcccgttccaggatgagcaatttaaccaactggcgaactacgtttttggtcactgcgacgcgctgatcctgcgcgaatcggtcagctttgatctgatgaaacgcagcaatatcaccaccgcaaaagtggaacatggcgtcgataccgcgtggctggctttggcaaaccacgccacgggcgcaaagctggataaacgcatcaccgccagcatcgtgccccacaaaataccaatcactaccgccgtgacggtgattttcagggtgatcaccagcccgtcgagcagatatggcaggcagctccggggattcacagataacagcccatggggagacatcggggataatttgccggctagtaaatcggagcgtgattcgcccgggtctgaaattaccaccttcattcggtttacaatgcttaattgctactggacaaactgtcgtcccagcagttctgtctttcctgtcagttcagctgctccctga

SEQ ID NO: 132080 - DNA, 1002 bp, Homo sapiens
  misc_feature (1)...(1002): n = a,t,c or g
tgctaaaggcactggcgctgggatgctgctgcggtcaaatagccacgggggtgctggcgtttgtggtgatgattgtgctgtcgcgccatccgctggtggtgaagtgaagcgtcagtttgtcgcagcgaaanaataaaatgctttacgggccgggttagttcttgtttccggtcccaccaccgtttgccgtatgcggggtaaaacgccttatccgtcctacgggttcctgtgctcgggacctgtaggcctgataagacgccgtcagcgtcgcatcaggcactgaatgccggatgcggcgtgaacgccttatccgtcctacggttctgtgctcgggtcttgtaggcctgataagacgcgtcagcgtcgcatcaggcaaaaagcggcaacgaacaaaacaaacgcagcctcacctggcatcaaatttatgaggaaaaaatgaaattacttattgtgggcaaccacacttgcggcaatcgtggcgacagcgccatcctgcgcggcttacttgatgccatcaacattctcaatccacacgccgcagtggatgtgatgagccgctatccggtcagttcttcctggctgctcaaccgcccgcatcaggtattgctctcacgcgtcaccgacactggcaagctgcgcaatatcgccatcgcccagggattcaccgacttcgtgcgcctgctgtcaggttacgacgccaatatcgcagggtcgattcgacaattcaaaggactcccggggtgccggatgcagcgtgaacgcctaatccggcctacggctcaggatttaccggtcaacgtggctcgctacgatcagcaaaatatgaatcttcgaaaagctgatcgaaaagcagctcttctttcttctggcgtccggaagaagttgacgtcttcccgcgaccgtatagattaccaggcgctgccggagcacgaaaaacacatctttatcagcaacctgaaatatcagacgctgctggattccattcagggtcgtagcccgaac

SEQ ID NO: 132081 - DNA, 1089 bp, Homo sapiens
ataaaaatggtactggaggcgggagaaaaaaaaggaaggggcggaggggcacaacgcggagaggatagggctcgtagaggaggcaagggcaagaggaaaaaaagagcggatgcaaaagggacaggggaatgggcgaaaggttgcggaggggcgagcgcgcccgaacgataggatggagaagaaaggggcaaacggggggggtccagaatgggagagaagaacgggagcgggcggtgaaaggtaaatagaaggggagcaggcaggaaagagaggggggtccggcagcacggagaggattgtaacgtggcggcccgacgttggacgaagatgaagggcaaagctcaaagccagtaaagaactggaatggtaaacgtttgggggggatgaacccccccagaaatgggaagctcatggtatgaggagggcccaaaatgagtgggggcgcatgaaggccaatacctcgcagaagtgccggtagctgtcccaacttcgagtatatggatacagccgcccagaaatcggttgccgcgaagatgcatgaccaggccggtgaaagatgggcaaacctgtattgattgccataaagggatagcgcacaagctgcccgatatgcgtgaagtcgagccaggtttttaacagggttattgcgtgggtatgcttgaagccagagagttactttgtgagcgggatgaacgaaccttatttagtggcttgtcatttacgctgaacgcaggagagtgggtacaaatcaccggtagcatcggcgcggggaagacaacgcttctccgtttgctgacggggttgtctcgccctgacgcaggcgaggttctctggcaagggcagcccttgcatcaggtacgcgacagctaccatcaaaacctgttatggataggccatcagccggggatcaaaacccggctgacggcgttagaaaatctgcacttttatcatcgcgatggcgataccgcacaatgtctggaagccctggcgcaggccgggcttgccggattcgaagatattcagggtacctcaacgggtcgtctcgcgtctctacaaggagaactccaaacactgttgaaagaatcatag

SEQ ID NO: 132082 - DNA, 324 bp, Homo sapiens
atgcctgttactgcccttgaagaccttccagtgggacaagatatagaggtggaagacagtgatactgatgatcctgaccctgggagggccgccgtccaggtcacgagaaggcttgcgacccgctacacccctcccaagactgggagcgggcgcccagccttgcagggacacgcaggcggactcgaggagcaaacggccagtgagaacgattcaagggactcacccactcctcgccgtagcttgaccgtggctctggcaccaagaggtggcaccaaacctgccgccagccttggctttctcaccagtcgggctctgatgagttga

SEQ ID NO: 132083 - DNA, 845 bp, Homo sapiens
atgagtgtgtgcagcccctgcgatatcgagagtaatatcatcctctcgcccactggatatggcgaacaatatcacaggagggtgtgcaccacctacgatattgaaagtaatatcctctcgccccctgaatattgcgaacattattacaggggggagtgtactccctgcaatgttaaaagtaacatcatcctcttgctcctggatgttacgaacaatatcacagagactgacttgcataccaaatgtgtggtggatgtggatgcaaacaaggttattcttaatcctgtaaatacgaatctttccaaaggagatgcccgtgtatatgcctactacccatttttaaaaaggttaattgtaaaacagcctcaggcaggtctttcaggagttactacaaaagaaggcactgttatcacaggagatgacagctccatgcctgttactgcccctgaagaccttccagtgggacaagacgtggaggtggaagacggtgatactgatgatcctgaccctgtgtttgcttatgatcattgtttctggtctatggatgaatctgtcaaagaaaagtatgcaggtcaagatattgttttcaagtgccttggagagaatatcctgcagaatgcttttgatggctacaatgcatgtatctttgcctatggacagactggctctggaaaatcttataccatgatgggcacagctgaccaacctggattaatcccaagactttgcagtggactctttgaacgaactcagaaagaggaaaatgaagaacagagttttaaagtagaagtgtcctacatggaaatttataatgaaaaagttcgagaccttcttgatcccaaagg

SEQ ID NO: 132084 - DNA, 1095 bp, Homo sapiens
ttagtcgggagggggcgctgtgcgcaggcgcgaggtgacgccgcggcagggccggaaggagtgcagcggctgccacggagctcgcagctgcggcttctgaggagtaagcggcgcggtagcgaaggccgccgaacctgcctggctagccggcgacttgagtgacgagtgagtgtcggctgcggggcgcgctcgagctcctgggcgggtctgtgaggcgacgcggcctctctgaggggcgcctctgtggagctccgggggtgggggcgggggcgcgggccgtgagggccgccgagctgaggggcgcgggccgaggcccgggcgggatcgggccaaggggctgggctgggcgtctcgagcccggtgcggtggcgaggctggagcgacaaaggcgctgagcggccgggtggccccctctcgccacttcgcgaagtttcgcgggccggcccctcgggtctgctgcgcgagggcaacagcccgggagaccgcgcttccctcccccgggcccgaggccgccgcggaggcggtgtccgtgcacccgagcgcggcctggaggagcggcgggaggcgggccgtgcctgtgaaccccagcccaggcgggcggcgtttttcctcctcttccctcacatctggagcgcgtgttccgcgaaagttggcgactgtcacccggcactcgcgagggcgccgcaagtgcgtcaaacccttctgcggggcgctgggggctggcccggctcgggtgtccgggcgctgggcagcgagcgaggccgctgtccccgcgtcgaggtggttctgctcccggtggaacaggaccagggatccaagactctgggccacttgcaaccaacccggcactgtgggctcctgcgcagcctgagcctccccgacgagtgccgtcccctgctcctcggcgccggatcccattgaccgcccaagggctgaggagtgcaggcgcacagcacgggactggcaggcggctccaccctcttgatcagggctggctttgccatagattttagccatggataaactgagcgtgaggtagttctgcagcctgtacaggaagcgtggctggggaggcctcaggaaactgacagtcat

SEQ ID NO: 132085 - DNA, 604 bp, Homo sapiens
gaattcccgtttcgacgatttcgtgcagcggctgccacggagctcgtagctgcagctttggaggagtaagcggcgtggtagcgaaggtcgccgaacccgcctggctagccggcgagttgagtggcgactcttttgaaacagatggtcaccatgtttagatattagcagtcccgtatgtgcatgtctgcatttgaaaatgaaagagggaaacaacaatgaagaggtaattcacttgaacaactttcactgccatcggggacaagactttgtaattttcttctggaaaacccagattatccaaagagagaagacggaatcattataaatcccagtaggcggtctgctggccagccaagatgagacaaagttgcctaaaataagacttttttgactattctaaattgactcctcttgaccagcactgcttcatccaagctgctgacctcctcatggccgacttcaaagtgctcagtagtcaggacatcatgtgggccctgcacgagctcaaaggacactatgcaatcacccgaaaggccttttctgatgccattaaaaaatggcaggagctatcaccagaaaccagtggaaaaaggaaaaaaaaaaa

SEQ ID NO: 132086 - DNA, 2256 bp, Homo sapiens
agacgtgccggaccggaattgccgggtcgacgatttcgtaggtgacgccgcggcaggctcggaaggagtgcattggctgccacggagctcgcatctgcggcttctgaggagtaagcggcgcggtagcgaaggccgtcgaacctgcctggctagccggcgacgttgagtgacgactcttttgaaacagatggtcaccatgtttagatattagcagtcccatatatgcatgtctgcatttgaaaatggaagagggaaacaacaatgaagaggtaattcacttgaacaactttcactgccatcggggacaagagtggatcaatctccgagatgggcccatcaccatatctgactcctcagatgaggaaaggattccaatgctggtcaccccagctcctcagcagcatgaagaagaggacctggatgatgatgtcatcctgacagaaacaaataaacctcagagatcacgacccaatctcatcaaaccagctgcccagtggcaagatctgaaaaggttgggagaagaaaggcctaaaaagtctagagcagcatttgaatcagataagagcagctatttttcagtgtgtaacaacccattgtttgattctggggcacaggatgattctgaggatgactacggtgaatttctggatcttgggcctcctggaatctctgaattcactaagccaagtggccaaacagaaagagaacccaagcctggaccgagtcataaccaagcagcaaatgacattgtcaaccccagatcagagcagaaagtcatcatcttggaagaaggtagccttctttacacagaaagcgatcctttggaaactcagaaccagtcatccgaagactcagagacagagctgttatcaaatctaggagagtcagctgctctagcagatgatcaggccatcgaagaagactgctggttagatcatccttacttccagtctctgaaccaacagccccgtgaaataacaaaccaggtcgttcctcaggaacggcagcctgaagcagaactgggccgcttgttgtttcagcatgaattcccagggcccgcttttccaaggccggaaccccagcaaggagagtttgaagaccagcagttagcaagtgatgatgaagagccaggtccagcctttccaatgcaagaatctcaagagcccaatttggaaaacatttgggggcaagaagctgcagaggtagatcaagagctcgttgaactactagtgaaagaaacgttgcctaaaatagacttttttgactattctaaattgacccctcttgaccagcgctgcttcatccaagctgctgacctcctcatggccgacttcaaagtgctcagtagtcaggacatcaagtgggccctgcacgagctcaaaggacactatgcaatcacccgaaaggccttgtctgatgccattaaaaaaatggcaggagctgtcaccagaaaccagtggaaaaaggaagaagagaaaacaaatgaaccagtattcttacattgatttcaagtttgaacaaggtgacataaaaatagaaaagaggatgttctttcttgaaaataagcgacgacattgtaggtcctatgaccgacgtgctctccttccagctgtgcaacaagagcaggagttctatgagcagaaaatcaaagagatggcagagcatgaagactttttgcttgccctacagatgaatgaagaacagtatcaaaaggatggccagctgattgagtgtcgctgctgctatggggaatttccattcgaggagctgacgcagggcgcaaatgctcacttgttctgcaaagagtgtctcatcagatatgcccaagaggcagtctttggatctggaaagttggagctcagctgcatggaaggcagctgcacgtgttcgttcccaaccagtgagctggagaaggtgctcccccagaccatcctgtataagtactatgagcgaaaagccgaggaggaggttgcggcagcctacgccgacgagcttgtcaggtgcccgtcctgtagctttccggctctgttggacagtgatgtgaagaggttcagctgtcctaatcctcactgccgaaagggctgctgcagcccctcaggtttctcccctcgaaactcgcagaggcaactgctgaccccccggcaggtggcagagcccacacccacctgcatttcagagccaaggaagtctagagtcagcgtgggctccgagaacccggcagcgacctggggcctcagatgtcgccgacctccctga

SEQ ID NO: 132087 - DNA, 5076 bp, Homo sapiens; identical to SEQ ID NO: 118069

SEQ ID NO: 132088 - DNA, 2841 bp, Homo sapiens
atgaaggcctcaatgaattctaaatatccacttgcagatgctacgaaaagagagtttgaaaactgctctatgaaaagtttttatgtagatattcctgtttccaacgaaggcctcaaagcagtccaaataaccacttgcagtttctatgaaaagagtttttcaaaactgctctatgaaaaggcctcaaagctctacaaatgcccattgcagattctacaaaatgagtgtttcaaaactgctctatcaaaagaaagtttcaactcttttttatgtgaagatattcttgtttccaacgaaggcctcaaagcagtccaaatatccactggcagattccacgaaaagagtgtttcaaagctgctgtatgaaaagtttttatgtgaagatattcccatttccaacgaaggcctcaatgccatcaaaatatccacttgcagattctacgaaaagaatgtttcaaaactgctctatgaaaacgcctcgaagctctccaaatgtccacttgcacatactacaaaaagaatgtttcaaaactgctctatcataggaaaggttcaactctgtgaattgaatgcacatatcacaaagaagtttctcagaattcttctgtctagtttttatgtgaagatattcccatttccaacaaaggcctcaaaacagtctaaatacccccttgcagatactgcgaaaagagtgtttcaaaactgctctgtgaaaaggttctacgaaaagagcgtttcaaaactgctctatgaaaagggacacagggcacaagcccacctcctgtgtgaagatcctgccacagggtggttctttggttttctgcgggtatccagacaagaagctaaaggtgaatgcactccggaatccaggagcactggcgattttctctccttagctcagcgagcaaccccacagataacccctagccccaccccgggccacttgaatccatacaataaaatgtattggccagagaaatatgaggaagatgcacaagtggaaccccctgataaaaccgtcagatctcgtgagacttattcactaccaggagaacagtatgggggaagcgcccccatgattccaattatctaccaccaggtcccacccacaacacaggagaatgatgggaggacaattcaagatgagatttggctttggaacaaggctccctgcatcctggccactgcttcagctctaggtgtagctcaaattgatccagttacaactccagtcactgcttcagagtgtgcaagccataatcttggtagctttcatgtggtgttaggcctgtgggtttaccaaatgcaagtagttgagacttgggagcctccacctttatttcaaaggatgtatgaaaaagccaggagttggcagcctgatcctggcacaaaggttctgagggacatccagacacaccccaccacagtcactagcaaacccactcccaaacacacagatacacaggggcgcacgcgtgggaacacaagcacacacacagacacacaaagacacagacagcttgaagaagaacaagggacagagagatggagagatagaaacggaaggagagtgagaaacagcgatcgagagaaagacagagaagaacctgggagattgagagagagagcacgcaaggtggagagggaagtagagaaagggagaggggattttgtgtttgctgccctggctcctctagaagtaggactgtaccaccctcagattcctcgttggcctccgcaccccaacaaatgccaggaggtccagtacccgcagcacggcagcctgctgggtgcatgctcagtgggacagcttgggtaccctcaagctaagtcacaggggcaaaagtttacacgacattggtggcaatgggaaacagggtgcacagggacggatttcttcgtggctggcgaagacaatgtccttcccccggggaaagcagcccacgggttctggagccgaggtcttggctggcaactgtgggacctgctgccccaacttcgatggttgcggcggcgcttgatgaatgaattgaattgcctggggtccggggagcgggaagacaccccggagggcaggaaacccgcacctgcgccttccaggtctactacctgctgcagcgccctggctggagccgggctcctggtggggctgcagccaggcaaaagaggtgggatgctgccacctggcggtattgcagctgcagacccccacgaggaggaacgctgtgcctcaccagcaacagaacaaagctggacggagaatgactttgatgagttgagagaggaaggcttcagaagatcaaattactccgagctaaaggaggaagttcaaaccaatggcaaagaagttaaaaactttgaaaaaaaattagatgaatggcttactagaataaccaatgcagaagagtccttaaaggacctgatggagctgaaaaccatgacacgagaactatgtgatgaatgcacaagcctcagtaaccgatgtgatcaactggaagaaagggtatcagtgatggaagatgaaatgaatgaaatgaagcatgaagagaagtttagagaaaaaaccatacaaagaaacgaacaaagactccaagaaatatgggactatatgaaaagaccaaatctatgtctaattggtgtacatgaaagtgatggggagaatggaaccaagttggaaatcaatcagcaggatattatccaggagaacttccccaatctaacaaggcaggccaacattcacattcaggaaatacagagaatgtcacaaagatactcctcgagaagagcaactccaagacacgtcattgtcagattcactaatcttcacataaaaactacatag

SEQ ID NO: 132089 - DNA, 900 bp, Homo sapiens
atggggaatggccctaaagcaaaaagtactgctacaggctcatgcagaattgaacttatggctgttgaggccaacccacctcaaagaggcaaaaactgtcacagcagcaagatccagaggccttcatccgacccgggtgggatgaagagaagaattctcagcactgacccacagaaggaggcgggaggctgtggtgagatgaacagactagcgcccactctggctagctctcaagccaaacaaggacatccagtttcagttccaacacgtaaaaagcttggagttgtcactcccatccttatgataagaaaaaagctgaacaaacagaaactcagcaacctttcttggacccctcagagagctgaggttgcagaacaaactgccactgggaaatctgaagagatgggaatgcacaggctagagacatccatgggtgcaaaccgtaaccaaggagagaaggctgctgcaatctcagggataaaaacgaagacacaagggctcatggaaaaaaaagacaaagacagaaggagccgaggagggagttgccaagactcaagatcacatcgcaagcagaggaaaaaggatgcaaacaaagagatagcagatatttgggctcatccagggatgcctgctagccagggaggcaccacagaaaagcagtatgagaaggagctctcacatactggtccagggatggctgaacagattaagtttgacagtgtggaggtgtgtgtctgctgtgagctgcagcaccagtcgtccggctgcagcaacctcggggagacgctgaagctgaacccgctgcaggagaactgcaacgctgtgaggctgaccttgaaggtgaccccgctgggcgctgcttgtgcatgcatttcattccatgccttacagacagtttag

SEQ ID NO: 132090 - DNA, 373 bp, Homo sapiens
ttctcaccagtcaccgggagggtagaggatcaccaactgtcttcggaaagtttggaaagttttcttagtcattacgccaagtcagctggagctttatgtaacggggacaagcagaggtatgatggcattggaacggctgctcctcttttcggcagcagctctcacccgtcccctcctaactgccagggcagtgaccggccctacatcccctttgtgccctgtctgggctgggcctcgaccacggacatggttgggggcatgggctctgcaccgaggctgctccaggcattcacgtcacaaggcaagctgagcacatccacctgtgctttctgggagctctgcgtctgcatagaaagcaatgggcttcccaaag

SEQ ID NO: 132091 - DNA, 1020 bp, Homo sapiens
tttcctctttctccctcattcttatctttcctctttctctttccctttaaatccttccctccgtcttcacccaccttcacctctgtctttgtgaaatctaaatctgctttactctaagcgtttcaataattcaggctccacagtccctcaggtgcccccagccctgctcctatactcccgtggtttcccaacagatctgcctgctgcggctgtgctccgctggcctctggggctcccgctccctgggagtcagctgggcatcatgttcctgcaccttttcagaagatgacaaagtgcaggcttgcaagggtgaatgtggctgctagagaggattcacctaaaattcgaagccaatccgagggaggagctcaacgagccctgggtctaggcccatgcagtgtgtccgaagttctgatgagctcttccggaaggtgggccataggccacgatgcccatctcacttggggttgccctcctgcatggcaaccctggcatcttacttcctcttcctcagcccctttgtgccctgtctgggctgggcctcgaccacggacatggttgggggcatgggctctgcactgaggctgctccaggtagagtccagctcacactctctggctacgggagttcatgcctctgcgccttcatctcttcaactgtcaaagggaataataatacctacgtcatggggtcctttgacatctacagagcttaaaacagtgtctgacaagcacttcataaacgttaggtattggtacgtgacccaagtcagcctgcccaacctttctctgtctccttttcccctcagaaacacagggatgagaaactctatttccttcctaagggagtttctgggggatcagagctgagaggcaggccccagccctaccttccctgccccgtctcacctactctttgcccatgggggcacttgtctctggccccaccttctgtccccccaactgcctgtgagtcctcttcggagctctggcccagcctgagctggacatgggcggagag

SEQ ID NO: 132092 - DNA, 1776 bp, Homo sapiens
atggcagtgcgggtgacggccgctcatacggcagaagcccaggccgaagccgggcgggaagcgggcgagggtgcagttgcggcggtggcggcggccttggcccccagcggcttcctcggcctcccggcgcccttcagcgaggaaggtaaccgggccgacccggagggtgcggccggggtgcgggcagttcatcccgggctggcagaggcccggatggcccgagctgcgggctcgaccgaccctcccagacccagacacctcgcggatctcgcgggaccctcacagccctccacgaaacccccaggaaagggctgggagcttggagccctggtcccagcactcatcctggctcagcgcgtagcctccctgggggccgccggagatggatggatgggcgtgtggaccagccgcgtgtgcggctgcgcacagctcctgggttccaccaagaagatcaatgtcaacttccaggacccggatggcttctcggctctgcaccatgcggccctgaacggcaacacggaattgatcagcctgctgctggaggcccaggccgctgtggacatcaaggacaacaaaggcaagactagccgagggcctctgggccggaaggagcccatgaagctggtgctgaaggcgggctcggccgtgaacatcccgtctgatgagggccacatccccctgcacctggcggcccagcatggtcactatgatgtgtctgagatgctgctacagcaccagtctaacccgtgcatggtggacaactcggggaagacgcccctggacctggcctgcgagttcggccgcgttggggtggtccagctgctcctcagcagcaatatgtgtgcggcgctgctggagccccggccgggagacgccaccgaccccaacggcaccagccctttgcacctcgcagctaaaaacggccacatcgacatcatcaggctcctcctccaagccggcatcgacattaaccgccagaccaagtccggcacggccctgcacgaggctgcgctctgcggaaagacagaggtggtgcggctgctgctggatagcgggatcaatgcccacgtgaggaacacctacagccagacagccctggacatcgtgcaccagttcaccacgtcccaggccagcagggagatcaagcagctgttgcgaggtgggcccaagccaggcaaaaggggcagtggctggggctggggctgggccagattcacccgcacgaatttggggggcccccttcctgattcccccaaagcccttaacgggcccttgcaggtccgggcgaccaaggattattgcaacatttacgacctgaccagcctcaacgtgaaggggggggacatcatcacagtcctcgagcagcatccggatggccggtggaagggctgcatccatgacaaccggacgggcaatgaccgggtgggctacttcccgtcctccctgggcgaggccattgtcaagcgagcaggcaagttccaccccaccctggggggcaggcaggagcccctgggcttgggggctggaagcagcgagtgtgctgaggccggcatcgacattaaccgccagaccaagtccggcacggccctgcacgaggctgcgctctgcggaaagacagaggtggtgcggctgctgctggatgtgagtgtggggcccaggggcgctgggcccagtggactcgactcggcggcggaaaagagcactggcagcatcctggacgacatcggcagcatgttagacgacctggcagaccagctggatgccatgttggagtga

SEQ ID NO: 132093 - DNA, 1893 bp, Homo sapiens
gaagtatgtgatctttcagtcactcttaaagatgcctgtagatctcgaagtccctcacccccaccattatcacctatagaaactgaaggatttgaaaaattgaaagacgtcatctcagagatttcagccttagaaaataacaaacttgaagcaaacattaaccagcctccatctctcacaccagcagaaatcagcagcaataagagtgatcatcaagataaaatacttaaaactaaaaaatccagtaactcttattctttactctcaaatgacagcaataattctactacaaatcatgaaaaaggtgaaactgctgtaatttttcaagatttaatggatcgcattaatgaaaaactaaaatcaatagaaaccacggatatgacaagccttgtaaaattatctagcagtgattataatacatataatgatttaaaattgggagatttcataacatctctcttgcataatgcaaaagccagtgattatagttttatggaattattgagtcaacatgataaaaaggtagaaaataaaattattcagacaagatttcgaaagcgtcaagaaactttatttgcaatgcgcaactcctctgattcacccatgtttagaaggcagtctttacagataaaaagagaacttgctagtcttgatgaaaattttacaagaaaaaaatacaccgaaaaaagttcaaggaaattgacacaaaacaatgagatatcttcatcagacaaaggagaattctatcatgagcaagggcctaattgggatggagtgttagatctctctacaaagaaaaccagcataaaatctgaagagtcatccatatgtgatccttcttctgaaaattcagtggctgggagactacacagaaacagagaggactatgtggaaagaagtgctgagtttgcagatggtttgctctcaaaagctttgaaagacattcagtctggagcactggacataaataaagcaggcatactttatggcatacctcaaaaaactttacttcttcacttagaagccttaccagcagggaagcctgcatcttttaaaaacaaaactcgagatttccatgatagttattcatataaggacagtaaagaaacttgtgcagtgctgcaaaaagtagccttgtgggcaagagctcaagcagagcgcacagaaaaaagtaaactcaatctacttgaaacctcagaaataaaattcccaacagcttccacttacctccatcagctaactctacagaaaatggtcactcagtttaaagaaaaaaatgaaagcctccaatatgaaacttcaaatcttactgtccagttaaaaattcctcagctccgagtaagttctgtctcaaaatcacaacctgatggttctggtctgttggatgttatgtatcaagtttccaaaacctcttcagtcctagaaggatcagctctccaaaaactgaaaaatatactccctaaacagaacaaaatagaatgttctgggcctgtaactcactcaagtgttgactcttactttctacatggggacctctctcctttgtgtcttaattctaaaaatggaacagttgatggaacctctgaaaatactgaagatggaatagatcgaaaagacagtaagcagcccaggaaaaaacgtggccgctatcggcaatatgatcatgaaataatggaagaagctattgcaatggtaatgagcggaaaaatgagtgtttccaaagcacaaggaatttatggggtacctcacagcactttagaatacaaggtaaaagaaagatctggaacactgaagactcctccgaagaagaaactacgattaccagacactgggttatataatatgacagattcagggactggcagctgcaaaaacagcagcaagcctgtgtag

SEQ ID NO: 132094 - DNA, 759 bp, Homo sapiens
atgatcagagggcaagagggcaagaggactgagctctggtgcactctgatatttgaagttcagaaagagggagttacagctgccggccagcaaggtgggaggaaacctgggagcagagaggagaaactgttgctggagggagtaggaacggggccagatgctgctgggcggccaagaaacggcactgcccagtctgcagacctccgcatccgcaggcagcactcctcagacagcgtctccagcatcaacagtgccaccagccactccagcgtgggcagcaacatagagagtgactcaaagaagaagaagcggaagaactggttacgcagctccttcaagcaagctttcgggaagaagaagtccccaaaatctgcgtcctctcattcagatattgaggagatgacggattcttctttgccttcctcaccaaagttaccgcacaatgggtccacaggttccaccccactgctgaggaattctcactccaactctctttctgacaaagggagtcaaggagtcgtccttggaggaggcgatgaggccagtggaagaattgtggctggggacccctccactgctgagggagatgtcgatggactcacagctggtgtggaggctgctgacagactgaaagcccaggccatccttgctaactgcggaggagctgctggcgttggtgccccagacacacagaaatgctattctatgtcatctcccctgctcgtggccaaaaatgtgccatcagactacaaggaatga

SEQ ID NO: 132095 - DNA, 841 bp, Homo sapiens
aggctattcgacatttgggattcctaagctaatctttttatttttggaagggtgtctttctgagaaaggcagccagaggcacagcaccaacctttctgacagtgtggtcttcacactgttagttctgacaaagggagtcaaggagtcgtccttggaggaggcgatgaggccagtggaagaattgtggctggggacccctccactgctgagggagatgtcgatggactcacagctggtgtggaggctgctgacagactgaaagcccaggccatccttgctaactgcggaggagctgctggcgttggtgccccagggccaagacagccccggcctcttaccagttcctggggtcttcagtgcgcctgccggggctgaagccttcgtccttggcatggtgatgcccacctgaagctgtcatgcctcgccgccatgagcctgtctgggagatgacaggattcttcttgcccgacgtgcttttgtcggactcgtcagacacatcagaaggattccgcctccacttggaaacctgggctccatttttatgccgctgtctgagcctccgtctgatttcttgacatcatcaccagaccacagggaattcctctccacctgtgagtgcttctcagcatcagtctgtggacagagactctctgaattagtccttccccagtcccaggctgggaatccttctcactccaaaggcaaaaatgccaaaacactggagtagttaagggaaaaataagcattactttaaagatgtttggacttttgtactctggttatcttgttagaaagagtgatttttttttttttggaaaaaaaaataaaaaagtaaataata

SEQ ID NO: 132096 - DNA, 2006 bp, Homo sapiens
ccggcctgacctctcgatccttcagcacttcagaggttaattttgttgggggatcggatttctttcctggcctggggaatggtgatccctgctagctagtcctttagttacagagttgctgggtgcctgggattccctggcccagtgtgggctggctcagctggctaaaggacttgccatcctgtgagattcattcagcttctttgtccgctgttctccaagggccgcaatgtagagaaatgctctggcctaggaaccttacaagctgggacgacagcagctccgtcagcagcggcatcagcgacaccatagacaacctcagcactgatgacatcaacaccagcttctccatcagctcttatgccaacacacctgcctcctctcgaaaaaacctggatgtgcagactgatgctgagaagcactcacaggtggagaggaattccctgtggtctggtgatgatgtcaagaaatcagacggaggctcagacagcggcatataaatggagccaggttccaagtggaggcggaatccttctgatgtgtctgacgattccgacaaaagcacgtcgggcaagaagaatcctgtcatctcccagacaggctcatggcggcgaggcatgacagctcaggtgggcatcaccatgccaaggacgaagccttcagccccggcaggcgcactgaagaccccaggaactggaaaaacagacgacgcaaaggtgtctgagaaaggaaggctttctcctaaagcctcccaggtgaagcgctccccatcagatgcaggccggagcagtggtgacgaatccaaaaagcccctccccagcagttcttaggacaacttacttgcccaatgccaacagcttttgggttcaaagaagcaggagtggttccgccgcccggcctggccatgatcaacagccaagcggggtgacttgtcaccagcaggtcagccacactgggcaaaatcccaaaagtcatctgcactcgtcagtcggtctgctggtcggaagtcaagtatggatggggctcagaatcaggatgacgggtatctagccctaagctcccggacaaaccttcagtaccggagtttgccgaggcccagtaagtccaacagccggaacggggctgggaacaggtctagcaccagcagcatagattccaacattagcagcaagtccgcaggcctgccagtgcccaaactgagggagccttccaaaacagccctaggcagctctctaccaggtctggtcaaccaaccagacaaggagaaaggcatctcatcagacaacgagagtgtggcttcctgtaactcggtgaaagtgaatccggcagcccagcctgtgtccagtccggctcagaccagtctccagcctggagccaagtacccagatgtggcctctcccacactccgcaggctaatcttgctgatctctctcttaggaaaaacagacgacgcaaaggtgtctgagaaaggaaggctttctcctaaagcctcccaggtgaagcgctccccatcagatgcaggccggagcagtggtgacgaatccaaaaagcccctccccagcagctctaggacacctactgccaatgccaacagctttgggttcaagaagcagagtggttccgccgccggcctggccatgatcacagccagcggggtgactgtcaccagcagcagagagattgatcaagtagagaatttctgtgtggtggtaaaacatactaccaagcttcatgcgtcttttggaaaatgcattctcccgaacacttctgatgcactgaaacacacctgccaatcatcatctgtgggctgctccttcaagcaagctttcgggaagaagaagtccccaaaatctgcgtcctctcattcagatattgaggagatgacggattcttctttgccttcctcaccaaagttaccgcacaatgggtccacaggttccaccccactgctgaggaattctcactccaactctcttcccatcgtgttcaaccatcacttcctgtag

SEQ ID NO: 132097 - DNA, 490 bp, Homo sapiens
gcggccgcactgagagctttacgcccggaggcgtcggcgctgccactggcccgcgacgggaacggggcgaaaaggcggcggcaccatgttctccctcaagccgcccaaacccaccttcaggtcctacctcctgccaccgccccaggagaaattgtcgtaaatgaagtcaattttgtgagaaaatgcattgcaacagacacaagccagtacgatttgtggggaaagctgatatgcagtaacttcaaaatctcctttattacagatgacccaatgccattacagaaattccattacagaaaccttcttcttggtgaacacgatgtccctttaacatgtattgagcaaattgtcacagtaaacgaccacaagaggaagcagaaagtcctaggccccaaccagaaactgaaatttaatccaacagagttaattatttattgtaaagatttcagaattgtcagatttcgctttgatgaatcaggtcccgaaagtg

SEQ ID NO: 132098 - DNA, 775 bp, Homo sapiens
atgggccccggcgcccgcgtcggcctggctgtgcccggcccctccccgctcgggcgggcgctgcgccgtatccccgcccaaagggcctgggcggccgcactgagagctttacgcccggaggcgtcggcgctgccactggcccgcgacgggaacggggcgaaaaggcggcggcaccatgttctccctcaagccgcccaaacccaccttcaggtcctacctcctgccaccgccccagactgacgataagatcaattcggaaccgaagattaaaaaactggagccagtccttttgccaggagaaattgtcgtaaatgaagtcaattttgtgagaaaatgcattgcaacagacacaagccagtacgatttgtggggaaagctgatatgcagtaacttcaaaatctcctttattacagatgacccaatgccattacagaaattccattacagaaaccttcttcttggtgaacacgatgtccctttaacatgtattgagcaaattgtcacagtaaacgaccacaagaggaagcagaaagtcctaggccccaaccagaaactgaaatttaatccaacagagttaattatttattgtaaagatttcagaattgtcagatttcgctttgatgaatcaggtcccgaaagtgctaaaaaggtatgccttgcaatagctcattattcccagccaacagacctccagctactctttgcatttgaatatgttgggaaaaaataccacaattcagcaaacaaaattaatggaattccctcaggagatgga

SEQ ID NO: 132099 - DNA, 451 bp, Homo sapiens
cggccgcgccgagcggggatgctggcacgtgtgttctgtgtcctcaacaaccttctgtgagcctagggacccatttctcctcctttgacagggacatcagtggagccttctcagacccacaggggtccttggtgaattttgtcatggttatttaaggaaccttgcctagaagtcccaacttgcagttccccatcgacgggaaggcttggactccaagatgattataaaggaatatcggattcctctgccaatgaccgtggaggagtaccgcatcgcccagctgtacatgatacagaagaagagccgtaacgagacatatggcgaaggcagcggcgtggagatcctggagaaccggccgtacacagatggcccaggcggctctgggcagtacacacacaaggtgtatcatgtgggcatgcacattcccagctggttccgctccatcctgccc

SEQ ID NO: 132100 - DNA, 207 bp, Homo sapiens; identical to SEQ ID NO: 128794

SEQ ID NO: 132101 - DNA, 681 bp, Homo sapiens; identical to SEQ ID NO: 118599

SEQ ID NO: 132102 - DNA, 1445 bp, Homo sapiens
aatacagtccttggtgtaaactgtttagagagttatgcaaaataaatgtgtttgacacttgattcaccactcttgagcggcaaggagtttaatgacactacacataatacctttgaccatatgtggagaaccaaggaacataatgaagctggttggttgctcctaagttcagtggacaaagtgatgaaagaaaatgatgaactcagggattctaactcctggcttcagaagcaggtattaacccctcaaatctgctaagactgccctaagtgggagtcttaactcctgtagagaaaaagctgaaattgtggaaaaacagacacaatctcttaccatgtgagtggctgacctgcaacgaaagatattatagtgggaaccacagtcattcaactacaaaatttaaatacaatggtaataattggatcctgaggtggcatgggccaagtggtggcactcaagcatcaaggcaaggagacctctggccttttaccagggtaactgtgcactggggaaagggaaataatcagacatttcagggacaactggacactggctctgagctgacgttgattccaggggacccaaaacgtcattatggtcctccagttaaagtaggggcttacggagaatgcacaattggcatagacgtacttagcacctggcagaacactcaaattggcatcctgactggtagagtgagggctattatgttggcaaaggccaagtggaaagcattagagctgcctctacctagaaaaatagtaaatccaaaacaatatcacatccctggggggaccgcagagattagtgccaccatcaaggacttgaaagacgcaggggcagtgattcccaccacatctctgttcagctatcccatttggccagtgcagaagacagatggatcttggagaatgtcagtggattatcataagcttaaccaagtagtgactctaattacagatgctgtaccagatgtggtttcattgcttgagcaaattaacacatctgctggtacctggtatgcagtcattgatttggcaaatgcctttttctccatttatgtctataaagcccaccaggagcaatttgccttcagctggcaaggccaaaaatatacctttattgtcctacctcaggggtatatcaactctctgtctttgcatcctaattttattcaaagagaccttgatcactttttgcttccacaagatatcccactggtccattatattgatgacattatgctgattggatccatgacccaaaaggctgccagctttgagtggggtccagaacagcagaagaccctgcaaaaggcccaggctgctgtgcacgctgctctgccacttgggccatatgacccagcagatccaatggtgtttgaggtgtcactggcagataaggatgctgtttggagcctttggcaggcccccatatttgaataa

SEQ ID NO: 132103 - DNA, 1746 bp, Homo sapiens
tcatcttctaacttctcccctaatcccggttccggttcgggtgtttcttccgggttcgcgaatgttgatgttattaccatccttgagtttgaactcaggggcaatggatcgcagcgtgtctcgagcttcttccagatcgatgatttgctcagtgatagccttcgtgactgactcaacgttattcttcgtgatctctgattcctctttcttactaggaacagacaaaggctcaaactcgatcgaccactcctcctcatcaacaatgaacggcaacaagaactcaagaagtggcctgtaatcttcctcgcgcttgcgatcgactagcttatagaaagtctcaagcgctgtgttttggctcgctgatacgccgcctacgttcttattcttgatgataatctcatgaatcccggatagggagacaatgcggtccatcttgcttgataagaactcaggaactccgctgatatcagagttgagaacgtcatattcctcagtctcagcatcgataccgatcgcacgacctacgccggagttatcatcaacctgagcaagtcgcaggcgcgcggcatactgagcatcatcatcatcacacatttcggcaagacctttgaccttccatacagcctgttgcttacgtcgcaagatctgagtggccagagattcacagtaatcatagtcacagattgcatcaatcagtgatttgttcaataccgacgctccccatccttgattctgtttgcgaatctgaggggttactcgctcaccatcagcaataaaaattcgcttaaccatcccggcgagtcgcttcattctctcgataggatcatcaatggtcagcaattctatgttcgccgcatccatgaagttatcgacgatatcatcatgcggatgggtgtcatcgtaagtaaaggcgctgtgctcagcgataatttcagcaagcatagggtgctcttctggcagaaccacacgcccggctttaataactggctgagcatccatagctcgggtaactttatctttgttacgctgcaatggagtgatggatatcggagtctttttccttaggttctggattaagcccgtaccgctcgccttatcgcgaatgccgtcgataaagtaaaccttatcattcttcttgccccacaaacaaaataccgtgtagtcgtttagctcgcctgtcttctgagcggtatcggcagtgatgaatcggtaatcatatttaccaggatctggctcatcagcgtcaaggctgttgccgtaataagtccaccactctgagttaaacacggagccacccagcgcgatcggcttctgctgatactgagaatcaaaggtatactgatctgcttctcgtaaagctagcaggtcgtgcacactttccttgctgggccaaaaggaataatgcttaacaccgtccaattcaacatactcagacgacaaaacgtctcgctcaaagtaaggctgcaaccagtcaggaagcgtctttccgtattcttcagtaacaagcgccgggattgatatttggtcgaactcgatacccatgccgccattcatcatgaaccatgttgaatcctgagcatgtagtcgttgctgaattgcaataataggcgtctcgttatgcatacgacgggatcgaatggtgtttttcaatagcatgtgcgtacgctcacgcttaacctttgagaacatatcatcaggcttgtcgatatcgtcgagcattaccatgccggagaatcccggagtcat

SEQ ID NO: 132104 - DNA, 1097 bp, Homo sapiens
ataaggcgagcggtacgggcttaatccagaacctaaggaaaaagactccgatatccatcactccattgcagcgtaacaaagataaagttacccgagctatggatgctcagccagttattaaagccgggcgtgtggttctgccagaagagcaccctatgcttgctgaaattatcgctgagcacagcgcctttacttacgatgacacccatccgcatgatgatatcgtcgataacttcatggatgcggcgaacatagaattgctgaccattgatgatcctatcgagagaatgaagcgactcgccgggatggttaagcgaatttttattgctgatggtgagcgagtaacccctcagattcgcaaacagaatcaaggatggggagcgtcggtattgaacaaatcactgattgatgcaatctgtgactatgattactgtgaatctctggccactcagatcttgcgacgtaagcaacaggctgtatggaaggtcaaaggtcttgccgaaatgtgtgatgatgatgatgctcagtatgccgcgcgcctgcgacttgctcaggttgatgataactccggcgtaggtcgtgcgatcggtatcgatgctgagactgaggaatatgacgttctcaactctgatatcagcggagttcctgagttcttatcaagcaagatggaccgcattgtctccctatccgggattcatgagattatcatcaagaataagaacgtaggcggcgtatcagcgagccaaaacacagcgcttgagactttctataagctagtcgatcgcaagcgcgaggaagattacaggccacttcttgagttcttgttgccgttcattgttgatgaggaggagtggtcgatcgagtttgagcctttgtctgttcctagtaagaaagaggaatcagagatcacgaagaataacgttgagtcagtcacgaaggctatcactgagcaaatcatcgatctggaagaagctcgagacacgctgcgatccattgcccctgagttcaaactcaaggatggtaataacatcaacattcgcgaacccggaagaaacacccgaaccggaaccgggattaggggagaagttagaagatga

SEQ ID NO: 132105 - DNA, 1503 bp, Homo sapiens
atgtgcgaactcgatattttacacgactctctttaccaattctgccccgaattacacttaaaacgactcaacagcttaacgttggcttgccacgcattacttgactgtaaaactctcactcttaccgaacttggccgtaacctgccaaccaaagcgagaacaaaacataacatcaaacgaatcgaccgattgttaggtaatcgtcacctacacaaagagcgactcgctgtataccgttggcatgctagctttatctgttcgggcaatacgatgcccattgtacttgttgactggtctgatattcgtgagcaaaaacgacttatggtattgcgagcttcagtcgcactacacggtcgttctgttactctttatgagaaagcgttcccgctttcagagcaatgttcaaagaaagctcatgaccaatttctagccgaccttgcgagcattctaccgagtaacaccacaccgctcattgtcagtgatgctggctttaaagtgccatgcttgggtgacgttctttgctggtccagactatacgggggggctgggtttgtggcaatcataaaagacaacagaatgctaaccagccccgttaaacctggagctaaacttgagggcgtgcgtgtttacgatcgatttgcaatcaccgttgaaaagagagtaaccaatgctcgatcgcctcgctatggtgagcctgagggggacaatgtatctcctggcgattatcttcaaccttacttaatccaccacacaagaatttttattgctgatggtgagcgagtaacccctcagattcacaaacagaatcaaggatggggagcgtcagtattgaacaaatcactgattgatgcaatctgtgactatgattactgtgaatctctggccactcagatcttgctacgtaagcaacaggctgtatggaaggttgatgataactccggcgtaagtcgtgcgatcggtatcgatgctgagactgaggaatatgacgttctcatctctgatatcagcggagttcctgagttcttatcaagcaagatggaccgcattgtctccctatccgggattcatgagattatcatcaagaataagaacgtaggcggcgtatcagcgagccaaaacacagcgcttgagactttctataagctagtcgatcgcaagcgcgagaaagattacaggccacttcttgagttcttgttgccgttcattgttgatgagaaggagtggtcgatcgagtttgagcctttgtctgttcctagtaagaaagaggaatcagagatcacgaagaataacgttgagtcagtcacgaaggctatcactgagcaaatcatcgatctggaagaagctcgagacacgctgcgatccattgcccctgagttcaaactcaaggatggtaataacatcaacattcgcgaaccggaagaaacaaccgaaccggaaccgggattaggggagaagttagaagatgataatcctcgcgttcgcatcacagtggacgtatcgtga

SEQ ID NO: 132106 - DNA, 6217 bp, Homo sapiens
atggaggacaatctaatctcaatcaacaaaatcaagatcctgttagctgtatctgatggtgaaattgacgaaacattcagcctaaagcagttgatgtttaactcagtcccggtgcaaaacgaggatggatcgttcaacttcgaaggggtaaaggctgaattcaggccgggaactcagacgcaggaatacatcaagggaatggaagatagctctagtgaggtaactgtaaatcgtgaggttactaccgataacccatacacgatctcagtaaccaacaaaacgctgtcggcaatccgtatcaaaatgttcatgcctcgcggcgtacgaattgaaagtaacggtgataaaaatggcgttcgagttgagtacgaggtgcagcaagcggttgatggcggttcgtttgagactgttcttactgacgtaatcgaaggtaaaacaatgtcaggttatgatcgaagccgtcgcgtaaacctgcctaacttcaacaatcaggtaatattcagagttgttcgaaagacgcctgattccaatgactcgaatgtcgttgatgcaatccaggtaagaagctatgctgaggtcattgatgccaagttccgatatcctctgactggtcttcttttcgtagagttcgattcgaagatgttccccaaccagttacctacgatctcaattcgtaagcgctggaagattgtaaacgttccgtcgaactacgatccagaatcgcgaacatacaacggcaattgggatggcactttcaaaaaagcatggactaataatccggcatgggttctttatgacctgatgattaatcagcgttatggtctggatcagaaagagcttggaatctccgtagacaaatgggcgctctatgaggcggcgcaatattgcgaccagatggtccctgacggcaaaggcggcacggaacctcgctacctttgtgacgtgataatccagtctcagactgatgcgtacaaggtggttcgagatatttgctcaatcttccgtggaatgagtttttggaatggtgaaagcatttctgtaatcatcgacaggccgcgtgaacctgcgtacatcttcactaacgacaacgtagttaatggtgacttctcatatactttcgcaagcgagaagagcatgtacacgacgtgcaacgtgatgtttgatgatgagcaaaacatgtatcaacaggacgttgagccagtattcgatcgtgaggccactctacggttcgggaacaacgtaacgagcattacagcgatcgggtgcacacgtcgaagcgaggccaaccgacgcgggagatggattctgaaaaccaacctccgcagcactacggtaaacttcgctaccggactggaagggatgattccgacaatcggagacgtggtggcaatatctgataacttctggtcaagtaacttgacgatgaacctgtcagggcgattgctcgaagtgtcaggtagtcagattttcctgccgttccgcgttgatgcgcgcgcaggtgactttattatcgtaaataagccagatggcaagcccgtgaagcgcacaatctcaagtgttagtgcggatggtaagaccatagagattaacatcggctttggctttcctgtgaagcctaacacggtattcgcaatcgaccgcaccgaccttgcgttgcagcagtacgtagttacaaaaatcgacaagggcgatgatgatgaggaatttacctacaaaatcacggcggtggagtacgatcctaataagtacgatgaaattgattacggggttaacatcgacgaccgaccgacaagcatcgttgagccagatcagatccctaagcctgaaaacgtgaaagtgtcctcagagtcgagaatcgtccaggggatgagcgtagaaacgatgattgttagctgggataaagtgccgtacgcagttttctatgacgtacagtggagaaaggataacggcaactggcaaaacgttccgcagacagcaaacaaagaggtttatgttgaagggatttacgctggcaactatcaggttcgcgtgcgctccgtcgctggttcgggcacgacttcaggctggtcaaatatcgtcgcggcaacgttgacgggtaaacagggtgaaccgggccgaccgattaacctcacagctacggatgatgttgtttttggtatccgtacaaaatgggggttctctgatggttctggagatacagcctatacagagttgcaacagtcaccggatggaacagtggataacgcaagtttgctttcattgattccgtatccgcagcatgagtattatcactcaccgatgccggggaggacggttgacaggatcggtaacgtatctcagtggactgattttgtcagaggcatggcatcaacaaacgttgacgatatcatcggcgagatttctgtcgatatcgaaaactcgccgggttacgagtggcttgttgataacgcaaccgacaacgcgtcgcagaacgcagctaatgcagaggcagcaattgagaacgcactagctaatgacaaagacgcgatctacatgaagaaggagaacggaaaacgaaaagcagagtacaccaaatcactgaagctaattgctgatgagactgaggcgcgagtaacagcagttgagcagttagggcaagttttgattagcgcaagcaatagcgaattgcgtgaagttatcgcaactgaaaccggagcgctatcgcgtgaaattgaccaactcaaggcagagattggtgatgatattcaggcaagtttgactgatatcagagaggctatagcaaacgagactgaggcgagaacgcaagctgacttgtcattaagccgaggcttgggaataatgaggcagcactttctcaaaaacttgattcgtggagcaatgcggattcgactggtgcaattccagggtggtaatttcaaagagctatacaagaaaaaattcggcactgtactagcgaaaaaccgcgcgatgacgccagaacaactattcgatctgtcggtgaagtatttcgaatgggccgaggacaacgcgataaaggcgtcagaatcagccagctttcagggtggcgtttatgaatcgcttgttcataagccgcgcgtcttcacctggaccggataccgactatttatcggtgcaagcgaggccgcaatcattaagtggaagcgtgaggaagaatacagtgaggttatggagttcgtggaatccgtaatcaacgagcaaaaatttcagcttgccgcaaacggcgttattaacgcctcatttatcggcaaggatctcggaatcgacaagccagcttcaataaacatcgaaaactcggcagcttcagcgtcgaccgctgtcgccactactgaggaagcaatgaaagaggctaagttggcgatcaagaaaatgagcgaggccaatttcgaaaaaatgattcggatctggtttcagcttatgcaggctcagcagttccagcctaactggcatcacctttacctatgtcacgaagtggaggaaattattgcaggccgacgcggtaacactatctttaacgtcacgccaggctccggtaaaactgaagtgttctcaattcaccttccggtgtacgcaatgctcaagtgtaaaaaggtgcgaaaccttaacgtatcgtttgccgacagcttagttaagcgcaacagtaagcgcgtccgtgagattatcagcagcaacgaatttcaagagctatggccctgcaaatttggcacatcgaaagacgaagagatgcaggttcttaacgaagacggaaaggtttggtttgagctaatctccgcagcggctggtggtcgtattactggttcgcgtggtggctacatgactccgggattctccggcatggtaatgctcgacgatatcgacaagcctgatgatatgttctcaaaggttaagcgtgagcgtacgcacatgctattgaaaaacaccattcgatcccgtcgtatgcataacgagacgcctattattgcaattcagcaacgactacatgctcaggattcaacatggttcatgatgaatggcggcatgggtatcgagttcgaccaaatatcaatcccggcgcttgttactgaagaatacggaaagacgcttcctgactggttgcagccttactttgagcgagacgttttgtcgtctgagtatgttgaattggacggtgttaagcattattccttttggcccagcaaggaaagtgtgcacgacctgctagctttacgagaagcagatcagtatacctttgattctcagtatcagcagaagccgatcgcgctgggtggctccgtgtttaactcagagtggtggacttattacggcaacagccttgacgctgatgagccagatcctggtaaatatgattaccgattcatcactgccgataccgctcagaagacaggcgagctaaacgactacacggtattttgtttgtggggcaagaagaatgataaggtttactttatcgacggcattcgcggtaagtgggaagcgccggatatggagaggcaatttacagctttcgtcaatcaggcatggaggcacaataaatcaatgggggtacttcgtaaaatctatgtggaagataaggcgagcggtacgggcttaatccagaacctaaggaaaaagactccgatatccatcactccattgcagcgtaacaaagataaagttacccgagctatggatgctcagccagttattaaagccgggcgtgtggttctgccagaagagcaccctatgcttgctgaaattatcgctgagcacagcgcctttacttacgatgacacccatccgcatgatgatatcgtcgataacttcatggatgcggcgaacatagaattgctgaccattgatgatcctatcgagagaatgaagcgactcgccgggatgggctgtcaattgacggccctttttattggaggaaacatgaaaattgttaagcatgatggatataacgatatttttaacggcggtgcagacggatcgcctaagccattctttatgtctgatgcatcatatcacgtcggatctttctacaacgacaacgcaaccgcgaagcgaattgtggatgttatcccggaagagatggtgacggctggatttaaaatgtcaggcgtcaaggatgaaaaagagttcaagtctctgtgggatagttacaaaattgattctagcttggttgacgttctttgctggtcgagactatacggtggggctgctattgtggcaatcatcaaagacaacagaatgctaaccagccccgttaaacctggagctaaacttgagggcgtgcgtgtttacgatcgatttgcaatcaccgttgaaaagagagtaaccaatgctcgatcgcctcgctatggtgagcctgagatatacaatgtatctgcctggcgataatcttcaaccttacttaatccaccacacaagaatttttattgctgatggtgagcgagtaacccctcagattcgcaaacagaatcaaggatggggagcgtcggtattgaacaaatcactgattgatgcaatctgtgactatgattactgtgaatctctggccactcagatcttgcgacgtaagcaacaggctgtatggaaggtcaaaggtcttgccgaaatgtgtgatgatgatgatgctcagtatgccgcgcgcctgcgacttgctcaggttgatgataactccggcgtaggtcgtgcgatcggtatcgatgctgagactgaggaatatgacgttctcaactctgatatcagcggagttcctgagttcttatcaagcaagatggaccgcattgtctccctatccgggattcatgagattatcatcaagaataagaacgtaagccgcgtatcaagggagccaaaaccacagccgctggagactttctataagctagtcgatcgcaagcgcgaggaagattacaggccacttcttgagttcttgttgccgttcattgttgatgaggaggagtggtcgatcgagtttgagcctttgtctgttcctagtaagaaagaggaatcagagatcacgaagaataacgttgagtcagtcacgaaggctatcactgagcaaatcatcgatctggaagaagctcgagacacgctgcgatccattgcccctgagttcaaactcaaggatggtaataacatcaacattcgcgaaccggaagaaacaaccgaaccggaaccgggattaggggagaagttagaagatgaaaattaa

SEQ ID NO: 132107 - DNA, 2007 bp, Homo sapiens
tcatgaataacagacactcttgtcgctctggaaattccgaggatttagagggtacttcccaggaaccagcacgcctttagtgcctgcgccgtcaatatcctcaagctctgcgatagagtcgatttcgataccggagttctgagacttgaaatagtccagataagacatggtagtctcaggcatacgaatcgccagcaccttacgcatggacggcgggatcagaatgttggtagctcggtgctggcctcgagtaatcgtctcgatggtttcgatcgcctgagtcaattccgcttcagccgtttccggtttctgagttgcgccatccatccacttaccggaggttatttttttgatgtttggatgattgtacacgggcacaatcttgtgcggcgcggaacctttgaacaccaggcggttaacaagctgatcatgcgccaactggcacgcacttgccttacgggttgacagtgggcgaccagttgcctgacctgctttgatttcgtcgattgagatcagatacgcgttacccagacggaacaccttgccaaactcagaagtacccagggcatcaacaagcggcaggtcatcggtgtagtcagcgataatctgagccgtaccaaccttatcaaaggtcatatattcaaacgtcttgtcggtcggagatagatcggttgtaaccgggaatacgcgtagagcggagcctaccgggtagtcttcttcataggactggcttttgatgcggtgtagttccttagcggtccagatacccatcgttgcggctgcatcctgttttacgccagcctctggcgttggcactgcttctacgctataagcaatggtcgccgtcgtcttgctggcatcgttagccgtccaggtaatattgaaatcaccgactgactctccaccaacaggagttacaagacctgagtccggatcgacagtggcgatattggtagcgtcgattgaccatttgccagtcttatcagttgcattagccggaagagcattagcgcgaagcattgagtgagagtatttccccccggcggcgaaatcaggctccatcgcctggcgcgcaaggtttaattcacgcatagcattacggctaacagagagaacaacgttgtcctccttcatgatgttgtgcacgagtctgtaatatttgctaaccagtccgcgatcgacttctttatacagtgcatcaccattttcatcacaaagaatacgagtacctaaaagcggttcctctcgaaccaggaggaaacgctcagatacaccgataccgcgctggcctgcgtccatgatacccttgattgtttcatcctgagcaattacgcagattgaaccgaccggacaaagagacaagttattgtccttgcactgccgccactttcgcaagaccttcaggtgtaggatctgatacccgcgaaacaatatcagccatcttcttgatcttctcttcagtttttttttgtcctcgtacagagccgccgtcgtgttaccctccgggtcgtttttgatttccttctcgacctgacgtagctgactggttaaacggatacgttcatttttacgctcttcattcagtcgctgaatctccgcacgcataggcgtaatcgccgctgagttaatcgctgatttgcctgttgatggtggctgactgattaccatgtaaagcgctgtcggctgttcttctccatgatattgcacccaaaacttcccgagcatcgcggctgagatgcaaccgataaaatgagcatacgcggatgaaaccgggaactggactgattcagcttttgcttttgcatattcgaataccaagttatcgccacctaaagaaatcagagggaacttatcgtttccgctgttgatatcgatcggatcttgccaaaaagaaactgaatccccgtaactgttttcacgaattgcgatcgccaccggattcactccagtgctatttgcgatctcaataatctgttggtaattcagttttggcttaatattaaacat

SEQ ID NO: 132108 - DNA, 4974 bp, Homo sapiens
atgtcagatggcttggactcaacagccacctgggcgctccttctcagggacacctgcatacgtgttcccagatggcctatggggttattgtcacatgccagcacccacagctatgtgctggccccacatgcagatgcacaggtacctttgaggtcccacctacaagccagcacccacagctatgtgctggccccacatgcagatgcacaggtacctttgaggtcccacctacacgccagcacccatagctatgtgctggccccacatgcagatgcacaggtacctttgaggccccacctacacgccagcacccacagctatgtgctggccccacatgcagatgcacaggtacctttgaggtcccacctacacaccaacacccacagctatgtgctggccccacatgcagatgcacaggcacctttgaggtccaacctacacgccagcacccacagctatgtgctggccccacatgcagatgcacaggcaccttttaggccccacctacacgccagcacccatagctatgtgctggccccacatgcagatgcacaggcacctttgaggtcccacctacacgccagcacccacagctatgtgctggccccacatgcagatgcacaggcacctttgagatgcacaggcacctttgaggccccacctctaatgacaccggccagtgccctcggcaccaggggtgaggcccagtgtggaagagctttgcaaggcttttcccctggacctcacagctgccctgagaataagtgctcgctgcccaaaggaggcatcgcttggttaagtagcttgcacagagcacatgcaggagggaacagggctttgtcagcagtcaaagctgctgtgctgggggctcctggctatgtgcgaggcatcatgctaggcccagtgaagcctgcagtgaggactggtgtcctcatgagaagaggaagagaccccaggagtacgtgcacactgaggaaaggccatgtgaggacacagggaaaaggcagccatcaggcagccaagatgaggcttcaggagaaaccaaacctgtggcgtcttgatcttggatttccagtctgtggtgcagcagacagcagtaatcagagcggtctgggaaccactcagtctgtgtcagtgcagcctggtgagttcagaagactcctttgttttgagctgtggaacaagaggaaaggaattttccacaggagattaaaaatgaaggcaaagcaaagattcgattcagtaaaaatcaaggcgcactttgatgataacggttttttagttgaccgcccaatcgtggcgcgaatcggtgctcaggtttacaagactccgcacggcgatcgcgttgagttccgtccggcgtccgaagttttcaagcaagactccttgcaaagttttgcggggaagccaattactgttggtcacgtaacggtaactccgcagaatgctagggacgttgatgtcggatcgtgtgctggtgctggtattgcttcacgggttggcgttgaaatttctttgagtattgacagcgactacgcgatcagcaaagcgaagcgtgcggaggccggggaattatctgtagggtacacgtcggtagatattgataagccaggctggggttcaaacgagactggagaatatatcttcgaagaggatatgaaacaggacgaagcgccgcctgaaggttgggtgaaattcgacgcggtacagactaatatcaaggagttcccgtatgataataacgttcaattaactaacgaggacaagcaaatgaaaaaaattaagatcgactcagttgatgtggaagtaaccgaagacgttgcgaaccatatcgaaaaattaaccgcgcagattgccaccattcaaaggaaagctgatggcttcgaagctgagcgcgatgcgctgaaggttaaggttgactccctgccggaactggttaaggccgaggtagagaagcaaaaagccgatgccgccgcacgcgcagaagttaccgcagtagcagaaaccgcaggcgtcaaacatgatggtcttgatatcaaagacgtcaaaattgctgtggttaaagccatgcttgataaagatgttagtgaaaaatcagacgcatatatcgacgctatgtttgatgtgcctaaagattctgatatcatggctattcagcgtaaagcagtaaaaggcgactctatcgaaggcggtaagccggaagagacaaacgacaccgctcctgtaccgccaaattccacgtgtaagcaaagtaatgtaaggggaaatatcatggcacagattaatgcatcttatcagcgagatatggcgattgcgctcccgggtatggttgcggatacttcaaagtacaatattgacggcgcttgcgtcgttaatgaaggtgatgtttttgttggcgctgccgtacaggttgttcaagctcaggcggttgatggtcataagttggttaaggctcttactaccggaaccactccttatggcgtggcaatccgatctcactggcagactgttaatgctcaaaatcagatggtttacgaagatggcggcgctatcaacgtgatgacttcaggccgagtatggatgctttccaaatccaccgaagcaccaactttcggctctgccgttaaacttgatgttgatggtcaagagaaatctgatggcacaatcgaaacaacctggacctacgctggcggctggactaaatacaaagatattcagcttgtagaggttgtcggcatcgttgatggtgtaaaagttgttacggcgctttctgatggtggaactccttacggtatcgctttccgttcccaatatgaacacctgagcggtaaaatcctcgacggtgaagtgtgcaacgtcgtttctcacggtcgcgtgtgggcgcttacttctcttgatgaggctcccagcttgttctcaaagttgcagcttggatctggtggagttgttactggtggatctggttccgcaggatggacctttgctggcggctttgttaagcacgaggacgggtacgtcattgaggttcaggtgaaacaaaatgctttcatcgttccaccgcctcctccccctgtcgttcttgttgagtccgctacaatcaccactgacaaggaaagtcctcaaccaaacaatgttacgatccagtgtgtagctaatgctcttccggctaatgcaactgataagactggcaaatggtcaatcgacgctaccaatatcgccactgtcgatccggactcaggtcttgtaactcctgttggtggagagtcagtcggtgatttcaatattacctggacggctaacgatgccagcaagacgacggcgaccattgcttatagcgtagaagcagtgccaacgccagaggctggcgtaaaacaggatgcagccgcaacgatgggtatctggaccgctaaggaactacaccgcatcaaaagccagtcctataaagaagactacccggtaggctccgctctacgagtattcccggttacaaccgatctatctccgaccgacaagacgtttgaatatatgacctttgataaggtttacaagactccgcacggcgatcgcgttgagttccgtccggcgtccgaagttttcaagcaagactccttgcaaagttttgcggggaagccaattactgttggtcacgtaacggtaactccgcagaatgctaaggacgttgttgtcgaatcgtgtgctggtgctggtattgcttcaggggttggcgatgtggaagtaaccgaagacgttgcgaaccatatcgaaaaattaaccgcgcagattgccaccattcaggggaaagctgatggcttcgaagctgagcgcgatgcgctgaaggttaaggttgactccctgccggaactggttaaggccgagcgtagagaagcaaaaagccgatgccgccgcacgcgcagaagttacaaaattgattctagcttggttgacgttctttgctggtcgagactatacggtggggctgctattgtggcaatcatcaaagacaacagaatgctaaccagccccgttaaacctggagctaaacttgagggcgtgcgtgtttacgatcgatttgcaatcaccgttgaaaagagagtaaccaatgctcgatcgcctcgctatggtgagcctgagatatacaatgtatctcctggcgataatcttcaaccttacttaatccaccacacaagaatttttattgctgatggtgagcgagtaacccctcagattcgcaaacagaatcaaggatggggagcgtcggtattgaacaaatcactgattgatgcaatctgtgactatgattactgtgaatctctggccactcagatcttgcgacgtaagcaacaggctgtatggaaggtcaaaggtcttgccgaaatgtgtgatgatgatgatgctcagtatgccgcgcgcctgcgacttgctcaggttgatgataactccggcgtaggtcgtgcgatcggtatcgatgctgagactgaggaatatgacgttctcaactctgatatcagcggagttcctgagttcttatcaagcaagatggaccgcattgtctccctatccgggattcatgagattatcatcaagaataagaacgtaggcggcgtatcagcgagccaaaacacagcgcttgagactttctataagctagtcgatcgcaagcgcgaggaagattacaggccacttcttgagttcttgttgccgttcattgttgatgaggaggagtggtcgatcgagtttgagcctttgtctgttcctagtaagaaagaggaatcagagatcacgaagaataacgttgagtcagtcacgaaggctatcactgagcaaatcatcgatctggaagaagctcgagacacgctgcgatccattgcccctgagttcaaactcaaggatggtaataacatcaacattcgcgaaccggaagaaacaaccgaaccggaaccgggattaggggagaagttagaagatgaaaattaa

SEQ ID NO: 132109 - DNA, 1093 bp, Homo sapiens
aatacatggctggctagtagttactatttgtgaagttggattgattggttttggaacaacttgtttgacagcctgagctgagacaattggaactgacatccgcactggggttgtattaacaaccactggctttgcttgctgaagaggctgagtgtttgtactgggattctgactaactggctgggttgagctactggctgatgtggcagtaacaagtcggacataatgaaacttgcttccaggcacttgaatctgctggacattgggagcagttgccagaggaataattgtcttaaactgtgatgtgctcactcctccaacagtgatggtctgcacagctgatttcactgccttatttggcgatttcaaaggtgagatggctattttatttggtgtctgtgttgtagaatttaaagttgatccaataacaccactttcagatattgttatggtctttgatggagttccgggagtagactgtgaaagaaccctacctgcaaatgagaggcagcacatcagtttgacttttttcaataatagtataaaaatttatgtgatgatgctctacactcacaaggactgcagaatgtattgtgattgctttgcaaatggtgaattttgcaacaactgcaattgtactaattgttacaacaatttggaacatgaaaatgaaaggcaaaaagcaataaaggcatgccttgacagaaatccagaagcctttaagcctaagatagggaaaggaaaggagggagaatctgatcgacgtcatagcaaagggtgtaattgcaaacgatcaggatgtcttaaaaactactgtgaatgctatgagaacattattttcatttggtattgttgtaggtatcgtcagatcctggaaaaagccattcagttatctggagcagaacaactagaagctttgaaagcttttgtggaagcaattatcgagagcgtagaaagccgtactagcggaatgacaatacagcggagttgtttggctctgcaacatacggatctagaatgttcgtctatctatgggttacagaaggcgctgcggaatttacactatcagcgaactcgcacagcacagctatga

SEQ ID NO: 132110 - DNA, 2280 bp, Homo sapiens
atgtttaaggtaattgcttcagagcaaagcaaagtcaaactgggaccaaaaacgaccaagaccttgagttaccatcccagaaacggatctctcacactgatcctcagtaagatttggaaatgccaaggccttgctgtggttcttaaaataatttttcaacctaatctaatagggtgttcaaaaataattgtgatgtttgcaatagagtgtattaagctgtccttgcattgctataaagaagtaccggagacaggagaatatgatgagagggactttggagggtcccttcgtgttgtcagactgcccagcgcaacagttggaagccaggcaccaccagcaatagagatgagaaattctgaagaacagccaagtggagggaccacggtattgcagcgtttgctacaagagcagcttcgctatggcaatcctagtgagaatcgcagcctgcttgccatacaccagcaagccacagggaatggccctcctttccccagtggcagtgggaacccgggccctcagagtgatgtgttgagtccccaagaccaccaccaacagcttgtggctcatgctgctcgacaagaaccccaggggcaggaaatccagtcagaaaacctcatcatggagaagcagctgtctcctcgaatgcaaaataatgaagaactcccgacctatgaagaagccaaggtccagtcccagtactttcggggccaacagcatgccagtgttggagctgccttctatgtcactggagtcaccaaccagaagatgaggactgagggacgcccatcagttcagcggctcaatcctggaaagatgcaccaagatgagggactcagagaccttaagcaagggcatgtccgttccttgagtgaacgactaatgcagatgtcactggccaccagtggagttaaggcccatccacctgttaccagtgctcccctctccccaccacaacccaatgacctctacaagaatcccacaagttccagtgaattctacaaggcccaagggccacttcctaaccagcatagcctgaagggcatggaacaccgaggccccccaccagaatatcccttcaagggcatgccaccccaatctgtagtgtgcaagccccaagagccagggcacttctatagtgagcatcgcctgaaccagccagggagaacagaggggcaactgatgaggtatcagcatccccctgagtatggagcagccaggccagcgcaggacatctcattgccattgtcagccaggaactcgcagcctcacagccctacttcttctctgacctctggggggtccttgcccttgctacaatctccaccatccactagattgtctcctgcccgacaccccttggtcccaaaccagggagaccattcagctcacctgcctaggccgcagcagcatttccttcctaatcaggctcaccagggggatcattaccgtctctcccaacctggcctgagtcagcagcagcagcaacagcagcagcagcaccatcatcaccatcaccaccaacaacagcagcagcagcagccacagcagcagccaggagaagcctattcagctatgcctcgggctcagccatcctctgcttcttatcagccagtgccagcagacccttttgccattgtttccagagcccagcagatggttgagatcctctcagacgagaaccggaacttgaggcaagagttggaaggatgctatgagaaggtggcaagactgcagaaggtggagacagaaatccagcgcgtctcggaggcatatgagaacctcgtgaagtcatcctccaaaagagaggccctagagaaagccatgagaaacaagctagagggcgagattcggaggatgcatgatttcaacagggatctgagagagcgtctagagactgccaacaagcagcttgcagagaaggaatatgaggggtcagaggacaccagaaaaaccatctcgcagctctttgcaaaaaataaagaaagccagcgtgagaaggagaagctggaagcggagctggccactgcccgttctaccaatgaggaccaaagacgacacatcgaaatccgagatcaggccctgagtaatgcccaggccaaggtggtaaagctggaagaagaggtatggtttcctcagacagcctccccaccccctaccaatttgacctcgctggagattttcgatggatgtctggcatatcctctcacaaggctcagggcagcccaggcttctggctggctgctgtcttatgatgatccggagtggaagcggcttgggtaa

SEQ ID NO: 132111 - DNA, 448 bp, Homo sapiens
caaaaatgacaaaggagacattattgtcaccactaagtcaggtggcagaggaacctcaacagtctctttcaagctactcaaacctgagaaaatagaagtaaattttcgcagaaggacttagaaatgctattccatggaatgagggctgattttacaagtgagaatttctcagcagcctggtatcttatagagaatcactcaaacaccagttttgagcagctcaaaatggcagtcaccaacctaaagagacaggctaacaagaagagtgagggcagcctggcctatgtgaaaggcggtctcagtacattcttcgaagcacaggatgccctctcagccatccatcaaaaactagaagcagatggaacggaaaaagtagaaggatccatgacgcagaaactggagaatgttctgaacagagcaagtaatactgcagacactgtatacgaaa

SEQ ID NO: 132112 - DNA, 2031 bp, Homo sapiens
tcctgctgttgagtcatcttggcctatactagggcgtggtttgagaggatcatgaataacaaagaccctcctattttggtactaatccttttttctttctcttttaacagattacttctctaacaggatcaccagtttgctccacaaagcacaatgtctcgatcacgacaacccccccttgtgaccggcatctctccaaatgaagggataccatggacgatcttattgttcttgtctttgaattttgttatgcacatgcgtttattttcaggcttgaccatttgtggacataattgcctcctgacggcagaatggatgtctgcaagtaaaatagtatgtcgagtgggacaagccaaaaatgacaaaggagacattattgtcaccactaagtcaggtgcaggcacgctttgtctgtgctcccgtgcctggggtaggcttcatcttattaagcatatgctcctcatttctgtaggcattttggatcagtctgctgtgtgggttgatgaaatgaattattatgatatgcgcactgacaggaacaaaggaatgtcaccaagatgtgaggagcctgggtttgctggctgttctgttgcccttagcataaaacacatttccttagcaattgtggttgaaactggacataatgatgttctcaggcagaaagatggtgtctcttcttggtttcccttcttgaaagtatggagacctttcccagatgtgctccaacagaccttcctccgacatcactgttcaaaaacaagtttatccaatcaagagcagggggaatatgacaagcgcggttggcttatggtggttgatctctccccagtctgcatggacagtagaggtggctgcattttaggggtgttctccatgtccaggtgtgcaagcaccttgctagagagagtgggctccaggccattggaagttgtgccttgtgtctggtttataccttatgagttgggcttgtccagtgttttggggtaggggacacatcttagagggggcggcaaatcagacgaacaaagtaaaccccaagatggtggagaccaacatgcgagacagtatagtccctttgaggctgccgaagcgtcaggtttcatgcctagagtggcagaaatgagccctgagggacaagcagattcagttcatagacatgcttggatttcatcctttcttgcatgttagaagtgtcaaactttggtttctttatttcatttcagttttgagcagctcaaaatggcagtcaccaacctaaagagacaggctaacaagaagagtgagggcagcctggccttgtaaactgagccggggggccagggtcacctcatcttgacctgctcatcagtgatgggttttgtcagcatcagaaaatgtggctacatgatttcctttaatgctaattttgacttagaaagcaacctgtggagcagggctactgtggggtgtgacatctcagcgcagtgtctgttatctccacccattaaaatggcctacattttaactagatttttttttctagccatccatcaaaaactagaagcagatggaacggaaaaagtagaaggatccatgacgcagaaactggagaatgttctgaacagtaagttttgtcctactacccagaactatttatggatttattaaaatttccctaaaatacatttctttataacaattcccccttttctagaaacattttttaacaacatgatgttgattgctgtcttaggatatgtttttcctaattcaggtcaacttgacagacgtttatttaactctggttgtgtcaagccccgtgctaagccagcctgggaggtacagttcccctccagccctttaattcacacgtcgctgtgtaaatgacaggtgctctggatgatcagccacactgcctccttcaaggccaccagcgatagtcactgtacgtctgttaccagttctcagcagacagcaaagtgtgcagttgtgctacctccttatctcccagtgacaaaccctcctgacattttacaaaaatggatgatcggg

SEQ ID NO: 132113 - DNA, 1393 bp, Homo sapiens
cgcgcactaattcccgggtcgacgatttcgtgtgagaggatgcagagtgggagaccttaaaaccgtctgatctggctgctaaagcgagtgtctgacgaccacccattaacaccagcgagtagcgtttgctcacggctttaggataagaagcctggaatggtcccccctccgccgggagaagaaagccagacggtcatccttccacctggctggcagagctacctgtcgcctcagggccggcggtactatgtcaacacgaccaccaatgagaccacctgggaacgtcccagcagttctcctgggattccagccagccctggctctcacaggagctctctgcctccaacagtgaatggataccacgcatcagggaccccagcgcaccctccagaaactgcccacatgagtggtcgaaaatccaccgggggattcccagaacctgggatcctcatcgccaagcaaaaagcagagcaaggaaaacaccatcacaataaactgtgtgacgttccctcacccagacacgatgccggaacagcagctgctgaaaccaaccgagtggagctactgcgactacttctgggctgataagaaggacccccaaggcaacggcacggtggctgggtttgaactactgctccagaaacagctgaagggcaaacaaatgcagaaggaaatgtcagaattcatccgggaaaggataaagattgaagaagactatgcgaagaacttagctaagctctctcagaactccttggcttcacaggaggaaggctccttgggagaggcgtgggcccaggtgaagaagagcctggcggacgaagcagaagttcacctcaagttctctgccaagcttcacagcgaggtggagaagcccctgatgaacttccgtgagaacttcaagaaagacatgaagaagtgcgaccaccacattgccgaccttcgcaagcagctcgccagccgctatgcctcggtggagaaggcccggaaagccctcacagagcggcagagagacctggagatgaagacccagcagctggagatcaagctgagcaacaagacagaggaggacatcaagaaggcgcggagaaagtccacacaggctggagacgacctcatgcgctgtgtggatctctacaaccaggcccagtccaaatggtttgaagagatggtgaccaccacattggagctagagcggctggaggtggagagggtagagatgatccggcagcacctgtgccagtacacgcagctgcggcatgaaacagacatgttcaaccaaagcacagtcgagcccgtggatcagctgcttcgaaaagtggacccggccaaagacagggagctgtgggtcagagagcacaagacgggcaacatccgccctgtggacatggagatc

SEQ ID NO: 132114 - DNA, 438 bp, Homo sapiens
atggctgtactggaaggcattgaaaaaccagagatggaggaaactctgggggcagcagagagccggcacaagccaagaaaagtggacgagccccagcaggaggccactgggggccagaggcttgtaggccaggtgccgtatttgagagggcgaaccagccgtggcttcgaccctcaaggagataaggtgtcaaggtgcatcaagagcctctctctgtccagcgctgcactgtgtgctgggcccctaaagggggctgagaaaggtggggagatgggtggagaagtgaatggataccacgcatcagggaccccagcgcaccctccagagactgcccacatgagtgtccgaaaatccaccggtgattcccaggtcctggtgtgtgatgttcccccaccggtgtccatatggtcccattgttcatctcccacttatgagtga

SEQ ID NO: 132115 - DNA, 926 bp, Homo sapiens
tcaaggcgttcgatcttgtggcctgcggtcgtgtgttcgtttcgttcgggctgtggcttccgttcggtctgttcgtgatggatgggagtgtgcgatgtgttcgttgccttcgtgtgtcctgttcggtgtcggtccggaatgatgggatggagatggtcgcggggagtccaggccgtcggggtcctcggagcaaccacccgagcagacggagtacacggagcagcggccccggccccgccaacgctgccgccgggatgctccagaccttgtatgattacttctggtgggaacgtctgtggctgcctgtgaacttgacctgggccgatctagaagaccgagatggacgtgtctacgccaaagcctcggatctctatatcacgctgcccctggccttgctcttcctcatcgttcgatacttctttgagctgtacgtggctacaccactggctgccctcttgaacataaaggagaaaactcggctgcgggcacctcccaacgccaccttggaacatttctacctgaccagtggcaagcagcccaagcaggtggaagtagagcttttgtcccggcagagcgggctctctggccgccaggtagagcgttggttccgtcgccgccgcaaccaggaccggcccagtctcctcaagaagttccgagaagccagctggagattcacattttacctgattgccttcattgccggcatggccgtcattgtggataaaccctgggtctatgacatgaagaaagtttgggagggatattccatacagagcactatcccttcccagtattgggactacatgattggactttcctttcactggaccctggtctttagcattggctctgatgtacagcgaaagggttttcaggaaccgaatatccaccctgtggcccccattattttcataaatttttccggg

SEQ ID NO: 132116 - DNA, 693 bp, Homo sapiens
tgcgacctcctctggcttacctcagagacggcgacgcccgagctgggttgaacggactgcagctggcggtgctggctatgttaagctctaggaagatgttctgtaagaagagtgggcaatcctattctcccagtagagttctgatcacagagaatgacgtgaaggagggcctacagcgatcccacattttatatgaccgggcaggtgaggagcattacaactgcatctccgccctgcacaagtccatgcggggctcagaccagaacgcctccctctactggctggctcgcatgctcgagggaggagaggacccactctacgtggcacggaggcttgtcaggtttgccatgcgaggacataggtctggcagacccgtctgcgttaacacaagcggttgctgcctaccaaggctgtcattttatatgcatgcctgaatgtgaggagctactggcccagtgtgtggtctactttgccagagccccaaagtccattgaggtgtacagcgcctacaacaacgtcaaagcctgcctgaggaaccaccaggggccactgccccccgtgcccctgcacctgaggaacgcgcccactaggctgatgaaggatttgggctatggcaaaggctacaagtacaaccccatgtacagcgagcctgtggatcaggagtacctgcctgaagagttgaggggggtagat

SEQ ID NO: 132117 - DNA, 2020 bp, Homo sapiens
atggtctccctgagacatgtgccaggagaagcgatcactgtgtcctgccatcggggacagaaggttgtgtcaacgacccctcagatgcctttgtccctgtggtcctgtgattccaggaagctgccttaccaggaccaagatggcgaaggaggtgtggtcaaacgccgacctgacggaaaggatgcccgtcaaaagcaaaaggacatcagccctcgcagcagcccaagtgtcgatgcctataatgcagaggtcctcaaccattttggcaccagggactggttttgtggaagacagtttttccaagacaggggagtggatgctttcaagacgattcaagcccattatatttaccattaccttctcgccacaggtcagtaccagtctgtggcccagggggttgggacccctgctacagtgcagagctcccaggtgattctgatgcaagtgatccacacaccacatgttgacaaatactgctctagaagtttactgaaagaactcctcagagggctgctcatccagactcagcaggagaaatactggggccactgtgcgctgtccactcggcagctgaccacagggcctcatgctacgccgcttcctctttttggcagagggcgtttcggccaggttcacaagtgtgaggagacggccacaggtctgaagctggcagccaaaatcatcaagaccagaggcatgaaggacaagctgcaccaggtgcagtgccccgtgtgccagcaggagatgcccgccgcgcacatcaactcgcacctggaccgctgtctgctgctccacccggcggggcacgcggagcccgcggccgggtcgcaccgcgccggggagcgggccaagggggccctcgccgcccggcgccaagaggcggcggctgtcggagagctcggcgctgaagcagccagccaccccgacggcagccgagagcagcgagggcgagggtgaggagggcgacgacggcggcgagaccgagagccgcgagagctacgacgcgccgcccacacccagcggcgcccgccttatccccgacttcccggtggcccgctccagcagccccgggaggaaggggtcggggaagaggccggcggccgccgccgcggcggggagcgcgtctccgcgcagctgggacgaggcggaggcgcatgatgaggatgaggccgtgggcgacggcgatggcgacggggacgcggacgcggacgggcgaggacgacccggggcactgggacgcggacgctgccgaagccgccaccgcccttcggggccagtggcgggggccgcccgcacccccgggcgctggctgccgaggagatccgacagatgctacagggcaagccgctggccgacacgatgcgtcctgacacgctgcaggattacttcgggcagagcaaggcctcaggcaccgtgtatgaaatctaacaatgcgctcatcgtcatccttcgcaccgtcaccctggatgctccagtcctgctcgctgcgctactgggagcccctatcgactacgcgatcatggcgaccacacccggcctgtggatctacccactagtcaatcaccatcttggtgaggagcattacaactgcatctccgccctgcacaagtccatgcggggctcagaccagaacgcctccctctactggctggctcgcatgctcgagggaggagaggacccactctacgtggcacggaggcttgtcaggtttgccagcgaggacatatgtaagttcaaggagggggcaccctcctcacgagaaagcggaggatggtgttcccgtgagtctcactcctcccagaggagcacctggtctgtgctcagcataagcccatgtccacaatacgactggcgccagccacaaaccctggcagctgagctcgctgttaaattactaggatctaaagaaggtacaaagataagcaagaagtgggtatttgcccttgtggagtttacggcgaaaatcctgtttgatggtggttccgaaatcggcaaaatcccttataaatcaaaagaatag

SEQ ID NO: 132118 - DNA, 404 bp, Homo sapiens
gcggaaaccatcaagtaagccaagatgtttgcatacttgtacatccaggagctatggagaaagaagcacacggatgacatgcgctttcttctgagggtccgctgcaggcagtaccgccagctatctgctctccacagggctccccgccccacccggcctgataaatcgcgccgactgggctacaaggccaagcaaggctacgatatatataggattcgtgtgctccggggtggccgaaaacgcccagttcctaagggggcaacttacggcaagcctgtccatcatggtgttaaccagctaaagtacgctcgaagccttcagtccgttgcagaggacccagctggacgccactgtggggctctgaaagacctgaatacttactgggttggcgaagaatccacata

SEQ ID NO: 132119 - DNA, 407 bp, Homo sapiens
tttcgtgctaccatcacgtctgccaagatgggtgcatacaagtacatccaggaactatggagaaagaaacaggctgatgtcatgcgctttcttctgagggtgcgctgctggcagtaccgccagctctatgctctccacagggctccccgccccacccgggctgataaagcgcgccgactgggctacaatgacaagcaaggctacgtgatatataggattcgtgttcgccgtggtgggcgaaaacgcccagatcctaagggtgcaacttacggcaagcctgtccatcatggtgataaccagctaaagattgctcgaagccttcaatccgacgcagaggagccagctggacgccactgtggagctctgagagaacagagttcttactgagttggtgaacattccacata

SEQ ID NO: 132120 - DNA, 431 bp, Homo sapiens
  misc_feature (1)...(431): n = a,t,c or g
gtgctgcggccgtaagccaggncgcccacgcgttcgggcagccatcaggtaagccaagaagggtgcttacaattacatccaggagctatggagaaagaagcgggcggatgtcatgcgctttcttctgagggtccgctgctggcagtaccgccagctctctgctctccacagggctccccgccccacccggcctgataaagcgcgccgactgggctacaaggccaagcaaggttacgttatatataagattcgtgttcgccgtggcggccgaaaacgcccagttcctaagggtgcaacttacggcaagcctgtccatcatggtgctaaccagctaaagtctgctcaaagccttcagaccggtgtacaggagcgacctggacacccctgatatgctatgagagtcctgaaggcttaccgagcacgcccagacg

SEQ ID NO: 132121 - DNA, 432 bp, Homo sapiens
ataagccaagatgggtgcatacaagtacatcctggagctatggagaaagaagcagtctgatgtcatgcgctttcttctgagggtccgctgctggcagtaccgccagctatctgctctccacagggctccccgccccacccggcctgataaagtgcaccgactgggctacaaacaagtcattaaaagaaggattgaagggaactttccaggagaatttatagataaggctttacgactaataagaacactcagtgagattccaaaatataagatcagcattcaaaaaccagtagtgccttctgtttccaagaaagatatacctcattaagaaaggaagcccatgaagatcagcaacaagagagaaacaagcagaaggcggtgcataaaatccaagcacctcactagagtcatccaagaagcactgctgcttac

SEQ ID NO: 132122 - DNA, 888 bp, Homo sapiens
ggaattcggcggcagccatcaggtaggctgcgttgaggatctttgctcttccatccgcctttgatcgtcttcctcttcagccatccaggtaagccaagatgggtgcatacatagtacatccacgagctatggagaaagaagcagtctgatgtcatgcgctttcttctgagggcccgctgctggcagtaccctgctctccacagggctggcacagagtggcagctctctgctctccacagggctccccgccccacccggcctgataaagcgcgccgactgggctacaaacaaggccaagcaaggttacgttatatataggattcgtgttcgccgttatatataggattcatgttcgccgtggtggctgaaaacggcccagtttcctaaggggtgcaactttacgggcaagcctgtccattcatgggtgtttaaccagcttaaaagttttgcttcgaaagcctttcagttccgttggcaggagggaggcgaagcttgggacggcacttgtggggggcttcttgaggagttcctgaatttttttaattgggtttgggttgaaagatttccacataacaaaatttttttgaagggttaatcctcatttgatcccattccataaaagctaatcagaagaaaatcctgacacccagtgggatcaaccaaaccagtcccacaagcacaggggagatgcgtggggctgacatctgcaaggcccgaaaagagccgtggccttggaaaaagggccacaagttccaccacactattggtgggctctccgccgggcaacttggagaaggcgcaatactctccaagctccaccgttaccgctaatataagtaaagtttgtaaaattcatacttaataaacaatttaggacagtcaaaaaaa

SEQ ID NO: 132123 - DNA, 2058 bp, Homo sapiens
ttttttagtagtgtaaatagtttattatttgctcatatgccatgaaaagaccagaaaagtaacatgaattgcttttataaaacattctaatattgctaagaagcaggcccattaatagacaaacagaaaagaacatgccaacgttgtctatttgtagattaataaataggcaattattttaatatacatatatgtcagcattgaactttggaaaacagctgctttagtagtggaagtccaacttggtcaaattgctatttttaatcgaagtgaatgttgagtccacagaaagacaaaatcgtggcatgttctttttaaagtaaagtacacatttatgggaatgtgcccgcaggtggcagtttaatctttctgtaaataggtacactaaagtgaaatgtggtaggtaacttgttccctaaactgtccttatagttaaatatatatattaaaaaaaactataagttaaaataacattcagattgtatagcataggctgatgcattttaaaacaatatttacaatattacccagaggcttaggtgggaattaaagagaagtgtaaaaccccataaaaaactgcaccgattttatagcaaaatatctgtacatttaaaaagatcatataactacacatcccaaggaaaagggaccttcacccaaggggttcacataagctcaacataaaataggaacttcagcggttaaatcctatgcaatacactttacaattaatatattgatgtaccaagaagataagccagaagcagaatgtatattatgaaaagtacaaatttagcttcagtccagtttttgactttggaatggatcaagtgccctgccagagaggaaggaaaataacagtggcttagtgggccatctagtcccattacgtattatttaagcttaataccatgttaatacttttcagcaacttaaactgcaattctccataagtagtctgggaaatgcatgaaaaacttagcctcgatacacgatgccaagtgtatcttcttgaatttataaaaaataagaaaaaattgcgattgtcagaggagagtaaggccaggttcctaacactactctgctagcagatgtaaccttgaatgcttgttgatagagctagtaaacttccttgcaaggcaccaatttctgttctcagaattaataatggtcctcagaaatgataatgctgattattgagatgttaattttaatgctaataaatacacttgcattatttaaaaagctgcctctagctgaagaacacagtactgcaaataagtcttatacactatatccccacattcatactagtgaatgcctctcacagagcatcgttctctagcacagaagtagtagaatgtgaaactggaaacaaaggattgagtgacctttgtgccactgcagttgcatcctgtttgcactttgccagggcctggttatagacaaaaggagtttcatcatgtgactttccttcttccaaattgcaagtaaaatacaaagttgatggatatggctaaaacaaaattccttcgaagacatctcagcaaaggacccacagcagatgcattgatgttatttacaacatcaggaaaccaggtgggccatgatgggacaatcacaatggcagcagttttatacagtatttctttggcattatgggtcagagaatttctgaatgaagaaaacaaaggtcttgatgttctagtggaatatctctcatttgcacagtacgcggtaacttttgactttgaaagtgtggagagtactgtggagagctcggtggacaaatcaaagccctggagtaggtccatcgaggacctgcacagagggagcaacctgccctcacctgtgggcaacagtgtctcccgctctggaagacattctgcactgcgcttaaagtgtttctatcttatttcaggcatgatctggcaagaggacattatttctctaagtgtttacgatcactccgggtattcagtcattgttgtagaatccatatgtcagattgcagccagtgaatatgtggctttcagacctttggatttggttgtctaa

SEQ ID NO: 132124 - DNA, 2544 bp, Homo sapiens
gcagtactcatcttggccctgggaagaaactcaagaagaagcttttgaaacataaagcttggatggggtttgacctctgcagggcagcgcccagctataggagttcccctgctgagcagagaagatgactgcagaattgagagaagccatggccctagccccatggggcccagtgaaggtgaaaaaggaggaggaagaagaagaaaacttcccaggtcaggcatccagccaacaagtgcactccgagaacatcaaagtctgggccccagtgcagggtcttcagacaggccttgatggatcagaagaggaagaaaagggtcagaacatatcctgggatatggcggtagtcctgaaagcaactcaggaggcacctgctgcttcaacccttggcagctactcattaccagggactctggccaagagtgagatactggagactcatgggaccatgaactttctaggtgctgaaaccaagaacctacagttactggttccaaaaactgagatatgtgaggaagctgaaaaacccctcatcatatcagaaagaatccagaaagctgatcctcaaggacctgagttaggagaagcttgtgaaaagggaaacatgttaaagaggcagagaataaagagagaaaagaaagatttcagacaagtgatagtgaatgactgtcacttacctgaaagcttcaaagaagaggaaaaccagaaatgtaagaaatctggaggaaaatatagccttaattctggcgctgttaaaaatccaaaaacccagcttggacaaaagccttttacgtgtagcgtgtgtgggaaaggatttagtcagagtgcaaacctcgttgtgcatcagcgaatccacactggagagaaaccctttgaatgtcatgagtgtgggaaggccttcattcagagtgcaaacctcgttgtgcatcagagaatccacactggacagaaaccttatgtttgctcaaaatgtgggaaagccttcactcagagttcaaatctgactgtacatcaaaaaatccactccttagaaaaaacttttaagtgcaatgaatgtgagaaagcctttagttacagctcacaacttgctcggcaccagaaagtccacattacggaaaaatgctatgaatgtaatgaatgtgggaaaacatttactaggagctcaaacctcattgtccaccagaggatccacactggggagaagccctttgcctgtaacgactgtggcaaagcctttacccagagtgcaaatcttattgtacatcagcgaagccatactggtgagaagccatatgagtgtaaagagtgtgggaaagcctttagttgtttttcacaccttattgtgcaccagagaattcacactgcagagaaaccttacgactgcagcgaatgtgggaaagccttcagtcagctctcttcccttattgtccaccagagaattcacagtggagatcttccttacgtgtgtaatgaatgtgggaaggccttcacatgtagctcatacctacttattcatcagagaattcataatggagaaaaaccttacacatgtaatgagtgtgggaaggccttcagacagaggtcgagcctcaccgtgcaccagagaacccacactggggagaagccctatgaatgtgagaagtgtggtgcagctttcatttccaactcacacctcatgcgacaccatagaacccatcttgttgaataacaagtaaggaagaggaagacctccagcattggtcataaccttctgcctccctaatgagacacctctttgctgttttcttcctcctctataaaagtgagggctgtgtccttaaaagttatagttttcaggaatgcagcagaagacacaagaaaagcatttcgagaggctaatttaaaacaaaaagtaagcacctaaagggaaggactttgttttaactgtaccttaagcggtcatgttctctgaagtggaatgtggctttcctaggaatgggtcgtacaaagctaagtggtaatgatgctatttggggaaaggtcttttttgcttaattttgttttttaaaactctgatgattgcttgagcaacaggcaggttatctgcctggttgaattctggttgaaccgtgtattctaatatttctggttaagtggtgactgggtaaggaaaccacttggggtagcagttcaacaatcacttacgaatgtttataagctttccatttcctaggtaattttttaaaagccagtcaaaacaaaaactttactgaaaatggacagaaaataggaaatggactttttccttactgtctatcctcctgaaccttggtattgtaaagatctggggacctctgggtctgttctgaccattccctagtctccatggccaagcactcaaggattgatggacaccacacaccagctatattcatttgccaagatcaacagctccttctccaaacaactcaagcccccaattcccatcgcattccatttgggtgagatgcaactaacagccccttcctggatgaaggagtcaaagaataaagcttgcctagaggc

SEQ ID NO: 132125 - DNA, 1968 bp, Homo sapiens
atgaaactcatggaaacacttaaccagtgcataaacgctggtcatgaaatgacgaaggctatcgccattgcacagtttaatgatgacagcccggaagcgaggaaaataacccggcgctggagaataggtgaagcagcggatttagttggggtttcttctcaggctatcagagatgccgagaaagcagggcgactaccgcacccggatatggaaattcgaggacgggttgagcaacgtgttggttatacaattgaacaaattaatcatatgcgtgatgtgtttggtacgcgattgcgacgtgctgaagacgtatttccaccggtgatcggggttgctgcccataaaggtggcgtttacaaaacctcagtttctgttcatcttgctcaggatctggctctgaaggggctacgtgttttgctcgtggaaggtaacgacccccagggaacagcctcaatgtatcacggatgggtaccagatcttcatattcatgcagaagacactctcctgcctttctatcttggggaaaaggacgatgtcacttatgcaataaagcccacttgctggccggggcttgacattattccttcctgtctggctctgcaccgtattgaaactgagttaatgggcaaatttgatgaaggtaaactgcccaccgatccacacctgatgctccgactggccattgaaactgttgctcatgactatgatgtcatagttattgacagcgcgcctaacctgggtatcggcacgattaatgtcgtatgtgctgctgatgtgctgattgttcccacgcctgctgagttgtttgactacacctccgcactgcagtttttcgatatgcttcgtgatctgctcaagaacgttgatcttaaagggttcgagcctgatggcttctctaaacctggctgccagaggggctacactctgaagcctttctccccagttcaccctaacaacaagcccttcagacacacccaccagtgtgcccacgtcaatttaccattgccatggcaacaccccggagttactgcacctttccatggcagtgacccaatgacccaaaagtactactccttccctagaaagttctgcataagccgccccttaatctgcatgcgattaaaaatggctatttatcaagattttcaggagctaaggaagctaaaatgggagaaaaaaatcactggatataccaccgttgatatatcccaatggcatcgtaaagaacattttgaggcatttcagtcagttgctcaatgtacctataaccagaccgttcagctggatattacggcctttttaaagaccgtaaagaaaaataagcacaagttttatccggcctttattcacattcttgcccgcctgatgaatgctcatccggagttccgtatggcaatgaaagacggtgagctggtgatatgggatagtgttcacccttgttacaccgttttccatgagcaaactgaaacgttttcatcgctctggagtgaataccacgacgatttccggcagtttctacacatatattcgcaagatgtggcgtgttacggtgaaaacctggcctatttccctaaagggtttattgagaatatgtttttcgtctcagccaatccctgggtgagtttcaccagttttgatttaaacgtggccaatatggacaacttcttcgcccccgttttcaccatgggcaaatattatacgcaaggcgacaaggtgctgatgccgctggcgattcagaaagttctgcataagccgccccttaatctgcatgcgattaaaaatgggtataaatatgaccgcaaaactgtttttcaagcaggtgacgagcgactttccccttacatcaagtgcacagacccctctccgagcctctcacccccaagaaaatgggcccgtccccggaactgcggcgcggccgacctgaagacccctccccgaccggctttagaatctcggaacggcttctga

SEQ ID NO: 132126 - DNA, 1726 bp, Homo sapiens
gaattcgggccagcctcctgctgcagagccagtgaactcaggtcgggcttctcagctgcgcacataggcagtactcatcttggccctgggaagaaactcaagaagaagcttttgaaacataaagcttggatggggtttgacctctgcagggcagcgcagctataggagttcccctgctgagcagagaagatgactgcagaattgagagaagccatggccctagccccatggggcccagtgaaggtgaaaaaggaggaggaagaagaagaaaacttcccaggtcaggcatccagccaacaagtgcactccgagaacatcaaagtctgggccccagtgcagggtcttcagacaggccttgatggatcagaagaggaagaaaagggtcagaacatatcctgggatatggcggtagtcctgaaagcaactcaggaggcacctgctgcttcaacccttggcagctactcattaccagggactctggccaagagtgagatactggagactcatgggaccatgaactttctaggtgctgaaaccaagaacctacagttactggttccaaaaactgagatatgtgaggaagctgaaaaacccctcatcatatcagaaagaatccagaaagctgatcctcaaggacctgagttaggagaagcttgtgaaaagggaaacatgttaaagaggcagagaataaagagagaaaagaaagatttcagacaagtgatagtgaatgactgtcacttacctgaaagcttcaaagaagaggaaaaccagaaatgtaagaaatctggaggaaaatatagccttaattctggcgctgttaaaaatccaaaaacccagcttggacaaaagccttttacgtgtagcgtgtgtgggaaaggatttagtcagagtgcaaacctcgttgtgcatcagcgaatccacactggagagaaaccctttgaatgtcatgagtgtgggaaggccttcattcagagtgcaaacctcgttgtgcatcagagaatccacactggacagaaaccttatgtttgctcaaaatgtgggaaagccttcactcagagttcaaatctgactgtacatcaaaaaatccactccttagaaaaaacttttaagtgcaatgaatgtgagaaagcctttagttacagctcacaacttgctcggcaccagaaagtccacattacggaaaaatgctatgaatgtaatgaatgtgggaaaacatttactaggagctcaaacctcattgtccaccagaggatccacactggggagaagccctttgcctgtaacgactgtggcaaagcctttacccagagtgcaaatcttattgtacatcagcgaagccatactggtgagaagccatatgagtgtaaagagtgtgggaaagcctttagttgtttttcacaccttattgtgcaccagagaattcacagtggagatcttccttacgtgtgtaatgaatgtgggaaggccttcacatgtagctcatacctacttattcatcagagaattcataatggagaaaaaccttacacatgtaatgagtgtgggaaggccttcagacagaggtcgagcctcaccgtgcaccagagaacccacactggggagaagccctatgaatgtgagaagtgtggtgcagctttcatttccaactcacacctcatgcgacaccatagaacccatcttgttgaataacaagtaaggaagaggaagacctcccccgcccgaattc

SEQ ID NO: 132127 - DNA, 1116 bp, Homo sapiens
atgctcatggtctatccccggaccaacaagcagaatcagaagaagaaatggaaagtggagccccccacaccgcaggagcctgggcctgccaaggtggctgttaccaccagcagcagcagcagcagcagcatccccagtgctgagaaagtccccaccaccaagtccacactctggcaggaagaaatgaggaccaaggaccagccagatggcagcagtctgagtccagctcagagtcccagccagagccagcctcctgctgccagctccctgcgggaacctgggctggagagcaaagaagaggagagcgccatgagtagcgaccgcatggactgtggccgcatccccagcacccccaaccacaggaggtcccaggtgattgaaaagtttgaggccttggacattgagaaggcagagcacatggagaccaatgcagtggggccctcgccatccagtgacacacgccagggccgcagcgagaaaagggcgttccctagcaagcaggacttcaccaatgaagcccccccccaagctcctctcccagacgcctcggcttcccccgtctccacaccgaagagccaagtcactggacaggagggtcagaacatatcctgggatatggcggtagtcctgaaagcaactcaggaggcacctgctgcttcaacccttggcagctactcattaccagggactctggccaagagtgagatactggagactcatgggaccatgaactttctagacagcagtcctcaggtccgttaccatccaaggaatcttgggacagcctgtaaccaggcgggactcgaccgctactacccggaaggcccactgcctaggagcggggacgacacagtgctgtcaccacggccagcctggtccaagctagcagctacgaggagtcagagactggacccaagacaaaggggcagcactgaacgagagaaaggggaggcccacaacgaccccttggctgccgcgcccatctcagcagcgggcagccgcagaggagccctggcctcctggcttgcgtctcccacacgctcccagaacccggcccgaccccccacgccagactgtagagcacccctcaccgaaagcgccagacccacatcttga

SEQ ID NO: 132128 - DNA, 1737 bp, Homo sapiens
cacgagccttgatggaccagcaatacaagttccagtccttgtcaaggatcaggacactctccagaaggtggtgagtgccccaggaacaacacttcctcctgtacttcctggcagccacatagcagctgaaatttgcccgcatcctcctactgacctagtggcattcaacctccaggatcctcagcatgattctcctgcccctgaagcttctgccctttcccaggaagagaacccaagaaatcaattaatggcacttatgctcctaacagcccagccccaggagttggtgatgttcgaggaggtgtcagtatgcttcacttcagaggaatgggcatgtctgggcccaatccagagggccttgtactgggatgtgatgctggagaattatggaaatgtgacctccctagacaattacgttaccatgagacatctggaccccaggaagccctgagccggctcagggaactctgtcgccggtggctgagaccagaagcacgcaccaaggcacagatcctggagctgctggtgctggagcagtttctgagcatcctgcctggggagattcggacctgggtacagctccatcaccctggaagtggcgaggaggctgtggccctggtagaggagctgcagaaagaccttgatggaccagcaatacaagacctcgcagtgtttcatatggttttggctgctgtggctgtcatggcagccagtgttaccctttctgtccgtgcttatcctttctttgatatccagcatcctcagacacagaaacctcagttgctagatctttgtttacagcttggacaaaagccttttacgtgtagcgtgtgtgggaaaggatttagtcagagtgcaaacctcgttgtgcatcagcgaatccacactggagagaaaccctttgaatgtcatgagtgtgggaaagcctttagtcagagtgcaaacctcgttgtgcatgagcgaatccacacgggagagaaaccctataagtgtaaggagtgtggaaaagctttcactcatagctctaaccttgttgtacatcggagaatccactccttagaaaaaacttttaagtgcaatgaatgtgggaaagcctttagttacagctcacaacttgctcggcaccagaaagtccacattacggaaaaatgctatgaatgtaatgaatgtgggaaaacatttactaggagctcaaacctcattgtccaccagaggatccacactggggagaagccctttgcctgtaacgactgtggcaaagcctttacccagagtgcaaatcttattgtacatcagcgaagccatactggtgagaagccatatgagtgtaaagagtgtgggaaagcctttagttgtttttcacaccttattgtgcaccagagaattcacactgcagagaaaccttacgactgcagcgaatgtgggaaagccttcagtcagctctcttgccttattgtccaccagagaattcacagtggagatcttccttacgtgtgtaatgaatgtgggaaggccttcacatgtagctcatacctacttattcatcagagaattcataatggagaaaaaccttacacatgtaatgagtgtgggaaggccttcagacagaggtcgagcctcaccgtgcaccagagaacccacactggggagaagccctatgaatgtgagaagtgtggtgcagctttcatttccaactcacacctcatgcgacaccatagaacccatcttgttgaataa

SEQ ID NO: 132129 - DNA, 708 bp, Homo sapiens
atgtctgggcccaatccagagggccttgtactgggatgtgatgctggagaattatggaaatgtgacctccctaggggaaagaatagtcaagttcctgaagaagatggtaaaaatgagtcaaaatctccaagaatagggaagccaagggctgagggcttctctaaacctggctgccagaggggctacactctgaagcctttctccccagttcaccctaacaacaagcccttcagacacacccaccagtgtgcccacgtcaatttaccattgccatggcaacaccccggagttactgcacctttccatggcagtgacccaatgacccaaaagtactactccttccctagaaagttctgcataagccgccccttaatctgcatgcgattaaaaatgggtataaatatggccgcaaaactgcccttccaaccggtggcgaacggcctttccccttccatcaagtgcccaggtcagaacatatcctgggatatggcggtagtcctgaaagcaactcaggaggcacctgctgcttcaacccttggcagctactcattaccagggactctggccaagagtgagatactggagactcatgggaccatgaactttctagagcggcagaccacactgagaagctatggaattgcagagaagagtgcagactgtgttaccatggacttgcagccctttctgccttttactggcctttaa

SEQ ID NO: 132130 - DNA, 1461 bp, Homo sapiens; identical to SEQ ID NO: 122738

SEQ ID NO: 132131 - DNA, 1098 bp, Homo sapiens; identical to SEQ ID NO: 117582

SEQ ID NO: 132132 - DNA, 1248 bp, Homo sapiens
tcacttagcattaggtatatctcctaatgctatccctccccgctcccccgacctcacaacagtctccagagtgtgatgttccccttcctgtgtccatgtgttctcattgttcaattcccatctgttgtttcctgactttttaatgattgccattctaactggtgtgagatggtatctcattgtggttttgatttcaatttctctgatggtcagtgacgatgagcattttttcatgtgtcttttggctgcataaatgtcttcttttgagaagtgtctgttcatctcctttgcccactttttgatgggcttgtttgtttttttcttgtaaatttgtttgagttcattgtagattctggatattagcccttcgtcagatgagtaggttgcgaaaattttctcccattctgtaggttgcctgttcactctgatggtagtttcttttgttgtgcagaagctctttagtttaattagatcccatttgtcaattttggcttttgttgccattgcttttggtgttttagacatgaagtccttgcccacgcctgtgtcctgaatggtattgcctaggttttcttctagggtttttatggttttaggtctaacgtttaagtctttaatccatcttgaattgatttttgtataaggtgtaaggaagggatccagtttcagctttctccatatggctagccagttttcccagcaccatttattaaatagggaatcctttccccattgcttgtttttctcaggtttgtcaaagatcagatagttgtaggtatgtggcgttatttctgagggctctgttctgttccattgatctatatctctgttttggtaccagtaccatgctgttttggttactgtagccttgtagtatagtttgaagtcaggtagtgtgatgcctccagctttgttcttttggcttaggattgtcttggcaatgcaggctcttttttggttccatatgaactttaaagtagttttttccaattctgtgaagaaagtcattggtagcttgatggggatggcattgaatctataaattaccttgggcattatggccattttcacggtattgattcttcctatccacgagcatggaatggtcttccatttgtttgtatcttcttttatttccttgagcagtggtttgtagttctccttgaagaggtccttcacatcccttgtaagctggattcctaagtattttattctctttgaagcagttgtgaatgggagttcactcat

SEQ ID NO: 132133 - DNA, 1977 bp, Homo sapiens
atgagtgaattcccattcacaattgcctcaaagagaataaaatacctaggaatccaacttacaagggatgtgaaggacctcttcaaggagaactacaaaccactgctcaaggaaataaaagaggatacaaacaaatggaagaacatcccgtgctcatggataggaagaatcaatattatgaaaatggccatactgcccaaggtaatttatagattcaatgccatccccatcaagctgccaatgacattcttcacagaattggaaaaagctactttaaagttcatatggaaccaaaaaagagccagcattgccaagtcaatcctaagccaaaagaacaaagctggaggcatcacactacctgacttcaaactatactacaaggctacggtaaccaaaacagcatggtactggtaccaaaacagagatatagaccaatggaaaagaacagagccctcagaaataataccacacatctacaaccatctgatctttgacaaatctgagaaaaacaagcaatggggaaaggattccctatttaataaatggtgctgggaaaactggctagccatatgtagaaagctgaaactggatcccttccttacaccttatacaaaaatcaattcaagatggattaaagacttaaacgttagacctaaaaccataaaaaccctagaagaaaacctaggcattaccattcaggacataggcatgggcaaggacttcatgtctaaaacaccaaaagcaatggcaacaaaagccaaaattgacaaatgggatctcattaaactaaagagcttctgcacagcaaaagaaactaccgtcagagtgaataggcaacctacaaaatgggagaaaatttccacaacctactcatctgacaaagggctaatatccagaatctacaatgaactccaacaaatttataagaaaaaaaacaaccccatcaaaaagtgggcgaaggacatgaacagacacttctcagaagaagacatttatgcagccaaaaaacacatgaaaaaatgctcaccatctctggccatcagagaaatgcaaatcaaaaccacaatgagataccatctcacaccagttagaatggccatcattaaaaagtcaggaaacaacagggacatggatgaattggaaatcatcattctcagtgaactatcgcaagaacaagaaaccaaacgctgcatattctcactcatagagaataaaatacctaggaatccaacttacaagggatgtgaaggacctcttcaaggagaactacaaaccactgctcaaggaaataaaagaggatacaaacaaatggatgaacattccatgctcatgcgtaggaagaatcaacattgtgaaaatggccatactgcccaagaattggaaaaagctactttaaagttcatatggaaccaaaaaagagcccacatcgccaagtcaatcctaagccaaaagaacaaagctggaggtatcacactacctgacttcaaagtatactacaaggctacagtaaccaaaacagcatgccttccatctccatggttacgcggcggtggctgcgagcgcccaactgctccgaccgtcgcggtgagggccccaggacagaagcagacagacacggctcctgctgtcgattccgatccagagctggaacagcggtccattcctgccggaggcgccaccccagggctgcagggctgccctctagcctttgcgcggaagccggacctcgggagacttagtaattggagggtgggtgcagggaaggtgctgagccgcgtccctagcgacccggcagcggcgcgcatgcgcacacagatccggagcgcgcacacagatccggagcgcgcacacagatccggagcgcgcacacagatccggagcgcgcacacagatccggagcgcgcacacagatccggagcgcgcacacagatccggagcgcgcacacagatccggagcgcgacggactctcccactga

SEQ ID NO: 132134 - DNA, 1962 bp, Homo sapiens
tcacccactttttgatggggttgattttttcttgtaaatttgtttaagttctttgtagattctggatattagccctttgtcagataggtagattgtaaaaattttctgccattctgtaggttgtctgttcactctgatggtagtttcttttgctgtgcagaagctcttcagtttaattagatcccatttgtcaattttggcttttgttgccattgcttttggtgttttagtcatgaagtccttgccaatgcctatgtcctgaatggtattgcctaggttttcttctagggtttttatggttttaggtctaacatttaagtctttaatccatcttgaattaatttttgtataaggcataaggaagagatccagtttcagctttctatatatgcctagccagttttcccagcaccatttattaaatagggaatcctttccccattgcttgtttttctcaggtttgtcaaagatcagatggttgtagatgtgtggtattatttctgagggctctgttctgttccatgggtctatatctctgttttggtaccagtaccatgctgttttggttactgtagacttgtagtatagtttgaagtcaggtagcgtgatccctccagctttgttcttttggcttaggattgtcttggcaatgcaggctcttttttggttccacatgaactttaaagtagttttttccaattctgtgaagaaaatcattggtagcttgatggggatggcattgaatctataaattaccttgggcagtatggccgttttcacaatattgattcttcctacccatgagcatggaaggttcttcctttttttgtgtccttttgtttcgttgagcagtggtttgtagttctccttgaagaggtccttcacatcccttgtaagttggattcctaggtattttatactctttgaagcaattgtgaatgggagttcactcatgatttggctctctgtttgtctgttgttggtgtataagaatgcttgtgatttttgcacattgattttgtatcctgagactttgctgaagttgcttatcagcttaaggagatttgagctgttattcctttccatgtttagtgcttccttcaggagctcttgtaaggcaggcctggtggtggcagaatctctcagcatttgattgtctgtaaaggactttatttctccttcacttatgaagcttagtttggctggatatgaaattctgggttgcaaattctttactttaagaatgttgaatattggcccccactctcttctggcttgtagagtttctgcagagagatcagctgttagtctgatgggcttccctttgtgggtaacccgacctttctgtctctctgcccttaacattttttccctcatttcaactttggtgaatctgacaattatgtgtcttggagttgctcttctcgaggagtatttttgtggcattctctgtatttcctgaatttgaatgttggcctgccttgctaggttggggacgttctcctggataacatcctgcagagtgttttccaacttggttccattctccccatcactttcaggtacaccaatcagaagtagatttggtcttttcacatagtcccatatttcttggaggctttgttcatttctttttactattttttctctaaacttctcttctctcttcatttcattcatttgatcttcaatcactgataccctttcttccacgtgatcgaattggctactgaagcttgtgcatgcatcacgtggttctcttgccaaggttttcagctccatcaggtcatttaaggtcttctctaagctgtttattcgtttgaagccttcttctctcaactcctcagagtcattctccatccagctttgttccatcgctggcgaggagctgcattcctttggaggagaagaggcgctctgatgtttagaattttcagcttttctgctctggtttctccccat

SEQ ID NO: 132135 - DNA, 1644 bp, Homo sapiens
atggggaaaaaacagagcagaaaaactggaaacactaaaaagcagagtgcctcttctcctccaaaggaacgcagctcctcaccagcaatggaacaaagctggatggagaatgactttgacgagctgagagaagaaggcttcagacgatcaaactactctgagctatgggaggacattcaaaccaaaggcaaagaagttgaaaactttgaaaaaaatttagatgaatgtataactagaataaccaatacagagaagtacttaaaggagctgatggagctgaaagccaaggctcgagaactacgtgaagaatgcagaagcctcaggagccaatgcgatcaactggaagaaagggtatcagtgatggaagatgaaatgaatgaaatgaagcgagaagggaagtttagagaaaaaagaataaaaagaaacgaacaaagcctccaagaaatacgggactatgtgaaaagaccaaatctacgcctgattgctgtacctaaaagtgacggggagaatagaaccaagttggaaaacactctgcaggatattatccaggagaacttccccaatctagcaaggcaggccaacattcagattcaggaaatacagagaacaccacaaagatactcctcgagaagagcaactccaagtcacataattgtcaggttcaccaaagttgaaatgaaggaaaaaatgttaagggcatccagagagaaagtgttggaagttctggccagggcaattaggcaggagaaggaaataaagggtattcaattaggaaaagaggaagtcaaattgtccctgtttgcagatgacatgattgtatatctagaaaaccccattgtctcagctgaaaatctccttaagctgataagcaacttcagcaaagtctcaggatacaaaatcaatgtacaaaaatcacaagcattcttttacaccaataacaggcaaacagaaagccaaatcattagtgaactcccattcataagtgcttcaaagagaataaaatacctaggaatccaacttacaagggatgtgaaggacctcttcaaggagaactacaaaccactgctcaatgaaataaaagaggatacaaacaaatggaagaacattccatgcttgtgggtaggaagaatcaatatcatgaaaatggccatactgcccaaggtaatttatagattcaatgccatccccatcaagctaccaatgactttcttcacagaattggaaaaaactactttaaagttcatatggaaccaaaaaagagcccgcatcgccaagtcaatcctaagccaaatgaacaaagctggaggcatcactctacctgacttcaaactatactacaaggctacagtaaccaaaacagcatggtactggtaccaaaacagagatatagatcaatggaacagaacacagccctcagaaataacgccatgtatctacaactacctggtctttgacaaacctgagaaaaacaagcaatggggaaaggattccctacttaataaatggtgctgggaaaactggccagccatatgtagaaagctgaaactggatcccttccttacaccttatacaaaaatcaattcaagatggattaaagacttaaacgttagacctaaaaccataaaaaccctagaagaaaactag

SEQ ID NO: 132136 - DNA, 1191 bp, Homo sapiens
tcagttttcccagcaccatttattaaatagggaatcctttccccattgcttgtttttctcaggtttgtcaaagatcagatagttgtagatatgtggcgttatttctgagggctctgttctattccattgatctatatctctgttttggtaccagtaccatgctgttttggttactgtagccttgtagtatagtttgaagtcacgtagcatgatgcctccagctttgttcttttggcttaggattgacttggcgatgcgggctcttttttggttccatatgaactttaaagtagttttttccaattctgtgaagaaagtcattggtagcttgatggggatggcattgaatctataaattaccttgggcagtatggccattttcacaatattgattcttcctacccatgagcatggaatgttcttccatttgtttgtatcctcttttatttcactgagcagtggtttgtagttctccttgaagaggtccttcacgtcccttgtaagttggattcctaggtattttattctctttgaagcaattgtgaatgggagtttactcatgatttggctctctgtttgtctgttattggtgtataagaatgcttgtgatttttgtacattgattttgtatcctgagactttgctgaagttgcttatcagcttaaggagattttggactggacccttctggtctacgatcaccctggtggagctctggaggatgaagggcagccatgctgttttggttactgtagccttgtagtatagtttgaagtcaggtagcgtgatgcctccagctttgttcttttggcttaggattgacttggtgatgcgggctcttttttggttccatatgaactttaaagcagttttttccaattctaatttcttgagagtttttagcatgaagcgttgttgaattttgtcaaaggccttttctgcatctattgagataatcatgtggtttttgtctttggttctgtttatatgctggattacatttattgatttgcatatattgaaccagccttgcatcccagggatgaagcccacttgatcatggtggataagctttttgatgtactgctggatttggtttgccagtattttattgaggatttttgcatcaatattcatcaaggatattggtctgggataagtctcttcttcaatatttttattaactcccat

SEQ ID NO: 132137 - DNA, 1677 bp, Homo sapiens; identical to SEQ ID NO: 121957

SEQ ID NO: 132138 - DNA, 1816 bp, Homo sapiens
aataaacagcttagagaagaccttaaatgacctgatggagctgaaaaccttggcaagagaaccacgtgatgcatgcacaagcttcagtagccaattcgatcacgtggaagaaagggtatcagtgattgaagatcaaatgaatgaaatgaagagagaagagaagtttagagaaaaaatagtaaaaagaaatgaacaaagcctccaagaaatatgggactatgtgaaaagaccaaatctacttctgattggtgtacctgaaagtgatggggagaatggaaccaagttggaaaacactctgcaggatgttatccaggagaacgtccccaacctagcaaggcaggccaacattcaaattcaggaaatacagagaatgccacaaaaatactcctcgagaagagcaactccaagacacataattgtcagattcaccaaagttgaaatgagggaaaaaatgttaagggcagagagacagaaaggtcgggttacccacaaagggaagcccatcagactaacagctgatctctctgcagaaactctacaagccagaagagagtgggggccaatattcaacattcttaaagtaaagaatttgcaacccagaatttcatatccagccaaactaagcttcataagtgaaggagaaataaagtcctttacagacaatcaaatgctgagagattctgccaccaccaggcctgccttacaagagctcctgaaggaagcactaaacatggaaaggaataacagctcaaatctccttaagctgataagcaacttcagcaaagtctcaggatacaaaatcaatgtgcaaaaatcacaagcattcttatacaccaacaacagacaaacagagagccaaatcatgagtgaactcccattcacaattgcttcaaagagtataaaatacctaggaatccaacttacaagggatgtgaaggacctcttcaaggagaactacaaaccactgctcaacgaaacaaaaggacacaaaaaaaggaagaaccttccatgctcatgggtaggaagaatcaatattgtgaaaacggccatactgcccaaggtaatttatagattcaatgccatccccatcaagctaccaatgattttcttcacagaattggaaaaaactactttaaagttcatgtggaaccaaaaaagagcctgcattgccaagacaatcctaagccaaaagaacaaagctggagggatcacgctacctgacttcaaactatactacaagtctacagtaaccaaaacagcatggtactggtaccaaaacagagatatagacccatggaacagaacagagccctcagaaataataccacacatctacaaccatctgatctttgacaaacctgagaaaaacaagcaatggggaaaggattccctatttaataaatggtgctgggaaaactggctaggcatatatagaaagctgaaactggatctcttccttatgccttatacaaaaattaattcaagatggattaaagacttaaatgttagacctaaaaccataaaaaccctagaagaaaacctaggcaataccattcaggacataggcattggcaaggacttcatgactaaaacaccaaaagcaatggcaacaaaagccaaaattgacaaatgggatctaattaaactgaagagcttctgcacagcaaaagaaactaccatcagagtgaacagacaacctacagaatggcagaaaatttttacaatctacctatctgacaaagggctaatatccagaatctacaaagaacttaaacaaatttacaagaaaaaatcaaccccatcaaaaagtgggtga

SEQ ID NO: 132139 - DNA, 1395 bp, Homo sapiens
ttaattgtaaatttgtttgagttctttgtagattctggatattagccctttgtcagatgagtagattgcaaaaattttctcccattctgtaggttgcctgttcactctgatggtagtttcttttgccatgcagtagctctttagtttaattagatcccatttgtctattttggcttttgttgccattgctttgagtgttgtagtcacgaagtccttgcccatgcctatgtcctgaatggtattgcctaggttttcttctagggtttttatggttttcggtctaacatgtaagtctttaatccatcttgaattaatttttgtaaaagttgtaaggaacggatccagtttcagtgttctacatatggctagccagttttcccgacaccatttattaaatagggaatcctttccccatttcttgtttttgtcaggtttgtcaaagatcagatagttgtagatgtgtggtgttatttctgtgggctctgttctgttccattggtctatatctctgttttggtacaagtaccatgctgttttggttactgtatctttgtagtatagtttgaagtcaggtagcatgatgcctccagctttgttcttttggcttaggattgtcttggcaatgcacgctcttttttggttccatatgaactttaaagtaattttttccaattctgtgaagaaagtcattggtagcttgatggggatggcattgaatctataaattactatgggcagtatggccatcttcacaatattgattcttcctacccatgagcatggaatgttcttccgtttgtttgtatcctcttttatttcattgagcagtggtttgtagttctccttgaagaggtccttcatatcccttgtaagttggattcctaggtattttattcttggacagtcaccatctggatagttatcagggatgtaaactgtaaacttaaatacgccatcttggtaaagtccatgccgtatgaatattactccaaaccacactttgggtctgtcctgcctctcaggcgtgcggctgaccctcaaggcctctccctcatctgacttagaggttcccagaaccttagaccatttgcccccaccccatttctcagctgaggaaacctccaccaccccttgggccctctgtctccaggagcctggccagccaagactcacatcctcaggtgagtggcaaccaccagaagtggttgtctcagggttagtgccattatttattttcttctttttggtgtcggttgctcctgtaccaacactagggctggtctggggaggagagtctctcaactgttgggacagacctggaagaagggattgctgatttgcatgtttcatggctgcctctgctagcccatgagtcagcagcccactccaattcat

SEQ ID NO: 132140 - DNA, 1056 bp, Homo sapiens
ctagcaccatttattaaatagggaatcctttccccattgcttgtttttctcaggtttgtcaaagatcagacagttgtagatatgcggcgttatttctgagggctctgttctgttccattgatctatatctctgttttggtaccagtaccatgctgttttggttactatagccttgtagtatagtttgaagtcaggtagcgtgatgcctccagctttgttcttttggcttaggattgacttggtgatgcaggctcttttttggttccatatgaactttaaagtagttttttccaattctgtgaagaaagtcattggtagcttgatggggatggcattgaatctataaattaccttgggcagtatggccattttcacgatattgattcttcctacccatgagcatggaatgttcttccatttgtttgtatcctcttttatttcattgagcagtggtttgtagttctccttgaagagctccttcacgtcccttgtacgttggattcctaggtattttattctctttgaagcaattgtgaatgggagttcactcatgatttggctctctgtttgtctgttattggtgtataagaatgcttgtgatttttgtacattgattttgtatcctgagactttgctgaagttgcttatcagcttaaggagattttggggtgagacaatggggttttctagatatacaatcatgtcatctgcaaacagggacaatttgacttcctcttttcctaattgaataccttttatttccttctcctgcctaattgccctggccagaacttccaacacgcatgatccttcatgccctgccacagcccaacccttcctgcaagttgaagcctcatgtcccacatagcccatggccttttgatgttgtataagggctctaatatggagaacatccagaaaactcaaaggcccttgaccagccacttctcttcctctccctgactgctccactttaatgcgactcaaacatacttcacagagctccgtactctctctttgggtcacctcatccactctcatagcttttggtaccat

SEQ ID NO: 132141 - DNA, 1464 bp, Homo sapiens; identical to SEQ ID NO: 123064

SEQ ID NO: 132142 - DNA, 2016 bp, Homo sapiens
atggaggaaactgcccccatgattcaattatctccacctggccctgctcttgacatgtggggaattattacaattcaagatttcaataagtgtatgactcttaaattccggttaaaaaatttttcaaggatcaacaaaattgatacaccgctagcaagactaataaagaagaaaagagagaagaatcgaatagacacaataaaaaatgataaaggggatatcaccagtaatcccacagaaatacaaagtaccatcagagaatactacaaacacctctacacaaataaactagaaaatctagaagaaatggataaattcctcgacacatacaccctcccaagactaaaccaggaagaagttgaatctctgaatagaccaataacaggctctgaaattatggcaataatcaatagcttaccaaccaaaaagagtccaggaccagatggattcacagccaaattctaccagaggtacaaggaggaactggtaccattccttctgaaactattccaatcaatagaaaaagagggaatcctccctaactcattttatgaggccagcatcatcctgataccaaagccgggcagagacacaaccaaaaatgagaattttagaccaatatctttgatgaacattgatgcaaaaatcctcaataaaatactggcaaaccgaatccagcaacacatcaaaaagcttatccaccatgatcaagtgggcttcatccctgggatgcaaggctggttcaatatacgcaaatcaataaatgtaatccagcatataagcagaaccaaagacaaaaaccacatgattatctcaatagatgcagaaaaggcctttgacaaaattcaacaacccttcatgctaaaaactctcaataaattagggaataaaatacctaggaatccaacttacaagggatgtgaaggacctcttcaaggagaggtccttgaaccactgctcaatgaaataaaagaggatacaaacaaatggaagaacattccatgctcatgggtaggaagaatcaatatcgtgaaaatggccatactgcccaaggtaatttatagattcaatgccatccccatcaagctaccaatgactttcttcacagaattggaaaaaactactttaaagttcatatggaaccaaaaaagagccctcatcgccaagtcaatcctaagccaaaagaacaaagctggaggcatcacgctacctgacttcaaactatactacaaggctacagtaaccaaaacagcatggtactggtaccaaaacagagatatagatcaatggaacagaacagagccctcagaaataacgctgcatatctacaactatctcatctttgacaaacctgagaaaaacaagcaatggggaaaggattccctatttaataaatggtgctgggaaaactggctagccatatgtagaaagctgaaactggatcccttccttacaccttatacaaaaattaattcgagatggattaaagacttaaacgttagacctaaaaccataaaaaccctagaagaaaacctaggcattaccattcaggacataggcatgggcaaggactacatgtctaaaacaccaaaagcaatggcaacaaaagccaaaattgacaaatgggatctaattaaactcaagagcttctgcacagcaaaagaaactaccatcagagtgaacaggcaacctacaaaatgggagaaaattttcgcaacctactcatctgacaaagggctaatatccagaatctacaatgaactcaaacaaatttacaagaaaaaaacaaacaaccccatcaaaaagtgggtgaaggacatgaacagacacttctcaaaagaagacatttatgcagccaaaaaacacatgaaaaaatgctcaccatcactggccatcagagaaatgcaaatcaaaaccacaatgagataccatctcacaccagttagaatggcaatcattaaaaagtcaggaaacaacagggacatggatgatattggaaatcatcgttctcagtaa

SEQ ID NO: 132143 - DNA, 1770 bp, Homo sapiens
ttagtattcattaagtggaagtggctcatgataaagatcttcatcctcatcatcttcatgttgagttgtctggggaggaagaggaggggttggtcttgctgtctcagcagtcatagagatgcaagaaagtccacgtataagtggacctgctcggttaaacccacgttgttcaagggtcagctgaatttgatttctagcttcctctgttaactgttcatggggacttggaatatcacttgaatttctgatactgtcagccgtaggcatcctgcctgcacttttaaaattagaaattctgaatttaaacatgaagtccttgcccacacctatgtcctgaatggtgttgcctaggttttcttctagggtttttatggttttaggtctaacatgtaagtctttaatccatcttgaattaatttttgtataaggtgtaaggaagggatccagtttcagctttctacatatggctagccagttttcccagcaccatttattaaatagggaatcctttccccattgcttgtttttctcagatttgtcaaagatcagatggttgtagatacgtggcattgtttctgagggctctgttctgttccattgatctatatctctgttttggtaccagtaccatgctgttttggttactgtagccttgtagtatagtttgaagtcaggcagcgtgatgcctccagctttgttcttttggcttaggattgacttggcaatgcgggctcttttttggttccatatgaactttaaagtagttttttccaattctgtgaagaaagtcattggtagcttgatggggatggcattgaatctataaattaccttgggcagtatggccattttcacaatattgattcttcctacccatgagcatgaaatgttcttccatttgtttgtatcctcttttatttcgttgagcagtggtttgtagttctccttgaagaggtctttcacatcccttctaagttggattcctaggtattttattctctttgaagcaattgtgaatgggagttcactcatgatttggctctctgtttgtctgttattggtgtataagaatgctcgtgatttttgtacattgattttgtatcctgagactttgctgaagttgcttatcagcttaaggagattttgggctgagacaatggggttttctagatatacaatcatgtcatctgcaaacagagacaatttgacttcctcttttcctaattgaataccctttatttccttctcctgcctaattgccctggccagaacttccaacactatgttgaataggaatggtgagagagggcatccctgtcttgtgccagttttcaaagggaacgcttccagtttttgcccattcagtatgatattggctgtgggtttgtcatagataactcttattattttgagatacatcccatcaatacctaagttattgagagtttttagcatgaagggttgttgaattttgtcaaaggccttttctgcatctattgagataatcatgtggtttttgtttttggttctgtttatatgctggattacatttattgatttctgtatgtcgatgtctaaaacgccaaaagcaatggcaacccaagccaaaattgacaaatgggatctaattaaactaaagagcttgtctccaacaaccgagctccctgagtgagcaattcctgtcccttttaagggcttgcaactccacttggtaacctgattgttaatcactctttgttggtctacttcgcttttctgtctcaacttcat

SEQ ID NO: 132144 - DNA, 4755 bp, Homo sapiens
ctactccggcttctctttgtcctgcttctgctcctcctccagtgccaaggttcgctcacgctcctttaccagctggacgccacagtaggtgacaaacaggatggacagcgtggtctgggggaaccctgtgagtagcaggcgccgggcaaccagctctgtgaatttgaggctgttcaggctcacaaggttgtacatgatgatggcccagaagttcatggctccaaacagggcccggaccctacgggacatctgcactgacagagaggcctcaattcgtgctaggggcccccactctgccagtttttgcatccagagctcaaagttgaggccaaagcagttaaggaatgaccacaggtagacaatgtcacaaggcccaagccacagtgtggtgatggcaaatgtggccactgtggctgccagctctgggatcacagcggaatgctccccaccaatgtggttatacacatatttgcaaagccagtcgttgatgccacggtcaaagtgcgtttccgcaaagacgtagagtgcggtgatgcacttgggaggctggggtgggtccaggtggtcgaggcatgccacagtgttgacaacaccaaagaggacggccgccttcacccagtcatacaccaggtttgaataggctaggccagcgagggcactgtctgggaggcggttggcgaacttgaggtcgctggggatagtgaggatgtagaagaagtgaaagaagatgtcgacggccatgatggccaccacgcttaggcctgcctgggctcggatgtgccacagctcaccctcgcgtctcactggctccacctggctcacctgagcatggaagcgatcaaaggtcatgatgggcccgaagaagaagaagggcaggtagaagttgtacttgagcaggtcagctaaggagtagtggcggtcagggtgggcacagctctccagtgcaaagctggtgcaacgcagcactgtgaagctgctgcccccatgaaacagcacctcttgaagatcaaaagtgcctgttacaaacccgctctgccaagagattagggggtccatcttgaaggaggccaggctggccaagccaaggccaagacagagccagggctggcccaaaagcgaggccacatagaggcccacacagtgaccaagcagcagcagcaggtaccaagggcccattgtgcccatcacagccaaggccccgtacacagcatacatccaggagcggagctttggggcaaccatcgtgcagagtttagcaaacagcacatgtccggagagggcaaagatgatgacgttgcgaaaggaggtgaaccacatcacccactcgaagtcagccacatccatcttccggccaatgtactcccagccaggtcgcacagactcccggaaggccttcctgtgggccccatcttgtgaagcctcaaggaggccccggccagcataggccagggccccactcagcaccagagagtagaggcccagctcagccgccggcaatgctgtcttgatgcccatagcctggacagggccttgatcctcccctaaatcttcatccccagccctgtagccatctcccctgggccccccagcagccgacggtctcctcgtacagatggaggggtcatgggccagataggggcagggacctaggatgagggcgatgaacacctgcccgagggactgcatctgtccattcacagccgccttgccatcccagagctctcgcctctgccagtgggctgctgggcctccctgctgctgtaacccagccagcccagggtctcctgcagtgtcccaccagggcttctcttctgccttcctggcctggcccaggatctcatggtacatccggaagtcctcctcctttccccgcagggcactgcccagggcagcctttagcatttcattctcctccacctggatggccagcctggttgtcagctcttccatttgggattccacgggcacatcggagagctgggcaaaggatgggtccttcttctcgctcccggttgggttgtgcctgttgttagaggtgggcagacctgttttggtcctgggagctgctctctgggaggctgatgccttccctggctccaggcgtatcttctccagatgttgctccagcaccacggtgcggtgtcgctcctcctgcagcttcctctctgactccaggagcttgctgttgctctcctccacccgtttctgcaggacagtgacaaactcggtgagccggtcacgctccacctcggcagcctgccagagggccttgatctctgacacttgtgcctgccagcctttttgttctggggagtccgagaaccgagaagatccaagcctgccaacatgatcgcctgctgaggccggggacttggtcaggcctgggtcctccaggaactgggtataggcagggctgacctcgcggccactggacccctcacccactcctttattccgaagatagtgcacattgagttgtccgatctccatctccagctgtcgcactttggcctcccgctcagctaccatggcctgcagctgggcgactaggctgttgctccgctgagcctcgctgttcagttgctggtccaggtggtgctgggacactcgcgttttctcctcctgcagactcaggctgcctaggatctcctgtagctgcttcagctggtctctgatggtagtttcttttgccatgcagaagctctttagtttaattagatcccatttgtctattttggcttttgctgccattgcttttggtgttttagtcatgaagtccttgcccatgcctatgtcctgaatggtatttcctagcttttcttctagggtttttatggtcttaggtctaacatttaaatctttaatccatcttgaattaatttttgtataaggtgtaaggaagggatccagtttcagctttctacatatggctagccagttttcccagcaccacttattaaatagggaatccttcccccatttcttgtttttgtcaggtttgtcaaagatcagatggttgtagatgtgtggtgttatttctgaggcctctgttctgttccattggtctatatatctgttttggtaccagtaccatgctgttttggttactgtagccttgtagtatagtttgaagtcaggtactatgatccctccagctttgttctttttgcttaggattgtcttggcaatgtgggctcttttttgattccatatgaactttaaagtagttttttccaattctgtgaagaaagtcattggtagcttgatggggatggcactgaatctataaattactttgggcagtatggccattttcatgatattgactcttcctacccatgagcatggaatattcttccatttgtttgtgtcctcttttatttcattgagcagtggtttgtagttcttcttgaagaggttcttcacatcccttttaagttggattcctaggtattttattctcatgagggcgtcgatgagctcgtcatcatgccggcccttctccaccagggttcccatctgactcttgagggtcttcatctcacttgacagcagcttgttccgagacctcatgccctcgaacttcttttttagctcttcaagctctctctggaggacatcccgttcactggcaagtttctccaagccttcctgtttttccctttccaggctgcggatcctcagcaggtttttctcctgtgccgacagcttccttgggtctggatagacagacaactcatcactggctgttcccgcagactggctccgggcctggcccaattgcttctcaagctcttgaaccttgctctgcaaaacaagaatttgttgagcccgacccctccaggtccctggcgaagataggagctgctgaacgttgatgtcttccccaacctctctggccaaaaccttctgtgccatccgcagctcctgcttcacagactggatctggtttcggaggtcactcatcttcaagttggtggccaccagcctgtcctgcagggccttcacctctggggtctccagctcttgagtttcatgaactgtcactggtttagtaaaatgggctctggggaataagtccccatttccaatagccacttttactctgtagatttggagccccacgaaagggaaagtgttcataatatgaactgccccataaagaacaggattccactgggcagtagtgagctccctgtccctggagtaaggtggagtctggatgtgtccccagtgaggatgttcccgctccagctcctggatgcgattggtcagctgcttcaccctggtttttgcaccctctgattctgccatcaacagccggttcttttttgatagctccacaattttggtggcgaccacgtctccggctacaccggctgtccctgtgaaggcaaatctgtcctcttctattttctttttgaggtgtttgatttcaaagtccctttccttcagcagcttatacaatcgcccgttctcgtccaccgtttccctgagctcatttcgaaggtgttcaatctcatcttcaagcaccctcttctcaaagctatttttcgagtttggctcccctgcgtggagaaggctgaggccatctgaaacctccaagggctcctcttggtcgtcagctctgcttttgaggctcagttctttttccctctttttctccatctgcttctgtaaccgtttgtgctgcatctcctgcattgccttgaactggagccgcaaagtgttctgtgagctttcatctgctgccat

SEQ ID NO: 132145 - DNA, 2793 bp, Homo sapiens; identical to SEQ ID NO: 118326

SEQ ID NO: 132146 - DNA, 3480 bp, Homo sapiens
ttaccattcattaaatggaagtggaccatcataaaggtcttcatcctcgccatcttcacattgagtaggcaaagaccaaatgtatccagacagcaaacagaaccactggaaggtacaggaatcagtatatctagaggtagccaagcaagttcccaggtggcccacagctgggggcggggagtggtgtcccaaatatgcctgcgcatcagagggggacatgcagctcgacaccactctggcctcactccctggagattctaattcagggagtcccacctccagttctttcttcctcagctgcctttccttcccaactcccaccctctcctcctgccccaccctagcacctgttccatttcgcattcctgcagggctttcctctcccattgagctctcacctgagaagacagatttgccagtgaaagccccagagagttttgccatcacaccttttttctttcttggttctgttgtatggggtggggtctggcctgccacattgttacatgtcaccatggcaaggctgaactgtgcttcccagaattcccttttctgcataattccagttagggtgggccacaagagacatcttgcacaggacaggacagcatcatattgtctgtgcattcggtagctcggcactgtggcagccgtgcatgtgttgtcatttgtctgccggctcatgttgctggtgagagacggcagcaggcctgcagctactacacttctcctggatcctctctcagcttttgcaaatcctgctggggacttttgaaaaggaactcctgaatgtagatggcccctcttgtccttgtcaacataagattctttggctccatgacctctaaagaggctgttgtttcctgactttttaatgatcgccattctaactggtgtgagatggtatctcattgtggttttgacttgcatttctctgatgatcagtgatgatgagcattttttcatgtgctttttgtctgcataaatgtcttcttttgagaagtgtctgttcatgtccttcgcccactttttgatggggttgtttgtttttttcttgtaaatttgtttgagttcattgtagattctggatattagccctttgtcagatgagtaggttgcaaaaattttctcccattctgtaggttgcctgttcactctgatggtagtttcttttgctgtgcagaagctctttagtttaattagatcccatttgtcaattttggcttttgttgccattgcttttggtgttttagacatgaagtccttgcccatgcctatgtcctgaatggtaatgcctaggttttcttctagggtttttatggttttaggtctaacatgtaagtctttaatccatcttgaattaatttttgtataaggtgtaagtacaggatccaatttcagctttctacatatggctagccagttttcccagcaccatttattaaatagggaatcctttccccattgcttgtttttgtcaggtttgtcaaagaacagatagttgtagatatgcggcgttatttctgagggctctgttctgttccattggtctatatctctgttttggtaccagtaccatgctgttttggttactgtagccttgtagtatagtttgaagtcaggtagcatgatgcctccagctttgttcttttggcttaggattgacttggcaatgcaggctcttttttggttccatatgaactttaaagtagttttttccaattctgtgaagaaagtcattggtagcttgatggggctggcattgaatctataaattaccttgggcactatggccattttcacaatattgattcttcctacccatgagcatggaaagttcttccatttgtttgtatcctcttttatttcattgagcagtggtttgtagttctccttgaagaggtccttcacgtcccttgtaagttggattcctaggtattttattctctttgaagcaattgtgaatgggagttcactcatgatttggctctctgtttgtgtctcatcaatacctaatttacggagagtttttagcatgaagggttgttgaattttgtcagaggccttttctgcatctattgagataatcatgtggtttttgtgtttggttctgtttatatgctggattacgtttattgattttcgtatgttgaaccagccttgcatcccagggatgaagcccacttgatcatggtggataagctttttgatgtgctgctggattcggtttgccagtattttattgaggatttttgcatcaatgttcatcaaggatattggtctaaaattctctttttttgttgtgtctctgccaggctttggtatcaggatgatgctggcctcataaaatgagttagggaggattccctctttttctgttgattggaatagtttcagaaggaatggtaccagctcctccttgtacctctggtagaattcggctgtgaatccatctggtcctggactttttttggttgataagctattaattattgcctcaatttcagagcctgttattggtctattcagagattcagcttcttcctggtttagtcttgggagggtgtatgtgtcgaggaatttatccatttcttctagattttctagtttatttgcatagaggtgtttatagtattctctgatggtagtttgtatttctgtgggatcagtggtgatatcccctttaccattttttattgcatctatttgattcttctctcttttcttctttattagtcttgctagcagtctatcaattttgttgatcttttcaaaaaaccagctcctacgtgcaggtgccaggattgggggctgttccttgggtgctgctgacaagaatggcatcaggtcccttgttccgctcccaccttctaaacctcttcctgtgcctgctactggttgcttcagtcctcctgataaccttgtgacacagaggctgttatttccatttcctcgatgagaccagtaaggtggagaggggcttatcacctgtctgacattgtattgcttgtgagtagcaaatgctggaattggaatccagatgtttctgattccagagttgctctcttctgctgctgctttccagcccatcccatcaagtgagctgaggggagatgtctgattgcagaggccctcacagtccctgagttctaattcactgcgtttggcctgggggtagtacctgaggccatagatgacacttgaagtcaggtggcagccaagctgacgttctgggcactgaacccatttgcagcacaaccaggaagcccacagattggggttttgggagcctgatgcagccattaaggagagggggctggcatgaagaatgcagtcagaagcacagctggaaaagtagggctcaaagcagagtttgaggccaggagggagctggactgagctgccgctgagctgctccacgctgccctggccgctggtgccagctctctcctctccattctgcacttcagaggttcccat

SEQ ID NO: 132147 - DNA, 1784 bp, Homo sapiens
atgaaaaatgataaaggggatatcaccaccgatcccacagaaatacaaactaccatcagaaaatactacaaacacctctatgcaaataaactagaaaatctagaagaaatggataaattcctcaacacatacactctcccaagactaaaccaggaagaagttgaatctctgaataggccaataacaggatctgaaattgtggcaataatcaatagcttaccaaccaaaaagagtccaggaccagatggattcacagccgaattctaccagaggtgcaaggaggaactggtaccattccttctgaaactattccaatcaatagaaaaagagggaatcctccctaactcattttatgaggccagcatcatcgtgataccaaagccgggcagagacacaaccaaaaaagagaattttagaccaatatccttgatgaacattgatgcaaaaatcctcaataaaatactggcaaaccgaatccagcagcacatcaaaaagcttatccaccatgatcaagtgggcttcatccctgggatgcaaggctggttcaatatatgcaaatcaataaatgtaatccagcatataaacagagccaaagacaaaaaccacatgattatcttaatagatgcagaaaaagcctttgacaaaattcaacaatgcttcatgctaaaaacattcaataaattaagtattgatgggacgtatctcaaaatcataagagctatctatgacaaacccacagccaatatcatactgaatgggcaaaacctggaagcattccctttgaaaactggcacaagacagggatgccctctctcaccactcctattcaacatagtgttggaagttctggccagggcaattaggcaggagaaggaaataaagggtattcaattaggaaaagaggaagtcaaattgtccctgtttgcagacgacatgattgtatatctagaaaaccccatcgtctcagcccaaaatctccttaagctgataagcaacttcagcaaagtctcaggatacaaaatcaatgtacaaaaatcacaagcattcttatacaccaataacagacaaacagagagccaaatcatgagtgaactcccattcacaattgcttcaaagagaataaaatacttaggaatccaactcacaagggacatgaaggacctcttcaaggagaactacaaaccactgctcaatgaaataaaagaggatacaaacaaatggaagaacattccatgctcatgggtaggaagaatcaatatcatgaaaatggccatactgcccaaggtaatttatagattcaatgccatccccatcaagctaccaatgactttcttcacagaattggaaaaaactactttaaagttcatatggaaccaaaaaagagcccgcatcgccaagtcaatcctaagccaaaagaacaaagctggaggcatcacactacctgacttcaaactatactacaaggctacagtaaccaaaacagcatggtactggtaccaaaacagagatatagatcaatggaacagaacagagccctcagaaataacaccgcatatctacaactatctgatctttgacaaacctgagaaaatgagtataatagatacagggggatggtatgaggcaccagtcagttccttcttcaaggagggactatgccgcacaggtactgagaatcaggttaacagacagcctccagctgccagtcccttcaaggtttacgtcagctgcacggggtcacttcaccctaggccacactacttcttggagcatccatatccaag

SEQ ID NO: 132148 - DNA, 1071 bp, Homo sapiens
atggccatactgcccaagataatttatagattcaatgccatccccatcaagctaccaatgactttcttcacagaattggaagaaactacgttaaagttcatatggaaccagaaaagagcctgcactgccaagacaaccctaagcaaaaagaacaaagctggaggcatcatgccacctgacttcaaactatactacaaggctacagtaaccaaagcagcatggtactggtaccaaaacagagatatagaccaacggaacagaacagaggcctcagaaataacaccacgcatctacagtctatgggaggtcgccatcaggacagtgaagatggtgaccctgcggaagaggaccctgaaagtgctcaccttcctcgtgctcttcatcttcctcacctccttcctgaactactcccacgccatggtggccaccacctggttccccaagaagatggccctggagctcttggagaacctgaagagactgatcaagcacaggccctgcacttgcacccactgcatcaggcagcatgggctctcagcctggttcgatgagaggttcaaccagatagtgcagctgctgctgactgcccagaacgcgctcttggaggacaacacctaccaatggtggctgaggctccagcaggagaagaagcccaatatcatcaacaataccatcaaggaattcagagcagtacctgggaatgtggacccaatgctggagaagaggatgaacaaggcacccacggcagggtttgaagctgctgccgggagcaaaaccgcccaccatctggtgtaccctgagagcttccgggagctgggggacaatgtcagcatggtcctggtgcccttaaagaccatgaacttggagtgggtggtgagcaccaccaccacgggtgccatttcccacacctacaccccggtcctcgtgaagatcagagtgaaacaggataagatcctgatctaccacccagccttcatcaagtatgtcttcgacaactggctgcagagccacaggcggtacccactcaccagcatcctctcggtcatcttctcaatgcatgtctgcgattag

SEQ ID NO: 132149 - DNA, 2024 bp, Homo sapiens
atggggaaaaaacagagcagaaaaactgaaaattctaaaaatcagagtgcctctccccctccagaggaatgcagctcctctccagcaatggaacaaagctggatggagaatgactttcacgaattgagagaagaaggcttcagatcaaacttctccgagctaaaggaggatgttcgaacccatagcaaagaagctaaaaatcttgaaaaaagattagatgaatggctaactggaataaccagtgtagagaagtccttaaatgacctgatggagctgaaaaccatggcacgagaactatgtgacaaatgcacaagcttcagtagcaaattccatcaactggaagaaagggtatcagtgactgaagatcaaatgaatgaaatgaagagctggttttttgaaaagatcaacaaaattgatagactgctagcaagactaataaagaagaaaagagagaagaatcaaatagaggcaataaaaaatgataaaggggatatcaccaccgatcccacagaaatacaaactaccatcagagaatactataaacacctctacacaaataaactagaaaatctagaagaaatggatacattcacgggcacatacaccctcccaagactaaaccaggaagaaattgaatcactcaataaaccaataacaggctctgaaattgaggcaataattaatagcttaccaaccaaaaaaagtccaggaccagacggattcacagctgaattctaccagaggtacaaggaggagctgcttgttcaacatacgaaaattgataaaccttattcagcttataaaccgaacccaagacccgtgaccgccactagactaagtcgaattggacgcagagttcatcaatatctagaaaaccccattgtctcagcccaaaatctccttaagctgaaaagcaacttcagcaaagtctcagggtacaaaatcaatgtgcaaaaatcacaagcattcttatacatcaagaagagacaaacagagagccaaatcatgagtgaactcccattcacaattgcttcaaagagaataaaatacctaggaatccaacttataagggatgtgaaggacctcttcaaggagaactacaaaccactgctcaatgaaataaaagagggcacaaacaaatggaagaatattccatgctcatggataggaagaatcaatatcgtgaaaatggccatactgcccaaggtaatttatagattcaatgccatccccatcaagctaccaatgactttcttcacagaattggaaaaaattactttaaagttcatatggaaccaagaaagagcctgcattgccaagacaatcctaagcaaaaagaacaaagctggaggcatcatgctacctgacttcaaactatactacaaggcttacagtaatcaaaacagcatgggactggtaccaaaacagatatctagaccaatggaacagaacagagccctcagaaataaccccacacatctacaaccatctgatctttgacaaacctgacaaaaacaagaaatggggaaaggattccctatttaataaatggtgctgggaaaactggctagccatatgtagaatgctgaaacttgatcccttccttacaccttacacaaaaattaattcaggatggattaaagacttaaattttagacctaaaaccataaaaactctagaagaaaacctagacaataccattcaggacacaggcatgggcaagaacttcatgactaaaacaccaaaagcaatggcaacaaaagccaaaattgacaaatgggatctaattaaactaaagagcttcagcacagcaaaagaaactgccatcagagtgagcaggagaaagaattgctcagttgttgacataaagctgggaagcagtacagtgaaaagaactggaggctttggtagcactaatccaacaggaaaggctatatattgggttaatcaagtgtctgacaaaagacctatttgtacagtagacctgctgttggatgcttaccggttgacacacaggactggtt

SEQ ID NO: 132150 - DNA, 2746 bp, Homo sapiens
atgggcaaggtaaacctgctgatggagagtcatgaatgccagagtgagaatttcagaattgattcagtaacaatcagtaaacgaacattttgcctgcagtacactgttaggcactccatgtcctcaaacacaaggtctggccttgtacacaaacaaccagagaagtggcaagaatcaccacataatgtagaagaaaacctgagctgggccttacagggtggggaaggattaacaaggagaagaaaagaacagaatgagcaatcttatatggagttaaaaattggttatggtgtagaaaagctttttggaatttctgaagcaatttcagtggcctctgctgatgatacccagacaaacacggtctggagtggacctccagcaaactccaacaaacctgcagctgaggtcctgactgttagaaggaaaactaataaacagaaaggacatccacatcaaaaccccatctgtatgtcaccatcatcaaagaccaaagaaatacaaactaccatcagagaatactataaacacctctatgaaaataaactacaaaatctagaagaaatggataaattactggacacatacaccctcccaagactaaaccaggaagaagttgaatccctgaatagaccaataacaggctctgaaattgaggcaataatgaatagcctaccaaacaaaaaaagtccaggaccagatggattcacagccgaattctaccagaggtacaaagaggagctggtaccattccttctgaaactattccaatcgatagaaaaagagggaatcctccctaactcattttatgaggccagcatcattctgataccaaagcctggcataaaaacaacaaaaaaagagagttttagaccaatatccctgatgaacatcgatgcaaaaatcctcaataaaatactggcaaaccgaatccagcagcccatcaaaaagcttatccaccacgatcaagttggcctcatccctgggttgcaaggctggttcaacatacacatatcaatagacataatccatcatataaacagaaccaatgacaaaaaccacataattatctcaatagatgcagaaaagggctttgacaaaattcaacagcccttcatgctaaaaactctcaataaactagcccaaaatctccttaagctgataagcaacttcagcaaagtctcaggatacaaaattaatgtgcaaaaatcacaagcattcctatacactaataacagacaaacagagagccaaatcatgagtgaactcccattcacaattgcttcaaagagaataaaatacctaggaatccaacttacaagggatgtgaaggacctcttcaaggagaactacaaaccactgctcattggaataaaagaagacacaaataaatggaagaacattccatgctcatggataggaagaatcaatatcgtgaaaatggtcatactgcccaaggtaatttatagattcaatgccatccccatcaagctaccaatgactttcttcacagaattggaaaaaattactttaaagttcatatggaaccaaaaaagagcccacattgccaagacaatcctaagccaaaagaacaaagctggaggcatcacgctacctgacttcaaactatactacaaggctacagtaaccaaaacagcacggtactggtaccaaaacagagatatagaccaatggaacagaacagagccctcagaaataataccatacatctacaaccatctgatctttgacaaacctgacaaaaacaagaaatggggaaaggattccccatttaataaatggtgctgggaaaactggctagccttatgtagaaagctgaaactggatccttatacaaaatttacaccttacacaaaaattaattcaagatggattaaaggcttaaatgttagacctaaaaccataaaaaccctagaagaaaacctaggcaataccattcaggacataggcatgggcaaggacttcatgactaaaacaccaaaagcaatggcaacaaaagccaaaattgacaaatgggatctaattaaactaaagagcttctgcacagcaaaagaaactaccatcagagtgaacacgcaacctacagaatggaagaaaatttttgcaatctactcatctgacaaagggctaatatccagaatctacaaagaactcaaacaaatttacaagaaaaaaacaaacaaccccatcaaaaagtgggtgaaggatatgaacagacacttctcaaaagaagacatttatgcagccaacagacacatgaaaaaatgctcatcatcactggccatcagagaaatgcaaatcaaaaccacaatgagatactatctcacactaattagaatggcaatcattaaaaagtcaggaaacaacaggtgctggagaggatgtggagaaataggaacacttttacactgttggtgggactgtaaaccagttcaaccagtgtggaagacagtgtggcaattcctcagggatctagaactagaaatactatttgacccagccatcccattactgggtatatacccaaaggaatataaatcatgctgctataaagacacatgcacacaaacctcacaagtccttcagcttcagtacatatctctgtactacgagtcccacgtgtatgcttcagtccagggggcctctaagctccaacagctctatgcggatgcctccaacgacacacccaaccctgaatccattcctgatctccttgccccaaacctag

SEQ ID NO: 132151 - DNA, 1254 bp, Homo sapiens
atggtcttgatgatcgtggatgtttgtcggtgttgtggcattgaagagttagtagtatttttatacggagaaacttctccagaaagccatcttctatctgtcacctttcctgatttaaccatgatcaaatgtattcaagaggtgtcaaaagacccaagatccctagtaatagcccggaagttcagtgatgaggacctcttcaaggagaactacaaaccactgctcaacgaaatcaaagaggacacaaacaaatggaagaacattccatgctcatggataggaagaatcaatatcgtgaaaatggccatactgcccaaggtaatttatagattcaatgccatccccatcaagctaccaatgactttcttcacagaattgggaaaaaaaactactttaaagttcatatggaaccaaaaaagagcccgcattgccaagacaatcctaagcaaaaagaacaaagctggaagcatcacgctacctgacttcaaactatattacaaggctacagtaaccaaaacagcatggtactggtaccaaaacagagatatagaccaatggaacagaacagaaccctcagaaataataccacacatctacaaccatctgatctttgacaaacctgacaaaaacaagcaatggggaaaggattccctatttaataaatggtgctgggaaaactggctagtcatatgtagaaagctgaaactggatcccttccttacaccttatacaaaaattaattcaagatggattagagacttaaatgttagacctaagaccataaaaaccctagaagaaaacctaggcaataccattcaggacataggcatgggcaaggacttcatgcctaaaacaccaaaagcaatggcaacaaaagacaaaatagacaaatgggatctaattaaactaaagagcttctgcacagcaaaagaaaccaccatcagagtgaacaggcaacctacagaatgggagaacatttttacaatctacccatctggcaaagggctaatatccagaatctacgaagaacttaaacacatttacaagaaaaaatcaaacaaccccattaaaaagtgggaaaaggatatgaacagacacttctcaaaagaagacatttattctgccaaaagacacatgaaaaaaatgctcatgatcactggccatcagagaaatgcaaatcaaaaccacaatgagacaccatctcacaccagttagaatggcaatcattaaaaagtcaggaaacaacaggtgctg

SEQ ID NO: 132152 - DNA, 1464 bp, Homo sapiens
gagacattatcagctctttaaggattgcagaagaataggctactttattttctgaaaaggtaaatatatgcaagcaaagccaacatgccacgaatggcgttggtctaccacacagccgtgtctgggacacagttgggggtcatcccccagcaggagtgaagtcgagcttagcggcccttgtgtcctcccttggaattcctgccatcccttttgattgagcctccacctctgggatttttcttccatttttctcctctcttaaggagggagttcctgctacccatcgtgggaggccaccatcaggactgcgaagatggtgaccctgcggaagaaggaccctgaaagtgctcaccttcctcgtgctcttcatcttcctcacctccttcttcctgaactactcccacaccatgggtggccaccacctggttccccaagcagatggtcctggagctctccgagaacctgaagagactgatcaagcacaggccttgcacctgcacccactgcatcgggcagcgcaagctctcggcctggttcgatgagaggttcaaccagaccatgcagccgctgctgaccgcccagaacgcgctcttggaggacgacacctaccgatggtggctgagcctggagtctgtgatgttcagtgtcaccatgggattctgtttacaaaggccttttggggacaaacagggtactacacagcctgtttatataaaccaaacaggaagggaccttacacaacagcagaggctccagcgggagaagaagcccaataacttgaatgacaccatcaaggagctgttcagagtggtgcctgggaatgtggaccctatgctggagaagaggtcggtgggctgccggcgctgcgccgttgtgggcaactcgggcaacctgagggagtctttttatgggcctgagatagacagtcacgactttgtcctcaggatgaacaaggcgcccacggcagggtttgaagctgatgttgggaccaagaccacccaccatctggtgtaccctgagagcttccgggagctgggagataatgtcagcatgatcctggtgcccttcaagaccatcgacttggagtgggtggtgagcgccatcaccacgggcaccatttcccacacctacatcccggttcctgcaaagatcagagtgaaacaggataagatcctgatctaccacccagccttcatcaagtatgtctttgacaactggctgcaagggcacgggcgatacccatctaccggcatcctctcagtcatcttctcaatgcatgtctgcgatgaggtggacttgtacggcttcggggcagacagcaaagggaactggcaccactactgggagaacaacccatccgcgggggcttttcgcaagacgggggtgcacgatgcagactttgagtctaacgtgacggccaccttggcctccatcaataaaatccggatcttcaaggggagatga

SEQ ID NO: 132153 - DNA, 4878 bp, Homo sapiens
atggggaaaaaacagagcagaaaaaccggaaactctaaaaagcagagcgcctctcctcctccaaaggaatgcagctcctcaccagcaacggaacaaagctggacggagaatgactttgacgagttgagagaagaagacttcagacgatcaaactactccgagctacaggaggaaattcaaaccaaaggcaaagaagttgaaaactttgaaaaaaattcagacgaatgtataactggaataaccaatacagagaagtgcttaaaggagctgacggagctgaaagccaaggctcgagaactacatgaagaacgcagaagcctcaagagccgatgcgatcaactggaagaaagggtatcagtgatggaagacaaaatgaatgaaatgaagcgagaagggaagtttagagaaaaaagaataaaaagaaacaaacaaagcctccaagaaatatgggactatgtgaaaagaccaaatctacgtctgattagtgtacctgaaagtgacagggagaatggaaccaagttggaaaacactctgcaggatattatccaggagaacttccccaatctagcaaggcaggccaacattcagattcaggaaatacagagaacgccacaaagatactcctcgagaagagcaactccaaggcacataattgtcagattcagcaaagttgaaatgaaggaaaaaatgttaagggcagccagagagaaagaaatacaaactaacatcagagaatactacaaacaccgctacgcaaataaactagaaaatctagaagaaatggataaattcctcaacatatacacccttcgaagactaaaccaggaagaagttgaatctctgaacagaccaataagaggctctgaaattgtggcaataatcaatagtttaccaaccaaaaagagtccaggaccagatggattcacagccgaatactaccagaggtataaggaggaactggtaccattccttctgaaactattccaatcaatagaaaaagagggaatcctccctaactcattttatgaggccagcatcatcctgataccaaagccgggcagagacacaaccaaaaaagagaattttagaacaatatccttgatgaacattgatgcaaaaatcctcaataaaatactggcaaaccgaatccagcagcacatcaaaaagcttatccaccatgatcaagtgggcttcatccctgggatgcaaggctggttcaatatacgcaaatcaataaatgtaatccagcatataaacagaaccaaagacaaaaaccacgtgattatctcaatagatgcagaaaaggcctttgacaaaattcaacaactcttcttgctaaaaactctcaataaattaggtattgatgggacatatctcaaaataaaaagagctatctatgacaaacccacagccaatatcatactgaatgggcaaaaactggaagcattccctttgaaaactggcacaagacagggatgccctctctcaccactcctattcaacatagtgttggaagttctggccagggcaattaggcaggagaaggaaataaagggtattcaattaggaaaagaggaagtcaaattgtccctgtttgcagatgacatgattgtatatctagaaaaccccattgtctcagcccaaaatctccttaagctgataagcaacttcagcaaagtctcaggatacaaaatcaatgtacaaaaatcacaagcattcttatacaccaataacagacaaacagaaacccaaatcatgagtgaactcccattcacaattgcttcaaagagaataaaatacctaggaatccaacttacaagggacgtgaaggacctcttcaaggagaactacaaaccactgctcaatgaaataaaagaggatacaaagaaatggaagaatattccatgctcatgggtaggaagaatcaatatcatgaaaatggccatactgcacaaggtaatttatagattcaatgccatccccatcaagctaccaatgactttcttcacagaattggaaaaaactactttaaagttcacatggaaccaaaaaagagcccgcattgccaagtcaatcctaagccaaaagaacaaagctggaggcatcatgctacctgacttcaaactatactacaaggctacagtaaccaaaacagcatggtactggtaccaaaacagagatatagatcaatggaacagaacagagccctcagaaataacgccgcatatctacaactatctgatctttgacaaacctgagaaaaacaagcaatggggaaaggattccctattcaataaatggtgctgggaaaactggctagccatatggagaaagctgaaactggatcccttctttacaccttatacaaaaattaattcaagatggattaaagacttaaacgttagacctaaaaccataaaaaccctagaagaaaacctaggcattaccattcaggacataggtatgggcaaggacttcatgtctaaaacaccaaaagcaatagcaacaaaagccaaaattgacaaattggatctaattaaactaaagagcttctgcacagcaaaagaaactaccatcagagtgaacaggcaacctacagaatgggagaaaattttcgcaacctactcatctgacaaagggctaatatccagaatctacaatgaactcaaacaaatttacaagaaaaaaacaaacaaccccatcaaaaagtgggcaaaggacatgaacagacacttctcaaaagaagacatttatgcagccaaaaaacacatgaaaaaatgctcaccatcactggctatcagagaaatgcaaatcaaaaacacaatgagataccatctcacaccacttagaatggcaatcattaaaaagtcaggaaacaacagtaaaatactggcaagccgaatcccgcagcacatcaaaaagcttatccaccatgatcaagtcggcttcatctctgggatgcaaatcttgtttaacataagcaaatcaataaatgtaatccatcgcataaacagaaccaatgacaaaaaccacatgattatctcaatagatgcagaaaataccttcgacaaaattcaacagctcttcatactaaaaactctcaataaactaggtattgatggaatgtatctcaaaataataagagctatttatgacagacccacagccaatatcatactgaatgggcaaaaactggaagcattccctttgaaaaccggcacaagacaaggatgccctctctcaccactcctattcaacatattaatggaagctctggccagggcaatcaggcaagagaaagaaatgatgcgtattcaggtaggaaaagaagaagtcaaattgtccctgtttgcagatgacatgattgtatatttagaaaatcccatcgtctcagccccaaatctccttaagctgataaggaacttcagcaaagtctcagaatacaaaatcaatgtgcaaaaatcacaagcattcctgtacaccaataacagacaaacagagagccaaatcatgagtgaactcccattcactattgcttcaaagagaataaaatacctaggaatccaacttacaagggatgtgaaggacctcttcaaggagaactacaaaccactgctcaacgaaatacaagaggacacaaacaaatggaagaacattccaagctcatggataggaagaatcaatatcgtcaaaatggccatactgcccaaggtaatttatagattcaatgccatccccatcaagctaccaatgactttcttcacagaattgggaaaaactactttaaagttcatatggaaccaaaaaagagctcgcattgccaagacaatcccaagccaaaagaacaaagctggaggcatcatgctacctgacctcaaactatactacaaggctacagtaaccaaaacagcatggtattggtaccaaaacagagatatagatcaacggaacagaacagagccctcagaaataataccacacatctacaaccatctcatctttgacaaacctgacaaaaacaagaagtggggaaaggattccctatttaataaatggtgctgggaaaactggctagccatatgtagaaagctgaaactggatcccttccttacaccttatacaaaaattaattcaagatggattaaagacttaaatgttagacctaaaaccataaaaaccctagaagaaaacctaggcaataccattcaggacataggcatgggcaagcacttcatgtctaaaataccaaaagcaatggcaacaaaagccaaaattgacaagtgggatctaattaaactaaagagcttctgcactacaaaagaaactaccatcagagtgaacaggcaacctacagaatgggagaaaatttttgcaatctacccatctgacaaacagctaatatccagaatctacaaagaacttaaacacatttacaataaaaaaaaaaaaaaaaacaaccccatcaacaagtgggcgaaggatatgaacagacacttctcaaaagaagacatttatgcagccaacagacacatgaaaaaatgctcatcatcactggccatcagagaaatgcaaatagaaaccacaatcagataccatctcacaccagttagaatggcaatcattaaaaagtcaggaaacaacagaattgaacatggggaaatgatgagggtagcaggtcattttgaaatggaccttcgggtagtatttggggtggaaaaatcccctttctccaaccacattttggctaccccagcaacaccacccccacagaggtatcagcgctttgtgatgtccaagccaccccaggactaccattggataggggtgccccattctggccaaacaaagctgaagggtggggctcctcattacccaggg

SEQ ID NO: 132154 - DNA, 5053 bp, Homo sapiens
aaataccaactaccatcagagaatactgtaaagacctctatgcaaataaagtagaaaatctagaagaaatggataaattcctcgacacatacaccctcccaagactaaaccaggaagcagttgaatctctgaatagaccaataacaggctctgaaattgaggcaataattaatagcctacaaccaaaaaaagttcaggaccagatgaattcaaagccgaattctaccagagtgttggaagttctggccagggcaatcaggcaggagaaagaaataaagtgtattcgattaggaaaagaggaagtcaaattgtctctgtttgcagatgacatgattgtatatttagaaaaccccattgtctcagcccaaaatctccttaagctgataagcaacttcagtaaagtctcaggatacaaaatcaatgtgcaaaaatcacaagcattcttatacaccaataccagacaaacagagagccaaatcatgagtgaactcccattcacaattgcttcaaagagaataaaatacctaggaatccaacttacaagggatgtggaagacctcttcaaggagaactacaaaccactgctcaatgaaataaaagaggacccaaacaaatggaagaacattccatgctcatggataggaagaatcagtatcctgaaaatggccatactgcccaaggtaattgatagattcaatgccatccccatcaagctaccaatgactttcttcacagaattggaaaaaactactttaaagttcatatggaaccaaaagagagcccacattgccaagacaatcctaagccaaaagaacaaagctggaggcatcatgctacctgacttcaaacaatactacaaggctacagtaaccaaaacagcatggtactggtaccaaaacagagatagagaccaatggaacagaacagagccctcagaaataataccacacatatacaaccatctggtctttgacaaacctgacaaaaacaagcaatggggaaaggattccctatttaataaatggtgctgggaaaactggctagccatgtgtagaaagctgaaactggattccttccttacaccttatacaaaaattaattcaagatggattaaagacttaaatgttagacctaaaaccataaaaaccctagaagaaaacctaggcaataccattcaggacataggcatgggcaaggacttcatgtctaaaacaccaaaagcaatggcaacaaaagccaaaattgacaaatgggatctaattaaactaaagagcttctgcacagcaaaagaaactaccatcagagtgaacaggcaacctacagaatgggagacaatttttgcaatctactcatctgacaaagggctaatatccagaatccacaaagaactcaagataatttacaagagaaaaacaaacaaccccatcaaaaagcaaacaggatctggaatggacatccagcaaactgcagcagacctgcagcagaggagcctgaccgtcaggaggaaaactaacaaacagaaaggaatagcatccacatcaacaaaaaggacgtccacaccaaaaccccatccaaaggtcatcaacatcaaagaccaaagaaagcaggaaagatctaaaattgacaccctaacatcacaattaaaagaactagagaagcaagagcaaacacattcaaaagctagcagaaggcaagaaataactaagatcacagcagaactgatggagacagagacacaaaaaacccttccaaaaatcaatgaatccaagaactggttttttgaaaagatcaacaaaattgatagacctgcagcaagactaataaagaagaaaagagagaagaatcaaatagacgcaataaaaaatgataaaggggatatcaccaccaatcccacagaaatacaaactaccatcagagaatactataaacagctctacgcaaacaaactagaaaatctagaagaaatggataaattcctgaacgcatacatcctcccaagactaaaccaggaagaagttgaatctctgaataggccaataacaggctctgaagttgaggcaataattaatagcctaccaaccaaaaaaagttcaggaccagacggattcacagccgaattctaccagaggtacaaggaggaactgagaataaaatacctaggaatccaacttacaagggatgtgaaggacctcttcaaggagaactacaaaccactgctcaaggaaataaaagaggacacaaacaaatggaaaaacattccatgctcatggataggaagaatcaacatcatgaaaatggccatactgctcaaggtaatttatagattcaatgccatccccatcaagctaccaatgactttcttcacagaattggaaaaaactactttaaagttcatatggaaccaaaaaagagcccgcattgccaagtcaatcctaagcaaaaagaacaaagctggagtaatcacactacctgacttcaaactatactacaaggctacagtaaccaaaacagcatggcactggtaccaaaaacagatatatagaccaatggaacagaacagaggcctcagaaataacaccacacatctacaaccatctgatctttgacaaacctgacaaaaacaagcaatggggaaaggattccctatttaataaatggtgctgggaaaactggctagccatatgtagaaacctgaaactggatcccttccttacaccttatacaaaaattaattcaagatggattaaagacttaaatgttagacctaaaaccataaaatccctagaagaagacctaggcaataccattcaggacataggcatgggcaaggacttcatgtctaaaacaccaaaagcaatggcaacaaaagccaaaattgacaaatgggatctaattaaactaaagagcttctgcacagcaaaagaaactaccatcagagaatttgagcagtttaacaggaggctaaatgaagtttctaagagagttcgcatacccttgcctgtgtctaatatactttgggaacattgtatacgattggctaatcgaactattgtagaaggatatgccaatgtcaagaaatgcagtaatgagggtcgtgccctgatgcaattggattttcaacagtttttaatgaaacttgaaaaactaacagatattagacccattcctgataaagaatttgtagaaacttatattaaagcttattacctaactgagaatgacatggaacggtggatcaaagagcacaggttgaggggaagaagagagtctgtagagaagagagacccagaacttcatctgtgtgttctgctgtgcatccttgacagcacctggcacagaatctcagctaagatggatgaaatgcaagtactcaggccctttgaactagaatttttgcctaaactgaaagagttgaaatacctgagactgggcgatttacaaacgaaagaggcttataatggacttaccattccacgtggctggggaagcttcacaatcatggtggaaggcaaggaggagcaggtcatgtcttacatggatggcagcaggcaaaaagagaatgaggaagacactgcagatgacatgattatatatctagaaaaccccattgtctcagcccaaaatctccttaagctgataagcaatttcagcaaagtctcaggatacaaaatcaatgtacaaaaatcacaagcattcttatacaccaataacagtcaaacagagagccaaatcatgagtgaactcccattcacaattgcttcaaagagaataaaatacctaggaatccaacttacaagggacgtgaaggacctcttcaaggagaactacaaaccactgctcaatgaaataaaagaggatacaaacaaatggaagaacattccatgctcatgggtaggaagaaatcaatatcatgaaaatggccatactgcccaaggtaatttatagattcaatgccatccccatcaagctaccaatgactttcttcacagaattggaaaaaactactttaaagttcatatggaaccaaaaaagagcccacattgccaagtcaatcctaagccaaaagagcaaagctggaggcatcacgctacctgacttcaaactatactacagggctacagtaaccaaaacagcatggtactggtaccaaaacagagatatagaccaatggtacagagcagaggcctcagaaataatgccacatatctacaactacctgatctttgacaaacctgagaaaaacaagcaatggggaaaggattccctatttaataaatggtgctgggaaaactgcctagccatatgtggaaagctgaaactggatcccttccttacaccttatactaaaattaattcaagatggattaaagatttaaatgttagacctaaagccataaaaatcctagaagaaaacctaggcaataccattcaggacacaggcatgggcaaggacttcatgtctaaaacaccaaaagcaatggcaacaaaagccaaaattgacaaatgggatctaattaaactaaagagcttctgcacagcaaaagaaactaccatcagagtgaacaggcaacctacaaaatgggagaaaatttttgcaacctactcatctgacaaagggctaatatccagaatctacaatgaactcaaacaaatttacaagaaaaaaacaaacaactccatcaacaagcgggcgaaggatatgaacagacacttctcaaaagaagacatttatgcagccaaaagacacatgaaaaaatgctcatcatcactggccatcagagaaatgcaaatcaaaaccacaatgagataccatctcacaccaccagaggtggaagtggttctggaaactttgatcatggtcatggaggtggtggtcgtggaggaagcttcagttgtcatggtggctttggtggcagtcatggtggtggtggttatggtggcggtggggatggctataatggatttggtaatgatggaagcaattttggaggtggtggaagctacaatgattttggcagttacaacaatcagtcttcaaattatggacccatga

SEQ ID NO: 132155 - DNA, 8062 bp, Homo sapiens
tcatcttgaattaatttttgtataaggtgtaaggaagggatccagtttcagctttctgcatatgactagccagttttcccagcagctttttaaaaatagggaatcctttccccatttcttgtttttgtcagatttgtcaaagatcaggtggtagtagatgtgtgatatgatttctgagggctctgttctgttccattggtctatatctctgttttggtaccagtaccatgctgttttggttactgtagccttgtagtatagtttgaagtcaggtagcatgatgcctccagctttgttcttgtggcttaggattgtcttggcaatgcaggcttttttttggttccatgtgaactttaaagtagttttttccaattctgtggagaaagtcattggtagcttgatggggatggcattgaatctataaattaccttgggcagtatgaccattttcatgatattgattcttcctatccatgagcatggaatgttcctccatttgtttgtatcctcttttatttcgttgagcagtggtttgtaattctccttgaagaagtccttcacatcccttgtaagttggattcctaagtattttattctctgtgaagaaattgtgattgagagttcacttatgatttggctctctgtttgtctgttgttgctgtataaaaatgcctgtgatttttgcacattgattttgtatcctgagactttgctgaagttgcttatcagcttaaagagactttgggctgggatgatggggttttctaaatatacaatcatgtcatctgcaaacagggacaatttgactccctcttttcctaattgaatacgctttatttctttctcctgcctgattgccctggctagaacatccaacacgatggtgttttggtgtggatgtcctttctgtttgttgattttccttctaacagtgaagaccgtcagctgcaggtctgttggagtttgctggaggtccactccagaccctgtttgcctgttgtgtcctgactttttaatgatctccattctaactggtgtgagatggtatctcattgtggttttgatttgcatttctctgatgaccagtgatgatgagcatgttttcatatgtcgattggctgcataaatgccttcttttgagaagtgtctgtacatatcctttgcccactttttgatgttgttgttgttgttgttgttttttttgtaaatttgtttaagttctttgtagattctggatattagccctttgtcagatgggtagattgcaaaaattttctcccattctgtaggttgcctgctcactctgatggtagtttcttttgctgtgcagaagctctttaatttaattacatcccatttgtcaactttggcttttgttgccattgcttttggtgttttagtcatgaagtccttgcccatgcctatgtcctgaatggtattgcctaggttttcttctagggtttttatggttttaggtctaacatttaagtctttaatccatcttgaatgaatttttgtataaggtgtaaggaagggatccagtttcagctttctacatatggctagccagttttcccagcaccatttattaaatagggaatcgtttccccatttcttgtttttgtcaggtttgtaaaagatcagatggttgtagatgtgtgatgttacttctgaggcctctgttctgttccattggtctatatctctgttttggtaccagtaccatgctgttttggttactgtagccttgtagtatagtttgaagtcaggtagcgtgatgcctccagctatgttctttttgcttaagattgttttggcaatgcaggctcttttttggttccatatgaactttaaagtagttttttccaattctgtgaagaaagtcattggtagcttgatggggatgtcattgaatctataaattaccttgggcagtatggccattttcatgatattgattcttcctatccttgagcatggaatgttcttccatttgtttgtgtcctctcttatttccttgagcagtggtttgtagttctccttgaagaggtccttcacatcccttgtaagttggattcctaggtattttattctctttgtagcaattgtgaatgggaattcactcatgatttggctctctgtttgtctgttattggtgtataggaatgcttgtgatttttgcacattgattttgtatcctgagactttgctgaagttgcttatcagcttaagattttgggctgagacgatggagttttctagatacacaatcatgtcatctgcaaacagggacaatttgacttcctcttttcctaattgaatgccctttatttctttcttttgcctgattgctctggccagaacttccaacaccattaactcatcatttacattagttatatctcctaatgctatccctcccccctccccccaccccacaacaggccccagtgtgtaatgttccccaccctgtgtccaagtgttcttattgttcaattcccacctatgagtgagaacatgcatgtttggttttttgtccttgcaatagtttgctgagaatgatggtttccagcttcatccatgtccctacaagtatatgaactcatccttttttatggctgcatagtattccatggtgtatatgtgccacattttcttaatctagcctattgttgttggatatttaggttggttccaagtctttgctattgtgaatagtgccgcaataaacatacgtgtgcatgtgtctttatagcagcatgatttataatcctttgggtatatacccagtaatgggatggctgggtcaaatggtatttctagttctagattcctgaggaatcaccacactgacttccacaatggttgaactagtttacagtccaaccaacagtgtaaaagtgttcctatttctccacatcctctccagcacctgttgtttcctgactttttaatgattgccattctaactggtgtgagatggtatctccttgtggttttgatttgcatttctctggtgaccagtgatgatgagcattttttcacatgtctgttggctgcaataaatgtcttcttttgagaagttgtctgttcatatcctttgcccaatttttgatggggttgtttgatttttttcttgtaaatttgtttgagttctttgtagattctggatattagccctttgtcagatggatagattgcaaaaaatttcctcccattttgtaggttgcctgttcactctgatggtagtttctcttttgctgtgttttcagtcttcagataccccagcaaagaacagaagctctttagtttaattagatcccatttgtcaattttggcttttgttgccattgcttttggtgttttagacatgaagtccttgcccatgcctatgtcctgaaaggtattgcctaggttttcttctagtagggttttttatggttttaggtcctaacatttaagtctttaatccatcttgaattaatttttgtataaggtgtaaggaagggatccagtttcagctttctcctacatatggctagccagttttcccagcaccatttattaaatagggaatcctttacccatttcttgtttttgtcaggtttgtcaaagatcttgtttttgtcaggttttgtttggttgtagatatatgtggcattatttctgagggctctgttctgttccattgatctatatctcctgttttggtaccaggaccatgctgttttggttactgtagccttgtagtagagtttgaagtcaggtagcatgatgcctccagctttgttcttttggcttaggattgtcttggcagtgcgggctcttttttggttccatatgaactttaaagtagtttttttccaattctgtgaagaaagtcattggtagcttgatggggatggcattgaatctgtaaattaccttgggcaagtatggccattttcaatgataatgattcttcctatccatgagcatggaatgttcttccatttgtttgtatcctcttttatttcattgagcagtggtttgtagttctccttgaactccttgaggaggtccttcacgtcccttgtaaggtggattcctaggtatttaattctcttggaagcaattgtgaaatgggagttcactcatgagttggctctctctttgtctttgcctgttattggtgtataggaatgcttggtgatttttgcacattgattttgcatcctgagactttgctgaagttgcttatcagcttaaggagattttgggctgagaccatggggttttctagatatacaatcatgtcatctgcaaacagggacaatttgacttcctcttttcctaattgaataccctttatttctttctcctgcctgattgccctggccagaacttccaacactatgttgaataggagtggtgagagagggcatccctgtcttgtgccagttttcaaagggaatgcttccagtttttgcccattcagtatgctattggctgtgggtttgtcataaatagctcttattattttgagatatgtcccatcaatacctaatttattgagagtttttagcatgaagggctgttgaattttgttgaaggccttttctgcatctattgagataatcatgtggtttttgtcattggttctgtttatatgctggattacatttattgatttgcatctattgaaccagccttgcatcccagggatgaagcccacttgatcgtggtggataagctttttgatgtgctgctggattcggtttgccagtattttattgaggattttcgcatcaatgttcatcagggatattggtctaaaattctcttttttggttgtgtctcttccaggctttggtatcaggatgatgttggcctcataaaatgagttagggaggattccctctttttctattgtttggaatagtttcagaaggaatggtaccagctcctctttgtacctctggtagaatttggctgtgaatctatctggtcctggactcttttttgttggtaagctattgattattgccacaatttcagatcctgttattggtctattcagagattcaacttcatcctggtttagtcttgggagggtgtatgtgtcgaggaatttatccatttcttctagattttctagtttatttgcatagaggtgtttgtagtattctctgatggtagtttgtatttctgtgggatcggtggtgatatcccctttatcattttttattgcgtctatttgattcttctctctttttttctttattagtcttgctagcagtctatcaattttgttgatcctttcaaaaaaccagctcctggattcattaattttttgaagggttttttgtgtctctatttccttcagttctgctctgattttagttattttttgccttctgctagcttttgaatgtgtttgctcttgcttttctagttcttttagttgtgatgttagggtgtcaattttggatctttcctgctttctcttgtgggcatttagtgctataaatttccctctacacacttccttgaatgtgtcccagagattctggtatgttgtgtctttgttctcgttggcttcaaagaacccactgtttagttcacacttgtaagtgtgaatgtgtggtattttatttcctatttctgttatttctcttagaataatggcctccagctcagtccatgttgctgtgaaggacatgatttcattcttttttatggctgcatagtattctatggtgtatgtgtcccctgttttctttatccagtcaactgttggtgggcttaggttgattccatgattttgctgttgtgaatagtgtttttgatgggattttttgatttttttcttgtaaatttgtttaagttctttgtagattctggatattagccctttgtcagatgggtagattgcaaaatttttctcccattttgtaggttgcctgttcactctgatggtagtttcttttgctgtgcagaagctctttagtttaattagatcccatttgtcaattttggcttttgttgccattgcttttggtgttttagtcatgaagtccttgcccatgcctatgtcctgaatggtattgcctaggttttcttctagggtttttatggttttaggtctaacatttaagtctttaatccatcttgaattaatttttgtataagatgtaaggaagggatccagtttcagctttctacatatggctagccagttttcccagcaccatttattaaatagggaatcctttccccatttcttgtttttgtcaggtttgtcaaagatcagatggttgtagatgggtggtgttatttctgaggcctctgttctgttccattgatctatatctctgttttggtaccagtaccatgctgttttggttaccgtagccttgtagtatagtttgaagtcaggtagcgtgatgcctccaactttgttctttttgcttaggattgtcttggcaatgcgggctcctttttggttccatatgaactttaaagtagttttttccaattctgtgaaggaagtcattggtagcttgatggggatggcattgaatctataaattaccttgggcagtatggccattttcacaatattgattcttcctatccatgagcatggaatgttcttccatttgtttgtgtcctcttttatttcattgagcagtggtttgtagttctccttgaagaggtccttcacattccttgtaagttggattcctgggtattttattctctttgaagcaattgtgaatgggagttcactcatgatttggctctctgtttgtctattattggtgtataggaatgcttgtgatttttgcacatcgattttgtatattttgtatcctgagactttgctgaagttgcttaacagcttaaggagattttgggctgagatgatggggttttctaaatatacaatcatgtcatctgcaaacagggacaatttgacttcctcttttcctaattgaataccctttatttctttctcctgcctgattgccctggccagaacttccagcactatgctctggtagaatttggctgtgaatccgtctggtcctgaactttttttggttggtaagctattaattattgcctcaatttcagaccctgttattggtctattcagggactcaaattcttcctggtttagtcttgggagggtgtatgtgtccaggtatttatccatttcttctagattttcttctgctagcttttgaatgtgtctgctcttgcttctcagttcttttaattgtgatgttagggtgtcaattttagatctttcctgctttctcttgtgggcatttagtgctataaatttctctctacacactgctttacatgtgtcccagagattctggtatgttgtgtctttgttctcactggtttcaaagcacatctttatttctgccttcgttttgttatgtatccagtagtcattcaggagcaggttgttcagtttccatgtagttgagctgttctgagtgagtttcttaatcctgagttctagtttgattgcactgtggtctgagagacagtctgttataatttctgttcttttatattttctgaggagtgctttccttccaactatgtggtcaattttggaataagtgcgatgtggtgctgagatgaatgtatattctgttgatttggggtggagaattctgtagatgtttattaggtctgcttggtgcagagctgaattcaattcctggatatccttgttaactttctgtctcgctgatctgtctaatgttgacagtggggtgttaaagtctcccattattgttgtgtgggggtctaagtctctttgtaggtctctaaggacttgcttcatgaatctgggtgctcctgtattgggtgcatatatatttagcacagttaactcttcttgttgaattgatcccttcaccattatgtaatggccttctttgtctcttttgatctttgttggtttaaagtctgttttatcagagactaggattacaacccctgctttttttgtttgtttttttattttccatttgcttggtagatcctcctccat

SEQ ID NO: 132156 - DNA, 356 bp, Homo sapiens
aaaagcctaactgttgccaaaataataaaaaagttggagttccctttgaagctaaaacctaaagtggccaaaggaggaaagaggttccatcccctacccttcctgcacccccatttattttgaagaaaaaagagtggcctgaccctcccagatctttcttttctggaggacactgggcgaaaagtagttgccccagtgactgttcgagccagttgatggcttgctaagtaagaatgctaaacaccaaaaggacaactcttgtttgatcccactcatatgaagggaaattcagaaagaaagtgaaatagtggttaccagggtctggggtgagggtggaatttggagctctttttcag

SEQ ID NO: 132157 - DNA, 618 bp, Homo sapiens
aggcgctttcctcttggaagtggcgactgctgcgggcctgagcgctggtctcacgcgcctcgggagccaggttggcggcgcgatgaggcgcagcaaggctgacgtggagcggtacatcgcctcggtgcagggctccaccccgtcgactctacagaagtcaatgaaaggattctattttgcaaagctgtattatgaagctaaagaatatgatcttgctaaaaaatacatatgtacttacattaatgtgcaagagagggatcccaaagctcacagatttctgggtcttctttatgaattggaagaaaacacagagaaagccgttgaatgttacaggcgttcagtggaattaaacccaacacaaaaagatcttgtgttgaagattgcaaaattgctttgtaaaaatgatgttactgatggaagagcaaaatactgggtcgaaagagcagcaaaacttttcccaggaagtcctgcaatttataaactaaagaacatgggtgggtcagaggccaaatggttcctaagccagatgatgagggggtgcaggtcaggggacgttcaggaaggccagatgcagggtggaggctcaacagaaggtcttctgttggaggaagtgcctgg

SEQ ID NO: 132158 - DNA, 1094 bp, Homo sapiens
atggctttccatgtggaaggactgatagctatcatcgtgttctaccttctaattttgctggttggaatatgggctgcctggagaaccaaaaacagtggcagcgcagaagagcggcgaagccatcatagttggtggccgagatattggtttattggttggtggatttaccatgacagatacatatgtacttacattaatgtgcgagagatggatcccagagctcacagatttctgggtcttctttatgaattggaagaaaacacagagaaagccgttgaatgttacaggcgttcagtggaattaaacccaacacaaaaagatctggtgttgaagattgcagaattgctttgtaaaaatgatgttactgatggaagagcaaaatactgggtggaaagagcagcaaaacttttcccaggaagtcctgcaatttataaactaaagactcctagttcttcagttttggaacttggactggctctcgttgctcctcagtctgcagatggcctagtgatcgtctgtgtaaagtttcaagagagtaatgataaaacccagctcatctttgattcagtgaccaacataccagcaaaggatgcagcaccagtggagaaaatagacaccatgctggtcttggaaggcagtggaaacctggtgtatacacaggagtggttcggctttctggattcctgcctgaatagaactgagagcggtcgctcaaggtgcgctcgaacagtcactggggcaactactttttgcccagtgtcctccagaaaagaaagatctggagggtcagaccactctttttcttcaaataatgaggggatgcagaagcatgtaagtacagaagctttggagtgcccagaaagagcagagaaagccagccaagagagtgccaggtttaagttgacagaagaggtcaacaaaatcgtgaagacttaccaaatgcacatcttagagttctgggtttccaatgtgtatctcctctatgaaattctttaaaaatatctgttcttggtatcccttaggttagtctcttttagaacttctaaatcaatggacccttaacttataggagccacctggacgttagcaacatc

SEQ ID NO: 132159 - DNA, 516 bp, Homo sapiens
atgggggagctaataacctatccgggatgttgtggaagaaaaggaaagaaaagccatatatggcaagagaagagccataaagaaaacctgcagggtgtggtaggtgagtgggtgtcagctgaggtgaagagggaaaggctaaaagtcaaagcacctccaagtgttcctcgaagggactacgcttcagagagccctgctgacgaagaggagcagtggtccgatgactttaaaaagaaaagaaaaatgaggggaaggggtgacttttctgcccatctcttggtcatgggagctctcctggggcccagcagccgcagctccctgagatgcactgcagctgcgcccctgctggctgcgcacgcgcggcccacgacactacccaccaccaccacaccagccagaagcaaatgcggccatcgaggaaaaaccgcaccccgcgaacgccagcacaaccaaaaccgagaattccaaacagaaggtgtgaagagaggagagtgtgatggtcgtgagaggatgtag

SEQ ID NO: 132160 - DNA, 521 bp, Homo sapiens
tttcgtgagaccagaggcttaccatgctgctccctaggagggctttgttttgctgacgtgaccactggacagttattcgtgtctcttacaattaccaaacagaatggacaagcttaataaaataaccgtccccgccagtcagaagttgaggcagcttcaaaagatggtccatgatattaaaaacaatgaaggtggaataatgaataaaatcaaaaagctaaaagtcaaagcacctccaagtgttcctcgaagggactacgcttcagagagccccgctgacgaagaggagcagtggtccgatgactttgacagcgactatgaaaatccagatgagcactcggactcagagatgtacgtgatgcccgccgaggagaacgctgatgacagctacgagccgcctccagtagagcaggaaaccaggccggttcacccagccctgcccttcgccagaggcgagtatatagacaatcgatcaagccagaggcattccccaccaaaaacccatacctctgccaagattt

SEQ ID NO: 132161 - DNA, 378 bp, Homo sapiens
atggtagaccgttatcctgtaaccacggacactgagtttttccagggccttggaatctacccaaattcacccctggagtcaacttccaaagcctccccagaaatacacttcttcaagagactttggaccatttccccagagccctctctggctttatctatcatcttcccaagagaagcagaacctcagatcctgggcgcagtgatcctgggcttcggggtgtggatcctggccgacaagagcagtttcatctctgtcctgcgtaaggacccctcagcttccccagacccaggcccactgaagaggggagggccagggcgcagatacagctgctcccataagtgcttcggcttcaatgcctgttgcttttcccgctga

SEQ ID NO: 132162 - DNA, 480 bp, Homo sapiens
ttttttttttttttaatgtaaaaccatttgtttaattctaaatcaaatcactttcacaacagtgaaaattagtgactggttaaggtgtgccactgtacatatcatcattttctgactggggtggtgagcttgccgagggatggtgggaagggggctccctgttggggccgagccaggagtcccaagtcagctctcctgccttacttagctcctggcagagggtgagtggggacctacgaggttcaaaatcaaatggcacgtcaccagtccagagccctgccacggatgtaggcaggagcccagcattaggcaatcaggagccagaacatgatcaccagggccacaaataggaagaggcgtgacaggaactgctcgtccacatactggggtgtccagggacagctggaggaggccgccatcatttatattaaatgctgtggcaaatatcccaaagggaaatgccccaattccaaaagaaaa

SEQ ID NO: 132163 - DNA, 1131 bp, Homo sapiens
tttttaatgtaaaaccatttgtttaattctaaatcaaatcactttcacaacagtgaaaattagtgactggttaaggtgtgccactgtacatatcatcattttctgactggggtcaggacctggtcctagtccacaagggtggcaggaggagggtggaggctaagaacacagaaaacacacaaaagacatctggaagccaccatctccaaatccaaatccttgaaatccccctctattctccggctctggcctctgtccttgaggacgaggaggggtcttctctctggggtcctgttgcccagtgctgccccttccatagagggggatggcatttttcggggctgatgccagctttgcaaacaggacacacctgtctgttaggtctggtctccaaccactgatgtaaacacggccaacagaagaggtggccacacaggctgatgacggcatccttggctgtgtccaagcagatgttgcactcgaaagtgctgtcctgccctccgctctcgccagcgccattgctgctcccactgggcccccctgcactggagttctcaggagatgcagaggccgagggccccttgcttgccatccttggctgtcagcgaagctctgagtgaagactttccccagggaaatcctgcctccgacacagttaacgccagcccagtcaatcagtttttcgggtacacggccaatactaacgccgcgtcaatctgttgggaaggcacaatcttctttggcatctttaaggcgtttgacaagcatgtgaatttgatcctctgcgattgtgatgagttcagaaagatcaagccaaagaacgtgaagcaaccagagctcgaagaaaagcacttttggggtctggtgttgctgcatggggagaacttggtatccatgactgtggaggggctacccccaaaatatactggcattgctcgggtaccacttgctggagctgcaggaggccctggagttgttagggcagctggtagaggagtatcagctggtgtaccaattccccaggctcctggtggattagcaggccccgtcccaggagttgggggaccatcccagcaggattgtgaaggaagtcttactacagatgagaggctagaggaccagagaagttaa

SEQ ID NO: 132164 - DNA, 1217 bp, Homo sapiens
  misc_feature (1)...(1217): n = a,t,c or g
gagaaggttctacaaatgagctgatggctttaaaagtttccttcttagccttacaatttttctccttgattataaaagtaaaggaaaactgggaaaatacagaaaggaaaagagggggaaaaaaatcacttataaccacaccaatccagagggatttcaaggatttggatttggagatggtggcttccagatgtcttttggaattggggcatttccctttgggatatttgccacagcatttaatataaatgatgggcggcctcctccagctgtccctgggacaccccagtatgtggacgagcagttcctgtcacgcctcttcctatttgtggccctggtgatcatgttctggctcctgattgcctaatgctgggctcctgcctacatccgtggcagggctctggactggtgacgtgccaccccaactcctggtgtttggcttcctggctaatcttgactcctggaatcagtgggatcagtaacacatcaaggagtcttgtttcttcatcagagctttggaactcgagaccagttggcgatgacccctgaatatcgccaccgctgtaaacactctataacttcaggcctttgnaatttgaagtcatctctcatggggtgacaccatgaaatcttgtttcagccagttctgcaggtcctgactctgcagaggggaagaggcattattgagagaaactgtcagagtataatttcacctgaagtttaatattacagaaacaaagggatgcacccaaatggtatttctggaaattttcatgtctttaaataccccttggtaagttgcttctgaagccagtgggggctcctcagatagagaggttcccctttcaaatcccagtgccgctctgttctctttccttcccctcccactccccctcttcttcctctgccaggagctaagtaaggcaggagagctgacttgggactcctggctcggccccaacagggagcccccttcccaccatcnttcggcaagctcaccacctcatccttctgccaaggcagctttcctttcttttgtgtgttttctgtgttcttagcctccaccctcctcctgccacccttgtggactaggaccaggtcctgaccccagtcagaaaatgatgatatgtacagtggcacaccttaaccagtcactaattttcactgttgtgaaagtccatttgctttagaattaaccaaatggttaaacattaaaa

SEQ ID NO: 132165 - DNA, 2091 bp, Homo sapiens
tttcgtgccggagcacacgtgtttcgtgtttcggtgagtgtggcggagatggagagccgggatgcggcccagccgatgtcgcctggagaagcgacgcagagtggcgcccggcctgccgaccgctatggcctattgaagcacagtcgcgagttcttggacttcttctgggacattgcgaagcctgagcaggagacgcgacttgcggccacggagaagctgctggagtatctgcgtggcaggccgaaggggtccgagatgaaatatgccctgaagcgtctaatcacgggactcggggtcgggcgagaaacagcccggccctgctacagtttggccctggcacagctgttacagtcttttgaagacctccccttgtgcagcatcctgcagcagatacaagaaaaatatgacctgcatcaggtgaagaaggcaatgctgagacctgctctctttgcaaacctgtttggagtgctcgccctctttcagtcaggtcggctggtgaaggaccaggaggcactgatgaagtcggtgaagctgctgcaggccctggcccagtaccaaaaccacttgcaggagcagccccggaaggccctggtggacatcctctccgaggtctcgaaggccacattgcaggagatcctgccggaggtcctcaaagccgacttgaatataatactcagctcccctgaacagctagagctcttcctcctggcccagcagaaggtgccctccaagctcaagaagctggtgggatccgtgaacctattctcagatgagaatgtccccaggctggtgaatgtgctgaagatggccgcctcctctgtgaagaaggaccgcaagctgcccgccattgctctggacctgctccgcctggcactcaaggaagacaagttcccacggttctggaaggaggtggtggaacaagggctgctgaagatgcagttctggccagccagctacctgtgtttccgcctgctgggcgcggccctgcccctgctgaccaaggagcagctgcacctggtgatgcagggagacgtgatccgccattacggggagcacgtgtgcactgctaagctcccaaagcagttcaagtttgccccagagatggacgattacgtgggcaccttcctagaggggtgccaggatgaccctgagcggcagctggccgtgctagtggccttctcatctgtcaccaaccaaggcctccctgtcacgcctactttctggcgggtcgtgcggttcctgagccctccggccctgcagggctatgtggcctggctgcgggccatgtttctccagccagacctggactccttggttgacttcagcaccaacaaccagaagaaagcccaggattcatcgctccacatgcctgagcgagctgtgttccggctgaggaaatggatcatctttcgattggtgagcattgtggacagcctgcacctggagatggaggaggccttgactgagcaggtggccaggttttgtttgttccactcgttctttgtcacaaagaagcccacatcccagatccctgagacaaagcacccgttctccttccctttggaaaaccaggcccgagaggctgtcagcagtgccttcttcagtctgttgcagaccctcagcacgcagttcaagcaggcaccgggccagacccagggtgggcagccctggacctaccacctggtgcagttcgcagacctcctgttgaatcacagccacaacgtgaccaccgtgacacccttcactgcgcagcagcgccaggcctgggaccggatgctgcagactctgaaggagctggaggcccactccgcagaggccagggctgctgccttccagcaccttctgctcctcgtgggcatccacctcctcaagataacgcagggccctgggcctgtgagcaccctgagagccttccttctgcctcctggcagcctggcacagtctggtgctggccacaagggaaatggaccagactggcagtcagctgagagctgtcctgagggcattcaatgccgcggcaccagcctggattcagaaaacagacctggctgtcagccctggtcctgccacttatgggctgtgtggccttag

SEQ ID NO: 132166 - DNA, 437 bp, Homo sapiens
tcaagcctgagaagtctgctgtctcttgattcctacgtactttagagaggtgactgggtttttcctccaaagccgtatctcaatgtgagtctgctggcagctactggaaatcgaaggtgttgagctgggtggtcgctgctccttctcctcctcctcttcctcctctggatgttggttaacagaactcccactccctggcgctgtggtgcttaggggcagcgtggctgcattcgctctgctccgtaaaggagggggattactccctttgtactgcctgatctggaacagcagttcttttgtgcaaccacctttaagtactggggagctaagtgcagctggcttccttgtcaaatcttcattctgacttgctaaaagatcacgactgaatgcaagctgactgacacaaaccacaaatctgtcagggaatacacagagtt

SEQ ID NO: 132167 - DNA, 1657 bp, Homo sapiens
ctagcgtagctccgctttctcaccaatgtctgccagtagacagctgggtttccacaaggtggggtcaaagggagggagaaatctagatcctacttctgtctgggacacccctggtattgggagggcatagatcagcctcctctggatgtggctcagtgccaggactttaattgtgaagggtggattttccccttccttcaggaagaaggaagcaggcaatggtgctctggttatcctttccaaatggcttacacctgtctgctccaaagtgagcaaaggtgcagcaaaaaaccagttgcctttaaaggaaaaaaaaagttctacaggcctttcgggctttgaaacttgggctgagcaatgctccaccatttccgtttcgactgtgggtctctttcttgcctctactgggaatgagaaacaggagttcagaggttcctggtcagtcaagcatgtgaaggaggaactgaaaaggccttgggagctgctgggcctagaaaaattcccagtcaatccatcacctgcctcctctggagcagggtctgtcagtctctccactgttcctctcccctggcagaggtcagcgctctgctcaccccgcacacactcagccttctggggtttgatcgccttagagccttcatgggtgccatggctgccatactgtagaacccggaagagagtgacccatacaccaaacccaagtgttttacgagtttgagggagtccgaggggatgcatgtgcacatctggccccaactggtgagtttccaaaacatgcaactcttccttagacgtggtttttgccaaatcttgtttcaaaagtaaccctggatctgacaactctgaagctggcaaaaccctgacagctttgcttttttccactattatttctctcgggactaatcgatcacttccaagagaaactctcccgtggtggtcgaagtcttccgcagagctgcagttcctgcgtttctgttgggttttggccactcgtggactttgttttggacatggtgatgctgactcacagctacagacggggctcctgcttagaagccctgtctttaaccgctccccaggatgaggtttttgctggccactagtgtcttctggctgggtctgattaactttttccagcttttgaacaggaagcccccagtggctctcagctgcctttatggaatcctttgcttgtcccatggattctgatgggggactggaggaagcctgaccatcattcctcctccttgctatctctgcaatcactgagtcactagatgtttccacagtgtctcttctggtctgcgatttgctcgtgacactgctttttgtttcagttcttttcacacaaatcttcattctgacttgctaaaagatcacgactgaatgcaagctgactgacacaaaccacaaatctgtcagggaatacacagagttcagcattctgtgtgctcctgatgcagcgaaggcgtatccctctcttgaggaaataggctgtgatttgaaagccataacctatgatggtggcggggtttgggctcgggctttatatgttttgttactgtccagggtcactggcggagtagtacctggctgtggaaactcggactacacaggtagccggaactgcagccaaccttcagcggacgcgtgggtc

SEQ ID NO: 132168 - DNA, 978 bp, Homo sapiens
atggttcactattcgattgacacagaaaaccccacaaagtcatgcaaatcaagagattcaaatcgtattcatttaagaacactcgtgaaactgcccaggccatcaaggatatgcatgtatgaaaagccactaagtgacctgaaagatgtcactttacagaaacagcatgtaccattccaacattacaatggtggagttggaagaaggagagaagagaatgaagagaggcagccaagtactcactttgacagagaaatgaatcctggaaagggcttccgctggaaggaaggagcacaaatagaactatttgcaaatttgccagagaaacccacatctgctgaccaactctgcattcttaactatgaacaggcaaataaggatcatcaggtgtgtgaaaaaagcaacagcatgaaaaatgccaaaataaacagaaacaatgaccgcagaagaaggaaagagagcagccaaactttggaccacctactgcctcataaggttgctgttgttgttgttgtttttaaatctccacaagtcttacaaagtgtggaaactggcctgtggacagtgacccctgacccttcttggatctatgaagaaaatgataaattgtcatttgatgaatgcacttggccctggcagttgaaccatgcaaatatatggaaattaaatagcctgctcctgaatgagcattgggccaaaaacaaaatcaagatggaaattagaaaattattcaaactgaatggcaataacgacaaaacctatcaaaacctctgggataaagcaaaggtggtgctaagaggaaagttcatagccctaagtacgtacatcaaaaagactgaaagtgcacaaactgacattctgaggtcacaccttaaggagctagagaaacaagaacaaaccaaacccaaacttaggagaagaaaggaaattaccaagatcagagcagaactaaatgaaactgaaaaatacaaaagataa

SEQ ID NO: 132169 - DNA, 753 bp, Homo sapiens
atgagggactgtgccatgaaggacggtgctatccggcccagatactatgcttttcccatggtcttcacaacctgcagaccagaagattccctcgggtgcctacaccaccagagccctggatttcaagcacaaagctgggagggcatctctgaaagaaaggcagcagccctactcaggggcttagagataaaactcccatctccctggaacagagcacctgggggaaggggcagctgtgggcccaccttcagcaaacttaaacgtttctgcctgctagcactgaagagagcagtggatctcctagcacagactgcctcctcaaaaagcaatagcatcaacatcaacaaaaaggacgcccacgcaaaaaccccatcagaaggtcatcaaaaaccaaaggtagataaatccacgaagatgaggaaaaaccagcacaaaaagtctgaaaattccaaaaaccagaacaactcttctcctccgaaggatcacaactactcgccggcaagggaacaaaactggatggagaatgagtttgacaaattgacagaagtaggtttcagaaggtgggtgataacaaactcctccccgctaaaggagcatgttctagcccaatgcaaggaagctaagaacctttataaatggttacaggaactgctaactagaataaccagtttagacaagaccataaatgacctgatggagctaaaaaacacagcacaagaactttgtgaagcatatacaagtatcaatagctga

SEQ ID NO: 132170 - DNA, 441 bp, Homo sapiens
atgggaaaagccttaaaatagtttataacttgtatagcttcacaatggtgatgaaagttatcaacgagctaagtgctcttacatagtttagtgaaaatactaaatacaatttttgttgaaaagcaaatgcagcaaatagcgaaattggacttctttacaaactcagtatcacaaaatttggaaatggatgtaaatgtgaaaatatgtctactttacttgaccattcattatatctaattagcttctaattttatacttataaaaatatagatgtaaagccactgtagccagactgcctctctagattcctcctctctgggcagagcatctctgaaagaaaggaagcagccccagtcaggggcttatagataaaactcccatctccctgggacagagcacctaggggaaggggcagctgtgggcgcagcttcagcagacttg

SEQ ID NO: 132171 - DNA, 465 bp, Homo sapiens
cgtacccgatcatacaggcaatgtcgtccgtgaagcggtcagctccatacacccagccaccaccacgcactcccaaaaggctgccagagcagggtggtccgctggctgagtagtagtcaaacagctggaagacatacatcccaccatcagtcaccatggagagatcaatgacaaagcggagggcacaacagagggccacagagatctccctgactctgccaccttggagatgtgcatgcctgctctgcagccatgaagcccaggatggagaagaccacgaagccagcaaagaagctggtcccattgtagcagttgttgttgaagcggttgtagctgcccagggctgaggggaccccagctttgaccagtcaggcttgagatagtaaatgatgctgtccagggcgccaggcagcagcactccaagcacaagcagcacgaccaggaccacgtaggggaatgtagcag

SEQ ID NO: 132172 - DNA, 1579 bp, Homo sapiens
cggtcagggcaggcccaaagggagggcagggccaggtcagggtgacgcaggcccagggtagctcagggttaaggtagggctcgatcacccagggcaggtctatggctggggccggggcagggccagggccagggcagggccagagccagggcaggtccatggcagtggcagctccagggcagggccagggttaggacctcggacatgtccaagtccagtgccagggcaagggcaagggcaggggcagggccaggctcatataagatccagggacaaagccaggcccagagatgggccaggacaggaacctcaccttcaactgcttccttcctggagtcacctgcccaagccctgggtaccgagatgattgtacagaccccccaccccactcacatcagtcaccatggagagatcaatgacaaagcggagggcacaacagagggccacagagatctccctttggaaacagaagtagtaggaggctgggaggaggttgaggaggccgagccccatgcaaatctggttgtcgagaccaagcagcaacagcatgaagaagaacagggcagcccagagtggggccactggcatcagtgtgacagcctgtggacaagcaagccagcttttcaggtcttcgatgctcggtaccagcgccattggtattcccgcttatcaaaactacctgcgcaaagccgcactcaccgacatgctacaaacctttgtgccttaccgtaccgccgtagagttgtgcgcgctggaacatggtggattagatacctgcgacggtggcagcaatggcattccctcgcctaccaccacccgctatgtttcagccatgagtgtggcaaagggcgtggtgtcgctgaccgggcaagaaatcttgctggatgccagcgaagaggtggttcatgttgcggtagtcgatgcaccttcgcatgagctactggacgcattgcatttcgctaccaccaaacgtattgagatcacctgctggacgcgccaacaaatggaaggtcacgccagtcgcacacaacagacattgcccgtagctgttcaggagaagcatcagcccaaagcagagttgctaactcgaacgttacaatctgcgctggaacaacgcgcgtctgatattcatatcgaaccagcggacaatgcctaccgcatccgcttgcgtatcgacggcgtattgcatcctttaccggatgtttcaccggatgccggagtcgcattaaccgccagattaaaagtgctgggaaacctggatattgcggaacatcgcctgccgcaggacgggcaattcactgtcgaactggcaggaaacgccgtctcatttcgtattgcgaccttaccatgtcggggtggtgaaaaggtggtattaaggttgttacagcaggtgggtcaggcactggatgtcaacacgcttggaatgcagccgttacaactggcggactttgctcatgccttgcaacaaccacagggactggtgctggtaactggccctaccggcagcggcaaaacggtcacgctttatagtgccctgcaaaagctgaataccgctgacattaatatttgtagcgtcgaa

SEQ ID NO: 132173 - DNA, 3294 bp, Homo sapiens
ggaaaatgacatgtttttattgctatgtctgcagtggctttttagcacagtagaatgtccccgcaggcccgccaccctcacccagccccagccctgcagcctctgtctgggtgtcggggaagcctttcttggggtcactcagccgtctcgggactggacgtgacagacaaacgtgggttaaagctgctacacagaagactggaggtgcgggaagtgcatccaccttaagcctggacgtgggagccgtgtccagggtcccttcctgggggtgtgcccgcacagggtgggaagcctgagcaggccaggttagcagcccagacacccaggacggaatattgcagcctcttgccccacagacttgtggcaaagggacagcgtggggacagcccgaggccccaccatgcacttttccaatccagtctggggctggggaccacacacgcacatccacacaacagactcacacacgcaacagctcgaagcttttgttttgcctatgaaagttagatctataaattcacactccttggctaggggcagaggggtaaggtagggctcacagggatgggagtggtaaggagaggatggtttgggctccttcctctttttagaaatatacaagcagaaatctcattctctcaagtttttataaaatgtgcaaaatacaagcctcctttgcccagaggcgccatttacatctggcattcacctttgctaagagatagagatctatatatactctccgtactcacgcacgcgtgcactcgcacccaagctcacacaattgatactggtggcgattggcgcaggaaccagaaggttccattgctggctggctctctaagcttctataacagggatggggagaggggtatagcccagctgaaatatttgccttggttctgctgcccctcccctgcctcccttctcctctctctcctccctcccgtctctccctccttcccttcctcacatttcccaagctgccactgctgcttctggggtgaggggtcaccacgggtgtgctgcagagcagagcctggagaggtgggcagggggtgggcgtggcaggggcaggaggagtgcagcactgtgggtgggggtggggcactagcggggcctaggaccagctcggctagggctggagggggagaggcatctatttttggtgggttgtgatatttttggcgttttattaaaaatggaaaaagttgttttagtgagcactcatggtgctttctcccctcctctcccaggcagaccccaaaagtgtcagggaaaggcaggccccctggaggggtggggtggggatgaagcaggggctgctatggctaccagaggtgagctggtgatgtgagctgagctgtcccatgacactctccaccacgacgaccttgctgctctcggacactggggtcagggtggtcaggcccctgacatctgcatcctgagctcggtactccaagtggtggaggccccagatgggctgggtcaggtgcttccagcactcagccatggtgcccttggccctgaggaggcagcccaggaggtgcagtggcatgcacagcatggaggacagcacgaaggcccagcccatggcctcaccccaccacgggtacacgtaggtgttgttgtagaccagcggctcgtagtacacaacgttgaagatgaagatgcccatgcagaccagcggggtgaagaaggaccagcaccattttatccaggggcaaggtcggtacccgatcatacaggcaatgtcgtccatgaagcggtcagctccgtacacccaggccaccaccacgcactcccaaaaggcctgccagagcagggtggtgccgctggccgagtagtagtcaaacagctggaagacgtacatcccgccatcagtcaccatggagagatcgatgacaaagcagagggcacaacagagggccacagagatctccctttggaaacggaagtagtaggaggccgggaggaggtccaggaggccggtgatgaaaccctccacacctacaaactggctgtcgagaccaagcagcaacagcatgaagaaaaacagggcagcccaaaatgggggccacaggcatcagtgtgacagcccgtgggtaggcaatgaaggctagaccaggccctgattctgccaccttggagatatgcacaccctgctctgtggccatgaagcccaggatggagaagaccacaaagccagcaaagaagctggtcccgctgttgatgagtgccaggatgatggcatccttgtagcagttgttgttgaagcgattgtagctgcccagggctgtgagggcccccaggccgatggcataagagaagaaaatctgggtccccgcatctatccacacctgaggggaccccagctttgaccagtcaggcttgagatagtaaatgatgccatccagggcgccaggcagcagcactccacgcaccagcagcacgaccaggaccacgtaggggaatgtagcagtgaagtacacgatctttcccgtggatttgacccccttccagacacagaagtagaccagcacccagcaggccagcagacacagggtcacctcccagttgagggctcctggaacctccagccctgtggagagcctcaagactttgttctcccagaactcgatgacaggggaccgccggtcagcaagctggtcacatgtgaggttggccaagctgtcattggcacagtcttcatgtcgaaagatctctacacagtcaggagtgttccaggtgtggccacacgtagcccatggcaaagtggtagtaaaggacttgaccaggtaatagaagccccaggccagcaccatgatgtagtaagtgttgcagtagaagacaatcaccatggaggcatagcccagacctttgaataggggacagatgttccagacattgatgctgccggccttcatgaactggcccagtgagatttccaggaagaaaatggggattcctccaaccagggcaatcaggacatagggaataaggaacacacctccgccgttcttgtagcacaggtaggggaagcgccacacgttaccgaggcccacggcgaagcccacgcacgacatgatgaagtccatctggcgtgtccaagtctctcgcggcggcacagcaaggcggctgctgggcgcccccaggcccgcagggccatcgcccttggacggggcaccatcgggcccggacacgatgagaggacccttcttctcgtctccagacacgctatagataccgttttcagcgctcttcttcgccatggccccggcgggccgcgag

SEQ ID NO: 132174 - DNA, 317 bp, Homo sapiens
tgaactctggggatcagtgaggaagaattcagacaagttcctgctgtcacggaacttacatcccagcaaggaggaatacagacaacaaattaaaacacctggggaggagtggagacagatactgtaaggagaataacaaggctctgtggtcagtagtgagaaggactggcaggtggggagagggctcctagagctgaacggcaggaaagatacagctctacccaagtctaggaagagccaaccagcaaagctcccacctcttggtgtgctggtggaaaaacaagcagaccatggtggctggggccttctgggtgggg

SEQ ID NO: 132175 - DNA, 1776 bp, Homo sapiens
caacgtagcaccttggtctgttcccgtaaacatgtggaacgcgtctgtgccaattccagagcccctagtggaacacaacgtcagccagtgacgagctgtaactccacaaaggtccgtggcttcattcttgaagtcagcaagaccaagaactcactggaaggaaccaactctggacaaatcttggcaaccacgaaaggactattgccaagctgccaagcaattcagcctttggagggtaccagcagcagtcaggcggcgacctcttcagaacctgaggctcaggtccaggccctcaccttcacacttttagcttctgataacacccgattcctcctgtattcaccacgggctctcaaggacacgagccaggagcccaaggggtgtccggctgcatttgggagtgtggtggacagtgaacctcccggtagagggagactccctctttctttcactatggtcttgatgccctcactaaccatcgaccccttggatctacccattttccagactccagcccagggtgcacgactgacctgtgtcctagccaagagcagggctgagccggagctttcaggccttactagcccaaatgaagtcacaggctggaacctcaaggaggccatctggacacagaagacagccatggaatgtaaattctctcgagtgtgcgggatcgtacgagttgtattgctctaccggatatgtgggcggtgccaccgtatatcggctatcaataagacgaagaacgtgtggacggccgtgattcctacatcccgtggcggctttacaacactaagtctcggtggtgtcaacgcgtcccgtcaatataatggcggggatgttccatcatttatgttagtacgctgtgggttccaagccttccagcgaccggagtttggctgtgggctgctgcgcttgccattggctcagacaccagggccaccagaagctgcctgcagtgtgagcttagagcggtgccagcctcaaggaggcagggaaaggggcaccagtgatggggacagagcctttggcctgggagaccttcccaacctgctgggcctggtgggggaccagctgggcgacacagagcggaagcggcggcatgccaagccaggcagctacagcatcgaggtgctgctggtggtggacgactcggtggttcgcttccatggcaaggagcatgtgcagaactatgtcctcaccctcatgaatatcggaaggaagatgaacaacagcctgaccccctccctgctgctacctgacagccaccgccacgcacagcagctctacgccagcggctcccacaccagcgtccccctgtgcagcccaccaccctcctcgcacgccctacaaggcacatgtcacgcctccctcacgccacttcaccgcacctctggcgacgggcccccacccgctctcccgccctcccgacatgccctgcgcactcccaccacgcctcccgacctgcccccgccgctgcacaggccccccttagacaagttcctgctgtcacggaacttacatcccagcaaggaggaatacagacaacaaattaaaacacctggggaggagtggagacagatactagtacattggagaagctcaagtcctccagatgcattcaagccagaacacagagaagaagacatcgaagccgagggcagagagctgaggggccctaacacttgcacctgccttgctcaagagcagccccaagggttcaggggtgtttctgtctccaccaccttcacagcagtacctgattccctaccgtga

SEQ ID NO: 132176 - DNA, 453 bp, Homo sapiens
cggctcgagggacctaggtcgcggggacatggccaaactttctcaagaaagtcgggatcgtcggtaaatacgggacccgctatggggcctccctccggaaaatggtgaagaaaattgaaatcagccagcacgccaagtacacttgctctttctgtggcataaccaagatgaagagacgagctgtggggatctggcactgtggttcctgcatgaagacagtggctggcggtgcctggacgtacaagtgagtctagttccttgtggtatttggaagtgtgtggaccacataggcccaaattccaggttgctgctggatgggctagttttaacactttctcatgactgagagaataaggatgcctttgtattttcaggattcctccgtggtggtttattttcagttattgaaagagtaaacacaaaactaccaaaatagaagtcggaaatctaatt

SEQ ID NO: 132177 - DNA, 627 bp, Homo sapiens
tttttttttaacttggaagacttatattcttatgctgcattttaccatttgactactaaaaaagtcactgaattacaataatacatcttggcatgcttttccaatacatcagtatttacacaatgcaaacatcagaatgtctaataaagttaacaagccaaggcaattttgttacataaattaaccccatttattataggccagtgatgtctcaaagagtagaggagcgtctactggtctttcaactccttcagtcttctgatggcgggacttttaccgtgacagctgaagtggtattgtaggtccagacaatgtggttcctggatgaagacaccgttactgtcttcatgcaggaaccacagcaccagatccccacagctcgtctcttcatcttggttttgccacagaaaagagcaagtgctacttggcgtgctggctgatttcaactatttcttcatccattttccggacgcgagcgccccatagcgggtaacagatatttaccgacgatcccggattttcttgggtacgtttgggccatgtcgccgcgacctaggtccggtcgacgcggccggcaatttagtagtaatagtccacccgcgaatttcggacgggaactcgaagggg

SEQ ID NO: 132178 - DNA, 498 bp, Homo sapiens
cggacgcgtgggcggaagaaggagcaagctatggaggggaacagggatgaggctgagaaatgtgtcgagatcgcccgggaggccctgaacgccggcaaccgcgagaaggcccagcgcttcctgcagaaggccgagaagctctacccactgccctcggcccgcgcactattggaaataattatgaaaaatggaagcacggctggaaatagccctcattgccgaaaaccatcaggtagtggcgatcaaagcaagcctaattgcacaaaggacagcacatctggtagtggtgaaggtggaaaaaggctataccaaagaccaagtagatggagttctcagagctttatggatattggaacattgatatgggatggtggacctgtacctaacacacacataaacaaatgtaaaaattactatgaagtacttggagttacgaaagatgctggtgatgaagatttgaaaaaagcttatagaaagcttgctttgaagtttcatccc

SEQ ID NO: 132179 - DNA, 395 bp, Homo sapiens
ggaggcaggagatcgatagcattcatcaagtgggggtttattgtcttgctctggtgccagccaatacattgccaaaaactccactaggaggaatccatatatctcagacgaaacaactctttctggagggatcactgcatccttgcaacatcctcatgtgcccccatacatgtgtgacaaacttgccaaagccccggcaaaaacaaccaggtgtaggccctgcttccgtgatggttgggaatctggttgctggaaaacgtatagcacaagctgctggaagggatctgggacaaatagaagagaatgatttggtgaggaagcaccagtttctggcagagatcctacagtggcgagcccaggcgactcctgaccatgtactcttcatgctgttaaaa

SEQ ID NO: 132180 - DNA, 1200 bp, Homo sapiens
atggatggaattgaagattgtggaacagcaccgcttaaggatgtgttgcaagggtctcggattatagggggcaccgaagcacaagctggcgcatggccgtgggtggtgagcctgcagattaaatatggccgtgttcttgttcatgtatgtgggggaaccctagtgagagagaggcaacggagcctctccctgtggccaccaccaccactgggcccatgggtggttctgccaggccactgccgatgtttgcttaaagcccaagggctcttctatcagcttgtggtcaatgctggcagacagttaaggcattctaagtcacaggatgagacaagtcagcacaaaatacaggtcatgaagaccttgctgataaaacaggttgcagtaaagaagccggccaaaactgaaatggccacaagagtgacccctggtcatcctcactgctacactcccatcagcgacatttacaaatcccatggcaatgtcaggaaggcgatcgatagcattcatcaagtgggggtttattgtcttgctctggtgccagccaatacattgccaaaaactccactaggaggaatccatatatctcagacgaaacaactctttctggagggatcactgcatccttgcaacatcctcatgtgcccccatacatgtgtgacaaacttgccaaagccccggcaaaaacaaccaggtaatctactcagagctgtatcctcaggttctctcattttgtcttcagttacgggtattaaccccttatcagataagtggtttgcaaataattttttcccagtccatgcagaaaaggcttttgataaaatccagcatcgttttatgattaaaaccctcaacaaactgggcattaaaggaacatacctcaaaataataagagccatctatgacaaaccctcagccaacataatactgaatggggaaaagttgaaagcattccctctgagaactggaacaagacaaggatgcccactgtcacctctcctcttcaacatagtactggaagtcctagccagaggaatcagacaagagaaaaaaataaagggcatccaaatcagtaaagaggaagtcaaagtgtcactgtttgctgacaatataaatattttccttgaaaaccctaaagactcctccagaaagctcctagaactgataaaagaattccgcggatccttctatagagtcgcctaa

SEQ ID NO: 132181 - DNA, 390 bp, Homo sapiens; identical to SEQ ID NO: 92520

SEQ ID NO: 132182 - DNA, 695 bp, Homo sapiens
agcggctttatggaccacctggaggagaaggcagacctgagtgagctggtggagaaagaagaacttggattcttccagtactacagagagagatgccatcagaaagtttatcaccctataacaaagccagggggcagtgccaaagatgcagcaccgggaggaggacaccatcaggctggccctggacagggaggagatgaaggcatcaggatgatgttttgtgtctcacctaatcgggccacctttgttgtgagcgtggtgcctctagtgtcaatcattgatgtaatttatggacgatatctacggaaactgaccaaagtcacccaggattcgctggcacaagccactcagctagctgaggaacgtattggaaatgttaagaactgttcgagcttttgggaaagaaatgactgaaatcgagaaataccccagcaaagtggaccatgtaatgcaaaaagcaaggaaagaggcattcgcccgggcagagggggtcatcttaaatgagaaaagcttccagggtgctttggagtttaagaacgtgcattttgcctatccagctcgcccagaggtgcccatatttcaggatttcagcctttccattccgtcaggatctgtcacggcactggttggcccaagtggttctggcaaatcaacagtgctttcactcctgctgaggttgtacgaccctgcttctg

SEQ ID NO: 132183 - DNA, 2139 bp, Homo sapiens
atgctggagggtcttgccttaatgttgatgatctgggtagtgattgctgaagatcgcgtcaccccttatttgtttaaagttgtgtcccttttccgtgttcgtgtcgtcctgggtcatgccctgcctcccaaggctggttaccggtgtcacccgtgctgccgcggttattctagtgctgttccttgtgggcagaaacagcggattgcgattgcccgtgctctgctaaagcactttgggagggtgcatgagccactgtacccagccggcacaccttttagaacgactcaaatccaaaattctgacaacaccaaatgccggaatctgggcatacctgagctgggagcctctgcctcaaggcctgccacaagtctgcaatcaaggtgtcagccagggctttggtctcatctgaaagctgaactcgggcaggatctgcatccaaactcattcaagtggttggtgacaggattcatgtccctatggttggagccctcattgagtgaattgccccacgggctgctggtgtccatcatcagctgtgccctgacatgtttggcacagatcaggctcagtaaatctgcggttggatttctcacgatgtccagtgttatctccatgtctgcccctttcttcctggggaagatcattgatgtcatctataccaaccccactgtggactacagcgacaacctgacccgcctctgcctagggctcagtgccgtgtttctgtgtggtgctgccgccaatgccattcgtgtctacctcatgcaaacttcaggtcagcgcattgtgaataggctgagaacttcattattctcctccattctgaggcaggaggttgctttctttgacaagactcgcacaggagaattgattaaccgcctctcatcagacactgcactcctggggcgctcagtgactgaaaacctctcacatgggctcagggccggggcccaggcttctgtaggcatcagtatgatgttttttgtctcacctaatctggccacctttgttttgagcgtggtgcctccagtgtcaatcattgctgtaatttatgggcgatatctacggaaactgaccaaagtcactcaggattccctggcacaagccactcagctagctgaggaacgtattggaaatgtaagaactgttcgagcttttgggaaagaaatgactgaaatcgagaaatatgccagcaaagtggaccatgtaatgcagttagcaaggaaagaggcattcgcccgggctggtttctttggagcaactgggctctccggaaacctgatcgtgctttctgtcctgtacaaaggagggctgctgatgggcagtgcccacatgaccgtgggtgaactctcttccttcctaatgtatgctttctgggttggaataagcattggaggaaaacaggaatgcatccccagtcaacttgggacaaatgatttcctggtttttgtttcccttcttgtctttgaaaatcaagatggaaaggtcagagactttcaagtatcttggttacctcattcaactgaattgcagcaaagatggaaacgacatatccttcaaaagaaaggggaaggaaaatgtgcattgcagattgctggacaacagcgctggatagaagaggttgggggtggttggaggaagctgtacactgtgcctaccacatgcccactgctgaacagggcacccatctggttatatcaggcaggtacagcaatccccactgtcattcaaggactcaaaggcagcacttcagagtcctcaccattatctgaaggatctggcatccatcatcttaaatcctccctttcaccctcatcttatcctcgtttttcagagaggaatctcgaacacagagagagggagcctacgcaaggtctcccaatttacacatcacagaaccacattctgcgacaaagcctgtctttggcatcttcccacatcccaagcagaggaagaggaagcacaggcctcaccttggaatcagggaagggagcagaaagcctggcaggatggagcaggggcagagacctcatgggtgcacaggaaggagaactgagaaatgaaatgaagcctctagattatagaacagaaggattttgtggcaaggtcggcctaaaagggctttacactggggaatga

SEQ ID NO: 132184 - DNA, 825 bp, Homo sapiens
atgaagcccaactgctctatttacatagtacaaagccaagaactggacagagtgagtgactctgatgtgatcacacacagccagtcgtacaccctctcagaaggcagtcaacagttgcctaaaggggactcccaaccctcgacagtcgtgcagcctctcagccacccatcacggaatggagagccagaggccccacagcctggttccctctctccctgctgccatgtaagatgtgactttgctcctccttcaccttctgccacaactgtgaagcctccccaaccatgtggaactctcagtgcatggcaggatgcccacattgtttacactcctgaggataccatcagtaccttcaggtacaatggtgcccaccagtttaaggcacagcatattgaagggccttcaagtcaggctaaagcgagcagtcctcagggttttgatgtggatcgagatgccaaaaagctgaacaaagcctgcaaaggaatggtgagtgggtctcctgcacgcagaaaggctccttccgggcttggcacctgccaggatccaggcctgagaggccaaggccctcgtctgggacaggagtggtctgaatggaaagaaagagggaccaatgaagcagccatcattgaaatcttatcgggcaggacatcagatgagaggcaacaaatcaagcaaaagtacaaggcaacgtacggcaaggtgattccaggggtggtcagcaagcttgcacccagccatggcctcagccgtctcggcttcctcatgtccccaggccacgcagaatatctttatagctttattgagtcagcccaggaggaaaagtga

SEQ ID NO: 132185 - DNA, 388 bp, Homo sapiens
  misc_feature (1)...(388): n = a,t,c or g
tggggccagctggctcgnatgtacgtcagcacgcgggaacggtacaagtggctgcgcttcagnaggactgtctgtacctgaacgtgtacgcgccggcgncgcccgggggatccccagctgccagtgatggtctggttcccgggaggcgccttcatcgtgggcgctgcttcttcgtacgagggctctgacttggccgcccgcgagaaagtggtgctggtgtttctgcagcacaggctcggcatcttcggcttcctgagcacggacgacagccacgcgcgcgggaactgggggctgctggaccagatgggcggctctgcgctgggtgcaggagaacatcgcagcctttcgggggagacccagggaaattttgaccctgtttcggccaatt

SEQ ID NO: 132186 - DNA, 765 bp, Homo sapiens
atggtaaatgcgctgtcgctggcggcacgtattcatgcggaagttccggcggatgaaagcccggaaatgacagaaggctatgaaggtttctatcatctggcgagcatgaaaggcaccgttgaacgggccgatatgcactacatcatccgtgatttcgaccgtaaacagtttgaagcgcgtaaacgtaaaatgatggagatcgccaaaaaagtgggcaaagggttacatcctgattgctacattgaactggtgattgaagacagttactacaatatgcgcgagaaagtggttgagcatccgcatattctcgatatcgcccagcaggcgatgcgcgattgcgatattgaaccggaactgaaaccgatccgcggtggtaccgacggcgcgcagttgtcgtttatgggattaccgtgcccgaacctgttcactggcggttacaactatcatgcgcatcgccaaaattctccgcagtcagcgcaatgttgctggcgagtgcatccagtgccggacggtgcggggaatcgatcttctcaccattggcatacacgtcgtcgccaattgaaagtgactcatgcggacctgcactatgaaggttcttgcgccattgaccaggattttcttgacgcagccggtattctcgaaaacgaagccattgatatctggaatgtcaccaacggcaagcgtttctccacttatgccatcgcggcagaacgcggttcgagaattatttctgttaacggtgcggcggcccactggtaccgataa

SEQ ID NO: 132187 - DNA, 2613 bp, Homo sapiens
ctaacccattgggtctatcacttgtatgggattcaacggatactgatacatattccatccacctctcaacccaatcgggtccggggtgatataccgcccctgcaacggatcgtagtgccggtgacggttatagtacagccccgactcctcatcatgctgctgccctggcagacggtacggctggtgcaggtgatgcgggttctcctcattaagctggttgccccattcatcatactccccgcgccacgccgtattgccgtcttcgctgatgagcgccagcggcaggccccggtggtcgcagtggtaaaaatgaacttttcgcgccggtgtgtattccggctccacctgtctggccagttgctccaccgtcagcccgcactgcgcaagccacgcccggctttcactgctcacgcggtctgcccggatttcttcctccagcctgtccagcagccgcaccagttcagccgggaacaccacgccgtggccgttctcactcccttcctgctggagcgtctctgccaggctgcgccgctgcgctttttcccgctcgccgttctctgtctcgacccggatgagcggcgtgaagcttcccggctcgtataccgtctggatacgtgtggtgtcagtctgcaccgtcgtcagcctgtctccgtcccagccatatcgctggcgctgccgatgctggcgattctggtggtacagaccatcttcatggcgttgtatgccatcttcgttacctggcgcatgatgggcaaaaactacgatgcggcagtgctggctgcgggtcactgtggttttggcctcggtgcaacgccaacggcaatcgccaacatgcaggcgatcactgaacgctttggcccgtcgcacatggcgtttttggtggtgccgatggtcggtgcgttctttatcgatatcgtcaatgcgctggtaattaagttgtatttgatgttgccgatttttgccggttaaccgatgaagcggcggtagaagtgccgccgcaacaaagacaaatgcctgatacgcttcgcttatcaagcgttccgtctccggcatccagcgttctatcagggcttttgcctgttgtgggtaacgttcgtgaatatggcgtgccaggcgctgaacttccgggatcatcgcctgatcgcgcagtaaatccgccactttaaattcagcattacccgtctgacgcgtgcctaacaattcgccagggccgcgaatctccagatctttttgcgcaatcacaaaaccgtcgtacagtcgcgacggtccaggccggcgattgatagcgatgcgctggcaaatcaaatcactatggcgggcctggaagttgacggtgtagaaccggttgccggcagcttccacggcgtggtcgttggtgaagtggttgagtgtgcgcagcatccgaacgctgacaaactgcgtgtgacaaaagtgaatgtcggcggcgatcgcctgctggacatcgtctgcggtgcgccaaactgccgtcagggcctgcgtgtagcggtagcgaccattggtgctgttctgccgggtgatttcaaaattaaagcggcgaaactgcgtggcgaaccgtctgaagggatgctgtgctccttctctgaactgggcatttctgacgatcacagcggcattatcgaactgcctgcggatgcgccgattggcaccgatatccgtgaatacctgaaacttgatgacaacaccatcgaaatcagcgtgacgccaaaccgtgccgactggttgccgctgctgaaccagctgccgctggttcaaccggaaatcgttccggttggtgcgaccatcgacgacacgctgccgattacagtcgaaacgccggaaccggatcaggcgcggctccccccggctgttcgtgcacctgatcctgccgctcatcggcatcgtcatcctgctgatggtcttgacgcagatgagccgggtcgccctggccgtcggcggggccctatccttgccatcaagaatataccgcatgacactaatttcttgtttcgataaggagtcgagtttttgctggtcggacgttaaacttccaacaaaccggttgagagagaaggggaaatagcagtagccattttttgcagcttcaatagccgcaatgatattgttcatgccttcttttttactcacgaaaccattagcgccagcatcagcacaatgtttcccgtaaaaatggtcatttttagcggagacgataataataattccgctatattggcgcttcctcagcgtttctaacacctggataccgttaactccggggatatcgacatcaatgatgacgatatcaggcttaagtgtttccacccgctgaacggcacttccgccttcagtcaactctgctaagatttcaatatcgtttttgatcaataaattacgaattgactgcaaccaaaaacgccgttcctgcaagctctcgatgcttgcttcagggttgcttattcgctggataacctgccttataacggggattgaggcgagatcactaagccgagatgaatttccccgcttattcgcaccttccataacagtgctgtcagcgatgcggcgaagtttctggctttctcctgcgggatcgttgagaccatgatgtcccat

SEQ ID NO: 132188 - DNA, 908 bp, Homo sapiens
tagaaggttcccccaaaaaaagggggccaaaagggttccatccctgattggtccccatgacctgggtgattgaagccagttattccattatgcgcaaaaaagtgggtgagcatccgcattttttggatatcgcccaccaggcgatgcgcgattgcgatattgaaccggaactgaacccgatccgcggtggtaccgacggcgcgcagttgtcgtttatgggattaccgtgcccgaacctgttcactggcggttacaactatcatggtaagcatgagtttgtgactctggaaggtatggaaaaagcggtgcaggtgatcgtccgtattgccgagttaacggcgcaacggaagtaagcgaaaagggatgcggcatgtgatgccgcatccggcttaaatccaaacttacccttcgaagaaccaatacccgctattgaccagcgccgcgagcatcgcgaggaatgacggatcttccagcgcatcgccaaaattctccgcagtcagcgcaatgttgctggcgagtgcatccagtgccggacggtgcggggaatcgatcttctcaccattggcatacacgtcgtcgccaatgcgcaatacgcgcagaccacccaggcgcaccagcacttcaccttgtttcagcgcatcgtagatttcatccggctgataaggcggctctggcggcgcgatatccagttcatgacgtgactgggatataaactcgccaaaccattgcttaaaggggtccgggtgggtggacaattccgagcatcatctcacgcagtttatccatctcttgcggcagaacatccgcaggatgagcgcgaggtggaacatccggatcgctgtagtagttgccgcccagttcacgttgcagcacataatcggcaaatccactaaatcagttccgcgatt

SEQ ID NO: 132189 - DNA, 3060 bp, Homo sapiens
gaggacggctaccatgccatccacagtgttgccatccacagtgttgccatcactcctgcccacaacaggagctggctggagcatgaggtggattctgtgctggagcctcaccctttgcctgatggcgcagacggccttgggtgccttgcacaccaaaaggcctcaagtggtcaccaaatatggaaccctgcaaggaaaacagatgcatgtggggaagacacccatccaagtctttttaggagtccccttctccagacctcctttaggtatcctcaggtttgcacctccagaacccccggagccctggaaaggaatcagagatgctaccacctacccgcctggaaagcaggaaaatctattaggcagagaaaaaccagatatgcctggagatacagctgcctttgtcaacccccaccctggagctgggtcaggtgccatctgtccccaagtcagcgtccatcatgtcagcttgtctatgttcatctggggcgttggggctcaaaatagcagctgcttcgagagctggaccaatgccaagacggccctaggcgtgagatatataggatatggtgctccactcatgcctaaggtatatttgaaggctcccatgattctgaatggagtctgtgttatctggaaaggctggattgatctccaaagactggatggtatgggctgtctggagtttgatgaggagcgagcccagctgcggtcccaaagggtaccggccccgccacctcaggaagccgaagatgccgagcctgtgctgcagaaacaccagcaccactttctcgcgggcggccaagtcagagccctcgtacgaagaagcagcgcccacgatgaaggcgcctcccgggaaccagaccatcacctggacgaagaaggccgggatctgagcggggcggtgggcggcggtgggaccgcgggcgcgggagacctggcactcactggcagctggggatccccgggcgcgcgcgccggcgcgtacacgttcaggtacagacagtcctcgctgaagcgcagccacttgtaccgttcccgcgtgctgacgtacatcgaggccagctggccccaggactcctgcaggcacctgcgggcaccagagccgccttatcagccggatgaaatctacgatgcgctgaaacaaggtgaagtgctggtgcgcctgggtggtctgcgcgtattgcgcattggcgacgacgtgtatgccaatggtgagaagatcgattccccgcaccgtccggcactggatgcactcgccagcaacattgcgctgactgcggagaattttggcgatgcgctggaagatccgtcattcctcgcgatgctcgcggcgctggtcaatagcgggtattggttcttcgaagggcgaaaaagttcagcgtctgttctgatgagcttgcatccaggtcaagatctggcgcggctgaacctaatacgatgttaccgtcatttttgtccatcagtcgtacaccgaccccagttgcttcgcctgcactggtgttgctcaacaaaggcgtactggcgcatgatgggcaaaaactacgatgcggcagtgctggctgcgggtcactgtggttttggcctcggtgcaacgccaacggcaatcgccaacatgcaggcgatcactgaacgctttggcccgtcgcacatggcgtttttggtggtgccgatggtcggtgcgttctttatcgatatcgtcaatgcgctgagtcgtggcgtcggcagtaccgccgtggcgctgctgcataagttgggttatcaggtcgttgccgtttccggtcgcgaaagtacccatgaatatctgaaaagtttaggtgctagccgtgttctccctcgtgatgagtttgccgaatcccgtcctctggaaaaacaagtctgggctggggcaattgacaccgttggcgacaaagtgctggcaaaagtgctggcgcaaatgaattacggcggctgcgtggcggcctgtggtctggcgggtggttttactctgccaaccacggtcatgccatttattctgcgtaatgtccgtttgcaaggggtggattcagtaatgacgccaccagaacgccgcgcacaagcctggcagcgactggtcgccgatttaccggaatcattctatacccaggcggcaaaagagatatctctgtcagaggcaccgaactttgccgaggccatcattaataaccagatccagggtcgcacgctggtgaagcattcacatctatccagacgatgcagtgaaaattgggtaatccccagaaagcgctgtcgaagtctgaccagaagcataaacacgaacgcccgcttcccccacccataccaacaatgttccaacttgcgcagccaggcgtacagctgcatgcgaaacccgtgtaccaggttccagcatgatgcaggcaaccgagccaacaggaatatgagtgcgcagaacgaccgcgcaactggttatcgatacgacgggattcctgccgtcgtcggatttgccgaagggatggatgcacaggccgtcctgcactctatacaaaatggtatcggcagcacgctcggcgggctggcaatgatcctcggtttcggggccatgttaggcaagctgatttctgatacgggtgcggcacaacgtatcgccactacgctgattgctacttttggtaaaaaacgcgtgcaatgggcgctagtgatcaccggtctggttgtgggcctcgccatgttttttgaagtgggttttgtcctgctgttgccgttggtatttaccatcgtagcatcatcaggattacccctgttgtatgttggcgtaccaatggtagcagcgctctctgtaacccactgttttctgccgccacatccagggcctactgccatcgcgactatctttgaggctaatctcggaacgactttactgtatggatttatcattaccattccgacagttattgtcgcaggaccgctgttttctaaactgctaactcgctttgagaaagcaccaccggaaggcttatttaatcctcatctgtttagcgaagaggagatgccctccttttggaacagtattttcgctgccgt

SEQ ID NO: 132190 - DNA, 1083 bp, Homo sapiens; identical to SEQ ID NO: 126411

SEQ ID NO: 132191 - DNA, 997 bp, Homo sapiens
cggacgcgtgggcggacgcgtggagcaagaaggcggatgttaaagttgaaaacccagaatactaaagagaagaaacccgaagccaagaagagttgatgctggtggcaaggtgaaaaagggtaacctcaaagcctaaaaagcccaagaaggggaagcccccattgcagcccgcaacccgtgtccttgtaaaaaagaaataggaaggaattcccgatctggcatgtattccagaaaaggccatgtacaagaggaaagtactcagccgctaaatccaagggttgaaaagaaaaaggaaggagaaggttctcgcaacttgttacaaaaccagttgggtggtgacaagaaccggcggtaacccggggtggttaaacttccgcaaaaatgccctagatattatccctactggaagatgtgcctcgaaaagcttgtttgagccacggcaaaaaaacccctttagttcagcacgttgagaaaaactgcgaggccagcatttacccccggggaccattctgattcatcctcactggaccgccacaggggcaagaagggttggttttcctgaaagcagcctggctaagttggcttatttactttgttgacttggacctctggtcctcaaatccgaggttcctctaccgaagaacacaccagaaattttgtcatttgccactttcaaccaaaatccgatatcagcaattgtaaaaatcccaaaacatcttactggatgcttactttcaagaaggaagaagctgcggaaggcccagacaaccaggaaggttgagatcttcgacacagaaaaagagaaatatgagatttacggagcagcgcaagattgatcagaaagctgtggactcacaaattttaccaaaaatcaaagctattcctcagctccagggctacctgcgatctgtgtttgctctgacgaatggaatttatcctcacaaactggtcgttctaaactgtcttaagaaccctaattaaatagctgactacaaaa

SEQ ID NO: 132192 - DNA, 1887 bp, Homo sapiens
ccgtttttgttcttctaagcaaaagatctccctctctctagccgatgctccccactcagttcatcccgggaatgggccagggaggaaggttctcatgcatcgccccgagctgccaggcgagcttcgggctccttaaattcacaggccaacagcccgcgtcctctccgcgcaggctcccggttgcccgcggtccccggcccagctccttggcctcctcctcgtcggtccgcccctggtggtcttggcgcccgctcgtccagctcggcgcgccggggaccgccggctgcccggggcagtccgcacgccctcggggatctcggctcccggatccgccgcgccggcaggagccggccgggcctggagggagcaagcggatgcgcccacgcccccggcacggggatggcgcgacagggcccgggctccggggtggggctcggcagagctcctgacagctccggggctcggcagcgcgggaggggggagctccgccgctcgccgctcattcccggctcggggctcccctccactcgctcgggcggcgcggggcccgttcgggccgcccgtcgccgcccccgccccccgcgcgcccgcccgccagcccgcctgcgccctcgctcgccccgcgcgcgttcctagggcgccacctctttgcgactagctcacttctccggcaggtttgcctcggagcgtgtgaacattcctccgctcggttttcaactcgcctccaacctgcgccgcccggccagcatgtctccccgcccgtgaagcgggctgccgcctccctgccgctccggctgccactaacgacccgccctcgccgccacctggccctcctgatcgacgacacacgcacttgaaacttgttctcagggtgtgtggaatcaactttccggaagcaaccagcccaccagaggaggtcccgagcgcgagcggagacgatgcagcggagactggttcagcagtggagcgtcgcggtgttcctgctgagctacgcggtgccctcctgcgggcgctcggtggagggtctcagccgccgcctcaaaagagctgtgtctgaacatcagctcctccatgacaaggggaagtccatccaagatttacggcgacgattcttccttcaccatctgatcgcagaaatccacacagctgaaatccaccccgtccgatttgggtctgatgatgagggcagatacctaactcaggaaactaacaaggtggagacgtacaaagagcagccgctcaagacacctgggaagaaaaagaaaggcaagcccgggaaacgcaaggagcaggaaaagaaaaaacggcgaactcgctctgcctggttagactctggagtgactgggagtgggctagaaggggaccacctgtctgacacctccacaacgtcgctggagctcgattcacggaggcattgaaattttcagcagagaccttccaaggacatattgcaggattctgtaatagtgaacatatggaaagtattagaaatatttattgtctgtaaatactgtaaatgcattggaataaaactgtctcccccattgctctatgaaactgcacattggtcattgtgaatatttttttttttgccaaggctaatccaattattattatcacatttaccataatttattttgtccattgatgtatttattttgtaaatgtatcttggtgctgctgaatttctatattttttgtaacataatgcactttagatatacatatcaagtatgttgataaatgacacaatgaagtgtctctattttgtggttgattttaatgaatgcctaaatataattatccaaattgattttcctttgtgcatgtaaaaataacagtattttaaatttgtaaagaatgtctaataaaatataatctaattac

SEQ ID NO: 132193 - DNA, 516 bp, Homo sapiens
ctgtccattagtccagtgcggtggaattcccggctgccactaacgacccgccctcgccgccacctggccctcctgatcgacgacacacgcacttgaaacttgttctcagggtgtgtggaatcaactttccggaagcaaccagcccaccagaggaggtcccgagcgcgagcggagacgatgcagcggagactggttcagcagtggagcgtcgcggtgttcctgctgagctacgcggtgccctcctgcgggcgctcggtggagggtctcagccgccgcctcaaaagagctgtgtctgaacatcagctcctccatgacaaggggaagtccatccaagatttacggcgacgattcttccttcaccatctgatcgcagaaatccacacagctgaaatcagagctacctcggaggtgtcccctaactccaagccctctcccaacacaaagaaccaccccgtccgatttgggtctgatgatgagggcagatacctaactcaggaaactaacaaggtggagaca

SEQ ID NO: 132194 - DNA, 474 bp, Homo sapiens
tcacaggctcagccagaggtctctcccatcatacactgtggcctccgggctctgcaccttctgctggctccttgcttttgccaccctctgttttggattcttatcttgatttccattttggtgttgatgctttggagtttctcttgctttctgggccattgtcacccttggcattctgccagaaacgttgcccacttttattcttccagcaacttctattagagcctgagttaggctccattcaaacagtcttccggctggatcgctggcaggctggggctctggggcgttgcggcccctggggtaggggggtctgtgcctcaccaggacagcccgaggacgcacatcaacgagccttaaccaccatggacagctcactggcttcccccagccagctctgcgcaatttacaaactccataggagccaccagctagattgatttttatgccctggagagatgccacgtgttccat

SEQ ID NO: 132195 - DNA, 771 bp, Homo sapiens
atgaccacgctggtcagcgggggctgccgcctccctgccgctccggctgccactaacgacccgccctcgccgccacctggccctcctgatcgacgacacacgcacttgaaacttgttctcagggtgtgtggaatcaactttccggaagcaaccagcccaccagaggaggtcccgagcgcgagcggagacgatgcagcggagactggttcagcagtggagcgtcgcggtgttcctgctgagctacgcggtgccctcctgcgggcgctcggtggagggtctcagccgccgcctttgaagcccatgaggcccaagaatgttcatgttcccaccaaggtcacaacctacaaaagagctgtgtctgaacatcagctcctccatgacaaggggaagtccatccaagatttacggcgacgattcttccttcaccatctgatcgcagaaatccacacagctgaaatcagagctacctcggaggtgtcccctaactccaagccctctcccaacacaaagaaccaccccgtccgatttgggtctgatgatgagggcagatacctaactcaggaaactaacaaggtggagacgtacaaagagcagccgctcaagacacctgggaagaaaaagaaaggcaagcccgggaaacgcaaggagcaggaaaagaaaaaacggcgaactcgctctgcctggttagactctggagtgactgggagtgggctagaaggggaccacctgtctgacacctccacaacgtcgctggagctcgattcacggtaa

SEQ ID NO: 132196 - DNA, 708 bp, Homo sapiens
atgggccagggaggaaggttctcatgcatcgccccgagctgccaggcgagcttcgggctccttaaattcacaggccaacagcccgcgtcctctccgcgcaggctcccggttgcccgcggtccccggcccagctccttggcctcctcctcgtcggtttgcctcggagcgtgtgaacattcctccgctcggttttcaactcgcctccaacctgcgccgcccggccagcatgtctccccgcccgtgaagcggggctgccgcctccctgccgctccggctgccactaacgacccgccctcgccgccacctggccctcctgatcgacgacacacgcacttgaaacttgttctcagggtgtgtggaatcaacttttcggaagcaaccagccccccagaggaggtcccgagcgcgagcggagacgatgcagcggagactggttcagcagtggagcgtcgcggtgttcctgctgagctacgcggtgccctcctgcgggcgctcggtggagggtctcagccgccgcctttccttaacgcagcgtttctcaaagtgtggcctttgggccacctacaccaaaatctactgcatgtgctggttgaaaaaggacgggctgctgaaagccattctaagcctcctgaatcaatccttgaagagggctcaagaataagcaatcgtgcaaactttccagatgaggttttgcacactaatgcttaa

SEQ ID NO: 132197 - DNA, 882 bp, Homo sapiens
atggagggatcctcactggccatcaatgtggatgtctgcagtggtgatgaggggacaaaagtacagaaaagtccagtaacaatgccctctctggaaagaggcaccaagcagttttcagagagaggggaagtaactcagagaagagaggaaaaggggaaaggaggggaaggggaaggagtgatggaggaaatgaggagagaaaagagaagacaagatgaaaggcgccacctctttgcgactagctcacttctccggcaggtttgcctcggagcgtgtgaacattcctccgctcggttttcaactcgcctccaacctgcgccgcccggccagcatgtctccccgcccgtgaagcggggctgccgcctccctgccgctccggctgccactaacgacccgccctcgccgccacctggccctcctgatcgacgacacacgcacttgaaacttgttctcagggtgtgtggaatcaactttccggaagcaaccagcccaccagaggaggtcccgagcgcgagcggagacgatgcagcggagactggttcagcagtggagcgtcgcggtgttcctgctgagctacgcggtgccctcctgcgggcgctcggtggagggtctcagccgccgcctgagtggcgatcagacacactgctcaggacaatggtgattaatgaagtcgccccactgaacaatatgctacaaagggcttcaccactcctagagaagaaactgtccaattttcctgagataccggacaatctcctggcagcagtttccccactcaatgaaagcaggacagcccgaggacgcacatcaacgagccttaaccaccatggacagctcactggcttcccccagccagctctgcgcaatttacaaactccatag

SEQ ID NO: 132198 - DNA, 531 bp, Homo sapiens
  misc_feature (1)...(531): n = a,t,c or g
gcggtgcaattcggttcgcaaagaagctgacttcagagggggaaactttcttcttttaggaggcggttagccctgttccacgaacccaggagaactgctggccagattaattagacattgctatgggagacgtgtaaacacactacttatcattgatgcatatataaaaccattttattttcgctattatttcagaggaagcgcctctgatttgtttcttttttccctttttgctctttctggctgtgtggtttggagaaagcacagttggagtagccggttgctaaataagtaagtgctgagaggctccagagaaattttttttcttttcaacttgggagatgcccttgatgttgaagaggctttttgagagcgggctaaaaagggggagcggagtagtgcggggagatggagagtccagactgacactcgggtcccattcccttctgttgcaggtcccgagcgcgagtangacgatgcagcggagactggttcagcagtggagcgtcgcggtgttcctgctgagctacg

SEQ ID NO: 132199 - DNA, 323 bp, Homo sapiens
ttggtttttcagcagacctgcagagggcacaggggaagtgttcctttggcccctgcagcaccacaggaccccaggtcctgtctgtggtcgtggtggtaacgggtgccagcctggaccagtcctgcatcgtggagcttcactctggacattctaaggggcagactgtggctggggcctcaacatcctggtggatacaggcagcagtaactttgcagtgggtgctgccccccaccccttcctgcatcgctactaccagaggcagctgtgagtcctggggagagcccgggggaagtaccttttccaaggatccagggctaagaagg

SEQ ID NO: 132200 - DNA, 810 bp, Homo sapiens
atgcagagcactggagaaagagcattcaggcagaagaagcacaggtgcaaaggacctgtgacaaccagtagctctggggactgtcagaaagccagtatagccaggtatgaaattcttgaatttgcccgggagattggtattgatcccatcaaggaaccagaactgatgtggctggcgcgagagggcatcgtggccccactgcctggagagtggaaaccatgcctccagaaacaactgagattacagacggagaagttccctgatggtttctggctaggagagcagctggtgtgctggcaagcaggcaccaccccttggaacattttcccagtcatctcactctacctaatgggtgaggttaccaaccagtccttccgcatcaccatccttccgcagcaatacctgcggccagtggaagatgtggccacgtcccaagacgactgttacaagtttgccatctcacagtcatccacgggcactgttatgggagctgttatcatggagggcttctacgttgtctttgatcgggcccgaaaacgaattggctttgctgtcagcgcttgccatgtgcacgatgagttcaggacggcagcggtggaaggcccttttgtcaccttggacatggaagactgtggctacaacattccacagacagatgagtcaaccctcatgaccatagcctatgtcatggctgccatctgcgccctcttcatgctgccactctgcctcatggtgtgtcagtggcgctgcctccgctgcctgcgccagcagcatgatgactttgctgatgacatctccctgctgaagtga

SEQ ID NO: 132201 - DNA, 1125 bp, Homo sapiens
ggccggcctgtgcccagcaggctggacaaagaggtagtgcccctgaagctctccgatgcgtccagcattcaccagccctgctgcctgggccaaggcatccgcctgctgctccagagtctcttcctccccgtcaccttccaggctttccaggtgcacagcccagctcggcccccctgtgccctggccatcaggcccacctgtccctgccaggcccatgacccagggaaccagtatttatttctcaacagctggggaccagatgacgatgggaagacagtggatggcccccatcagcttggaaaggctgccttacaacatggggtgattgctggtcgccagggctttgggagcatctttgtggtagccagtggcaacggaggccaacacaacgacaactgcaactacgatggctacgccaactccatctacaccgtcaccataggtagtcacccaatgtttctgtgctcctgtgtgtgtgtcaccgaaggagaggtgtgggaaatggaactggatagactcaagaatcaggatggcgaaataaataggaacattatggaagagactgaacgggcctggaaggcagaggtgagaagaggagctgatatcttgaaagtcttagtttcaggcttccagatggtatctacttttggcattgtaataggagagccagagatattaaaggctattcaggatgtgacaataaagcgggaagaaacaaagaagaagatagagaaagagaagaaggagtttttgcagaaggagcaggatctgaaagctgaaattgagaagctttgtgagaagggcagaaggcagtggggccacgatgccctctcgcgccagccacatcagttctggttccttgatgggatcaataccaatctcccgggcaaattcaagaatttctgcaaggagaggcagagccaggacatcacaggtgacatttactatttcaacttcgccaacgggcagtctatgtgggaccatccatgtgacgaacactatcggagcttggtgatccaagagcgggcaaagctgtcaacttctggggccattaagaagaagaaaaaaaaaaaggaaaagaaagacgtggcggatgcctggaatcccagttactcgggaggctga

SEQ ID NO: 132202 - DNA, 2907 bp, Homo sapiens
tcaagcaatcctcctgcctgggcctcccaggtagccgggactataggtgcacaccactgtccccagcttgaactcagtctctaacctacttccttttcctgtttcacttccaggtgaccactgactgggaccttcagaagggcactggctgcacctggcaatctcagcataggccagccccaggatgccttcccagttggagccgttgatgaagaacttgtctgattcagtgatggcagcaatgttggcacgcacagtgacgttggggccatgggggatgcttaccaggtcggtgcccagctccccttcccacttgccctgggtgtagggcacatacacacccttccggaggtcccggtatgtgctggacagctgcctctggtagtagcgatgcaggaaggggtggggggcagcacccactgcaaagttactgctgcctgtatccaccaggatgttgagctccagcttctccatatcacagtgttcaaagaaaaagagtcttacatgtgaagaccttccaggatatgaaacttgggcagaaggcaagaacattggggtactgatttgggccagtggagcagggaacaaggcccggatgcgaccaagtggctgagtacttgctgccacccgctcatgttctgccagtcgtgcagcaaccaactggataagttcctccatggtcaggcctgccatggtggtacgtgctgtcttgatctgctgaagaatgttggtcatctgggccttattgcactgtgggaaccgggtcagcagcttctccaggatcttctccagtttgtctactggttggggccggggagtttcagcagaagccttaacaccgcccaagctgggcataaccatgggcattgtgacctgcccaatggagaagggcatccgaggagccagagagggactgggttgaaacacctgaagcatgaagtctgtctctgatgggggtggaggtaaagtgggagtagggatttgaggaaggctgctcagcttggctccgttcctcactaactggatatgactattaaattggtcacgaacattctttttcattatccgaactccattcagtctcgtctcccactcctgttgggaacgaactgtctccagtgttgggggagttgacttgaggtaagtaaggtgcaattctgcctctttttctgcttcttctagtttcagtaccagtaactctttccggctctctagtgataagattggctctcctattacaatgccaaaagtagataccatctggaagcctgaaactaagactttcaagatatcagctcctcttctcacctctgccttccaggcccgttcagtctcttccataatgttcctatttatttcgccatcctgattcttgagtctatccagttccatttcccacacctctttcagcagggagatgtcatcagcaaagtcatcatgctgctggcgcaggcagcggaggcagcgccactgacacaccatgaggcagagtggcagcatgaagagggcgcagatggcagccatgacataggctatggtcatgagggttgactcatctgtctgtggaatgttgtagccacagtcttccatgtccaaggtgacaaaagggccttccaccgctgccgtcctgaactcatcgtgcacatggcaagcgctgacagcaaagccaattcgttttcgggcccgatcaaagacaacgtagaagccctccatgataacagctcccataacagtgcccgtggatgactgtgagatggcaaacttgtaacagtcgtcttgggacgtggccacatcttccactggccgcaggtattgctgcggaaggatggtgatgcggaaggactggttggtaacctcacccattaggtagagtgagatgactgggaaaatgttccaaggggtggtgcctgcttgccagcacaccagctgctctcctagccagaaaccatcagggaacttctccgtggaggaggctgccttgatggatttgactgcagcttcaaacactttcttgggcaaacgaaggttggtggtgccactgtccacaatgctcttgtcatagttgtactccttgcagtccattttcagatcctgtccattgatctccacccgcacaatgatcacctcataataccactcccgccggatgggtgtataccagagactgcctgtgtacagcgagtggtcgatacctccaatgatcatgctccctccgacagaggccagcacttcagactggttgagggggaagccagcaccacaaagctgcagggagaagaggttgggaacgtgggtctgctttaccagagagtcaaagaaaggctccagggagtcgtcaggcctggcaatctcagcataggccagccccaggatgccttcccagttggagccgttgatgaagaacttgtctgattcagtgatggcagcaatgttggcacgcacagtgacgttggggccatgggggatgcttaccaggtcggtgcccagctccccttcccacttgccctgggtgtagggcacatacacacccttccggaggtcccggtatgtgctggacagctgcctctggtagtagcgatgcaggaaggggtggggggcagcacccactgcaaagttactgctgcctgtatccaccaggatgttgagcgtctgcggggggctgcccacggtcatctccacgtagtagccctgccccgacttgcccctcaggttgtccaccatctccacaaagctgcccctccggccgggctcctcgggctcttcgtcggtctcccggggcagccgcagccccaggggggcgccccccaggccgctgcgcaggggcagccggatgccgtgctgggtgccgtgggcaggcagcactcccgcgcccatccacagcaggagccagggcagggcttgggccat

SEQ ID NO: 132203 - DNA, 1215 bp, Homo sapiens
gcggcggggaagggagcgagcgtggcgggggacccgaggcacgctctcgagccaacgagcgtgatgcgctcgagtgtgggcggggactgagggaagaagtgaaaatcggactgccaggcgacagttcctccgtttgaaatctcgccggctcctgagcgggccaccgggcccgggctgggggtctggcgggtgtttgagcccagatgagtcatggctggacgacccctccgcataggagatcagctggttctggaagaagattatgatgagacctacattcctagtgagcaagaaattcttgaatttgcccgggagattggtattgatcccatcaaggaaccagaactgatgtggctggcgcgagagggcatcgtggccccactgcctggagagtggaaaccatgcaccacaggaccccaggtcctgtctgtggtcgtggtggtaacgggtgccagcctggaccagtcctgcatcgtggagcttcactctggacattctaaggggcagactgtggctggggcgtccagcacataccgggacctccggaagggtgtgtatgtgccctacacccagggcaagtgggaaggggagctgggcaccgacctggtaagcatcccccatggccccaacgtcactgtgcgtgccaacattgctgccatcactgaatcagacaagttcttcatcaacggctccaactgggaaggcatcctggggctggcctatgctgagattgccagggagccggcgagatttcaaacggaggaactgtcgcctggcagtccgattttcacttcttccctcagtccccgcccacactcgagcgcatcacgctcgttggctcgagagcgtgcctcgggtcccccgccacgctcgctcccttccccgccgcccaacccctccctcgatgaggtcctcaactatcccccaccccggaaggctccgggcgaggctccgggcgaggctctgggcgaggcgcagctcccccagcgccacccaacacccacccgctcccccagcttccagggacgccggggtgttgccctgcagcgcgcaacaaacacttccggaaaaggaccccagttcccaccaactctccccatggcagctcccatgctgcagcctgatgaagcaggtcgcctgggaaactgctgccacacacagacctgctcagagcacctccccaacctgcagagcagttggccacaccaaatgtga

SEQ ID NO: 132204 - DNA, 1680 bp, Homo sapiens
aggcagcggcaggacttttcacttaggagatcagcatttgccctgatggaaactgggcgatcctgcagggactgacctctgagttatccaaaggccgacctggggaaagactgattttgaggttttaatagttttcagatgcttcaagtgttgtgaacagagacttgtttggattatgcatttctcagctagactaaataaatgctagcaatggatacgtgcaaacatgttgggcagctgcagcttgctcaagaccattccagcctcaaccctcagaaatggcactgtgtggactgcaacacgaccgagtccatttgggcttgccttaagctgctccccatgttgcctgtgggaagatatattgaaagagcatgcactcaagcacttttcaagaaagcagtcatcctgttgcaattggaggttaatgagatgtacgttttttgttacctttgtgatgattatgttctgaatgataacacaactggagacctgaagttactacgacgtacattaagtgccatcaaaagtcaaaattatcactgcacaactcgtagtgggaggtttttacggtccatgggtacaggtgatgattcttatttcttacatgacggtgcccaatctctgcttcaaagtgaagatcaactgtatactgctctttggcacaggagaaggatactaatgggtaaaatctttcgaacatggtttgaacaatcacccattggaagaaaaaagcaagaagaaccatttcagaaaaaaatagtagtaaaaagagaagtaaagaaaagacggcaggaattggagtatcaagttaaagcagaattggaaagtatgcctccaagaaagagtttacgtttacaagggctcgctcagtcgaccataatagaaatagtttctgttcaggtgccagcacaaacgccagcatcaccagcaaaagataaagtactctctacctcagaaaatgaaatatctcaaaaagtcagtgactcctcagttaaacgaaggccaatagtaactcctggtgtaacaggattgagaaatttgggaaatacttgctatatgaattctgttcttcaggtgttgagtcatttacttatttttcgacaatgttttttaaagcttgatctgaaccaatggctggctatgactgctagcgagaagacaagatcttgtaagcatccaccagtcacagatacagtagtatatcaaatgaatgaatgtcaggaaaaagatacaggttttgtttgctccagacaatcaagtctgtcatcaggactaagtggtggagcatcaaaaggtagaaagatggaacttattcagccaaaggagccaacttcacagtacatttctctttgtcatgaattgcatactttgttccaagtcatgtggtctggaaagtgggcgttggtctcaccatttgctatgctacactcagtgtggagactcattcctgcctttcgtggttacgcccaacaagacgctcaggaatttctttgtgaacttttagataaaatacaacgtgaattagagacaactggtaccagtttaccagctcttatccccacttctcaaaggaaactcatcaaacaagttctgaatgttgtaaataacatttttcatggacaacttcttagtcaggtatggatttttaagaatcttattttcatcattgggagttcataa

SEQ ID NO: 132205 - DNA, 3285 bp, Homo sapiens; identical to SEQ ID NO: 119214

SEQ ID NO: 132206 - DNA, 2207 bp, Homo sapiens
ccgacacacaggcacaccagatggacaaacagaaaaacccacagaaggcggcccctcccccaattcagagagccagtgactggcgctcctccacccctaaccagacacacccgaaaacagacggccagacacagagtgaccggcacagagaagacaatacagaaatacgcagggacaaggacagaccatcggacgctcggacacggacccaggcaggatcacctggacctctggttccccaacggagaccctcggggaaggcccggagcatagcacgcccctgtggagccccgtgcgccccacttggcagcagccacgccccccgcgcacaccccacttcgggctggctctggaagaccccctctccccagccccgcaaccccgggactctgggaggcatctctcgtcaccaagcgtttctgaggcgccgggacaggggctgggtgggccctgcccctgctgctgccctggccctggcctggaacctggtcctgtcaagaacctgccctgactctgccatggccctggccctgctctgccttgttcctggccctgacccagacccagaccctttcctggctctgcactggactttccctggccctgagctggcaatgcacagacctggttgtggccctggtcctgctgtggccctgtctcagaccctagccctgccaggaaccattgggcccactggggctgcactcctcggggagcaggagaagcagaaaaattcagacccagccagccctccacacccaggtgccaattcctgttccggacgcctccacgcacagggccctgtcccccgtggtgtccccaggggtgcctggcagcctctgaggcacagacccacagtacacaggcccaggaaccacgtgcagccctgtacagtgctaccaaccagtacccctaatgcaggcaatgacaccctggatagcgccctcaacccaccccacactgcgaaaggtgcagccctggatagcccctgtcctaccactctggtcgtcctgcagtctctgtcaccaccaccaccaaccacagcagtgcagccccggtttggcccccaaaccaccccccccccgcccggtgcaggcagcacagccccagatagcacaccaaccggccacccaagacgggcagtgacgcctgagatagggctccaactcgtccaggccaccacagtgcagctggatagtgcacttaccccgacgcctttctacgctctggctggctgcagtgtcatcgctgcacccaccacaaacagggctgcaaacaggaaggatttattcactgtccatgctgccctgagttgtccaaagcgaggcagtgccccaaggagcagatggatgaatgaagaacagggcattgtcctcatgcatagctggagtgttgtaagtgccgtgtacatgtatggaaggtctgtgacaccatgtgcacccaagtcggacatgagggaacttggctgtttcagccttgtggagtctctgggtgaagatatcagctgggaaagggttaatgagctatcaactcaagtcatcatacatctggatgggctgtcattaacttcttacaaaaatttgatttcccgtgagagattttcatcaaacatttatatacccagacatggccaggggagtcagcgtggcacagaatcatcagaagcatggtatatagatagtcaagactctggagaacctcttccgaatctgcctggttggctagagcagtgttgtgacttaggctaccatgcaagtctgaaccgggctctacgcaccttcctctctgctgagttaaacctggaacagtcgaagcatgagggtctggatgccatcgagaatgcagtagaaaacctggatgccaccagtgacaagcagcgcctcatggagatgtacaacaacgtcttctgcccccctatgaagtttgagtttcagccccacatgggggatatggatagactgagtagaaaaaagaagaaagaggaagaagaagaagaagaagaagaagaagaagaagaagaagaagaagaagaaggaggaggaggacgagggggaaggggaggagtcacaaaaccattaacttccctaaaacaaccaatttcagaacaggaatttgggccaccctgcaatggtgtcaaatttccccaaaagcaagatgaactagatccagtccctgagcctaagaagtctaaaatctcttctggatga

SEQ ID NO: 132207 - DNA, 1044 bp, Homo sapiens
atgaacatgaacatcaaaaaaattgtaaaacaagccacagttctgacttttacgactgcacttctggcaggaggagcgactcaagccttcgcgaaagaaaataaccaaaaagcatacaaagaaacgtacggcgtctctcatattacacgccatgatatgctgcagatccctaaacagcagcaaaacgaaaaataccaagtgcctcaattcgatcaatcaacgattaaaaatattgagtctgcaaaaggacttgatgtgtgggacagctggccgctgcaaaacgctgacggaacagtagctgaatacaacggctatcacgttgtgtttgctcttgcgggaagcccgaaagacgctgatgacacatcaatctacatgttttatcaaaaggtcggcgacaactcaatcgacagctggaaaaacgcgggccgtgtctttaaagacagcgataagttcgacgccaacgatccgatcctgaaagatcagacgcaagaatggtccggttctgcaacctttacatctgacggaaaaatccgtttattctacactgactattccggtaaacattacggcaaacaaagcctgacaacagcgcagatcatcgagaaacaagcagggcacagtcggagtagggtgtttcgagaggtggagacgctgtatcagtgtcagggaaacaagaacattttggagctgattgagttctttgaagatgacacaaggttttacttggtctttgagaaattgcaaggaggttccatcttagcccacatccagaagcaaaagcacttcaatgagcgagaagccagccgagtggtgcgggacgttgctgctgcccttgacttcctgcataccaaagggcacaaatggcctggagtggagacagcctctgtgaaggtagcaatagggctggggttcaaaatagccccaaattacttcatgtccaagagcacggacttgagtgcctatggagcctacggcatcctctcctcccatagctcctccatcggaagggctgcaggtagtgcccattcagaagtcggcagttga

SEQ ID NO: 132208 - DNA, 2617 bp, Homo sapiens
gcgatctgcaggtaggggtgcgcgcgaccgctccccggcgggagccagcgaaggtttccatgtcagaggccgatggagaactgaagattgccacctacgcacaaaggccattgagacacttcgtgtagctggaagacaccaacttcctgacaggagctttatttcatttgggatttcaagtttacagatggtatcttctcaaaagttggaaaaacctatagagatgggcagtagcgaaccccttcccatcgcagatggtgacaggaggaggaagaagaagcggaggggccgggccactgactccttgccaggaaagtttgaagatatgtacaagctgacctctgaattgcttggagagggagcctatgccaaagttcaaggtgccgtgagcctacagaatggcaaagagtatgccgtcaaaatcatcgagaaacaagcagggcacagtcggagtagggtgtttcgagaggtggagacgctgtatcagtgtcagggaaacaagaacattttggagctgattgagttctttgaagatgacacaaggttttacttggtctttgagaaattgcaaggaggttccatcttagcccacatccagaagcaaaagcacttcaatgagcgagaagccagccgagtggtgcgggacgttgctgctgcccttgacttcctgcataccaaaggcattgctcatcgtgatctgaaaccagaaaatatattgtgtgaatctccagaaaaggtgtctccagtgaaaatctgtgactttgacttgggcagtgggatgaaactgaacaactcctgtacccccataaccacaccagagctgaccaccccatgtggctctgcagaatacatggcccctgaggtagtggaggtcttcacggaccaggccacattctacgacaagcgctgtgacctgtggagcctgggcgtggtcctctacatcatgctgagtggctacccacccttcgtgggtcactgcggggccgactgtggctgggaccggggcgaggtctgcagggtgtgccagaacaagctgtttgaaagcatccaggaaggcaagtatgagtttcctgacaaggactgggcacacatctccagtgaagccaaagacctcatctccaagctcctggtgcgagatgcaaagcagagacttagcgccgcccaagttctgcagcacccatgggtgcaggggcaagctccagaaaagggactccccacgccgcaagtcctccagaggaacagcagcacaatggacctgacgctcttcgcagctgaggccatcgcccttaaccgccagctatctcagcacgaagagaacgaactagcagaggagccagaggcactagctgatggcctctgctccatgaagctttcccctccctgcaagtcacgcctggcccggagacgggccctggcccaggcaggccgtggtgaagacaggagcccgcccacagcactctgaaatgctccagtcacaccttataggccctaggcctggccaggcattgtcccctggaaacctgtgtggctaaagtctgctgagcaggcagcagcctctgctctgtggctccattcaggctttttcatctacgaaggccctgaggttcccatcaacccccatttccctagggtcctggaggaaaaagctttttccaaaggggttgtctttgaaaaggaaagcaatcacttctcactttgcataattgcctgcagcaggaacatctcttcactgggctccacctgctcacccgcctgcagatctgggatccagcctgctctcaccgctgtagctgtggcggctggggctgcagcctgcagggagaagcaagaagcatcagttgacagaggctgccgacacgtgcctcttccctctcttctctgtcaccctcctctggcggtccttccaccttcctctgtcctccggatgtcctctttgcccgtcttctcccttggctgagcaaagccatcccctcaattcagggaagggcaaggagccttcctcattcaggaaatcaaatcagtcttccggtctgcagcacggaaaagcacataatctttctttgctgtgactgaaatgtatccctcgtttatcatcccctttgtttgtgattgctgctaaagtcagtagtatcgtttttttaaaaaaaaagtttggtgtttttaaccatctgttccagcaaagatgataccttaaactcccactgcaagcccatgaacttcccagagagtggaacggcttgctcttctttctagaatgtccatgcacttgggttttaatcagcagttccctattattctgattttaagctgttcctgtgatgaacttagagacagcatcggtgtctgctgctgtgtccccaggtcttgtgtgggtggcacagatctgggcagttagatagtgctctgtgcctaaggtgaagccacactagggtgaagcctcacttccctgtttgagcaatgcagtgcctgctgcccgtgtgcatgaaggtacagccattcatataagtggaactattgagttacataaagaaaatagatttgcatttgtcaggcagacgtttatacaacaccacggtgcttttatacattgtgcttattttaataaaactgaaattct

SEQ ID NO: 132209 - DNA, 792 bp, Homo sapiens
atgcttcgctttccagacaggcctggggctgccccagctctggctttgtgtcgcggagccatgctactaaaagcttgtcgagaatggatgccaacagctccccagctgcctcatgttaatgtaatcagcaagaagcctgcaaacctgatggtagtgcagaatatgagctgtgtgggaatgggctacaacgtggtgcttaaaagacttcagcagaccttgccaacaacatgccagaaaaaactgttcctcttctgctgtgaatgcaatacaccagcatcattttgtggccctgagtgtcacagtcacactgatgctggcggagcaatacaagcagctgagcatcaaggatacaagtggctgaacgagattttgagcagaagacattacaaaatcaccattgaaggggagatgggggtagagagcaatgtaaaggagaaggaagtgggagagccacagtgccggtgtcaccaaggcgtaggccagacttctgctggacactggatttggactgagtgtggccttgcattctcccagaggactcctgccaaagggctgtttggaagtcagatcatcgagaaacaagcagggcacagtcggagtagggtgtttcgagaggtggagacgctgtatcagtgtcagggaaacaactctgggtacccagtccagatcatagccccaagctctgtcatcattttgcagcctccagcctcccccacccaactcagcagagccctgagaagaaagtcctgggtcccggaggctgcacctgcagacacaacagattctgcaatg

SEQ ID NO: 132210 - DNA, 450 bp, Homo sapiens
ttatttatttttcgaagtgatcttccgtaagaggtctttattcgcgataagctcatggagcggcgtggccgtcgcacaggaaggacagagaaagcgcggatctgggaagtgacggacagaacggtcaggacctggattggggaggcggttgccgccgctgctgctgacggtgtgacgttctctgttggggggcaccacatacgttccgccattcctatgcgatgcacatgctgtatgccggtataccgctgaaagttctgcaaagccttcttctgggtcaggccccatgcagatgcggtttagggcagaatgtgggcacagctctacctcttgtgtctggtggtccgatgctcttcccttgagtgggggggccttggccacagccccacacctggcagagtcagcaacaccggaatttgggacccgggctgccccagcctgccgggccat

SEQ ID NO: 132211 - DNA, 690 bp, Homo sapiens
atggcccggcaggctggggcagcccgggtcccaaattccggtgttgctgactctgccaggtgtggggctgtggtgaactgtcctgacttcgataccggtggcagcctgatgacagacaccggatgcatgaaaaggcaaaaggagcacaaggaggaaggaacacggtgttcagggatggcgatgaagagcggaggctttgcaaggacggaccctcaggttggcatggccctgtggaatatggtgggccccataatgttcttgctaaagcaagtattggataagctcagaagtaccccctccacggagtgtttcctgcccctcttcatggagttttttgttccctttttggtgctgtctccaattccccattcagacgtccaggagggcacggatgtgatccacactgctgatcatttgcctccctcctttactagaggcacaccgccgggaactggacaccagtattctcagtgccgagtgactgccctgcatgccagcttctctccccgcttccgccacttagtgccagctttccacatggctgactacgaggcttctgggcctttacgccaatcactcaaatcactcatctatgctgcaggagataactggctgcaggagataacgctggcgggaataccacatgctattctattcaaactcgccctcaggctgatgatggtcagctga

SEQ ID NO: 132212 - DNA, 2058 bp, Homo sapiens
atggaaacactggagtctgaattgacctgtccaatctgcctagagttgtttgaagacccccttctgctcccttgtgctcacagcctctgcttcagctgtgcccatcgcattttggtatcaagctgcagctctggtgaatccattgaacccattactgctttccagtgtcctacctgcaggtatgttatctcgctgaaccaccggggcctggatggcctcaagaggaatgtgactctgcagaacattattgatcgcttccagaaggcttcagtcagtgggcccaattcccctagtgagagccgccgggaaaggacttacaggcccaccactgccatgtctagcgagcgaattgcttgccaattctgtgagcaggacccgccaagggatgcagtaaaaacatgcatcacctgtgaggtctcctactgtgaccgttgcctgcgggccacgcaccccaacaagaaacctttcaccagccaccgcctggtggaaccagtgccagacacacatcttcgagggatcacctgcctggaccatgagaatgagaaagtgaacatgtactgtgtatctgatgaccaattgatctgtgccttatgcaaactggtgggtcgtcaccgagaccatcaggtcgcatccctgaatgatcgatttgagaaactcaagcaaactctggagatgaacctcaccaacctggttaagcgcaacagcgaactagaaaatcaaatggccaaactaatacagatctgccagcaggttgaggtgaatactgctatgcatgaggcaaaacttatggaagaatgtgacgagttggtagagatcatccagcagaggaagcaaatgatcgctgtcaaaatcaaagagacaaaggttatgaaactgagaaagttggcacagcaggttgctaattgccgccagtgtcttgaacggtcaacagtcctcatcaaccaagctgagcatatcctgaaagaaaatgaccaggcacggtttctacagtctgcaaaaaatattgctgagagggtcgctatggcaactgcatcttctcaagttctgattccagacatcaattttaatgatgcctttgaaaactttgctttagatttttccagagaaaagaaactgctagaggggttagattatttaacagccccaaacccaccatctatccgagaagaactctgtactgcctcccatgacaccattacagtccactggatctcggatgatgagttcagcatcagctcctatgagcttcagtacaccatattcactggccaggctaacttcatcagcctgtataattcagtagacagctggatgattgttcccaacattaaacagaaccattacacagtgcatggactccagagcgggactcgctacatcttcatcgttaaagccataaaccaagccggcagccggaacagtgaacctacccgactaaaaacaaacagccaaccctttaaattggatcccaaaatgactcacaagaagttgaagatctccaatgatggattgcagatggagaaggatgaaagctctctaaagaagagccacaccccagagaggtttagtggcacagggtgctatggggcagcaggaaatatattcattgacagtggctgccactattgggaggtggtcatgggttcctcaacatggtatgcaattggcattgcctacaaatcagctccaaagaatgaatggattggcaagaatgcctcctcatgggtcttctctcgctgcaatagtaacttcgtggtgagacacaacaacaaggaaatgctggtggatgtgcccccacacctgaagcgtctgggtgtcctcctggattatgacaacaatatgctgtctttctatgacccagctaactctctccatcttcatacttttgatgtgaccttcattcttccagtttgtccaacatttacaatctggaacaaatccctaatgatcctgtctggcttgcctgccccagattttattgattaccctgagcggcaggaatgcaactgcaggcctcaagaatccccttatgtttctgggatgaaaacctgtcattaa

SEQ ID NO: 132213 - DNA, 2237 bp, Homo sapiens
ggaggagatggctggcacctgggaacgctatgggtgaaagcccagcctccgtggttcttaatgcctcaggaggactattttcactaaagatggaaacactggagtctgaattgacctgtccaatctgcctagagttgtttgaagacccccttctgctcccttgtgctcacagcctctgcttcagctgtgcccatcgcattttggtatcaagctgcagctctggtgaatccattgaacccattactgctttccagtgtcctacctgcaggtatgttatctcgctgaaccaccggggcctggatggcctcaagaggaatgtgactctgcagaacattattgatcgcttccaaaaggcttcaatcagtgggcccatttcccctagtgagagccgccgggaaaggacttacaggcccaccactgccatgtctagcgagcgaattgcttgccaattctgtgagcaggacccgccaagggatgcagtaaaaacatgcatcacctgtgaggtctcctactgtgaccgttgcctgcgggccacgcaccccaacaagaaacctttcaccagccaccgcctggtggaaccagtgccagacacacatcttcgagggatcacctgcctggaccatgagaatgagaaagtgaacatgtactgtgtatctgatgaccaattgatctgtgccttatgcaaactggtgggtcgtcaccgagaccatcaggtcgcatccctgaatgatcgatttgagaaactcaagcaaactctggagatgaacctcaccaacctggttaagcgcaacagcgaactagaaaatcaaatggccaaactaatacagatctgccagcaggttgaggtgaatactgctatgcatgaggcaaaacttatggaagaatgtgacgagttggtagagatcatccagcagaggaagcaaatgatcgctgtcaaaatcaaagagacaaaggttatgaaactgagaaagttggcacagcaggttgctaattgccgccagtgtcttgaacggtcaacagtcctcatcaaccaagctgagcatatcctgaaagaaaatgaccaggcacggtttctacagtctgcaaaaaatattgctgagagggtcgctatggcaactgcatcttctcaagttctgattccagacatcaattttaatgatgcctttgaaaactttgctttagatttttccagagaaaagaaactgctagaggggttagattatttaacagccccaaacccaccatctatccgagaagaactctgtactgcctcccatgacaccattacagtccactggatctcggatgatgagttcagcatcagctcctatgagcttcagtacaccatattcactggccaggctaacttcatcagtaagtcatggtgtagttggggcctgtggccagagataaggaaatgtaaggaagcagtaagctgctcaagattggccggggcgccacgaggcctgtataattcagtagacagctggatgattgttcccaacattaaacagaaccattacacagtgcatggactccagagcgggactcgctacatcttcatcgttaaagccataaaccaagccggcagccggaacagtgaacctacccgactaaaaacaaacagccaaccctttaaattggatcccaaaatgactcacaagaagttgaagatctccaatgatggattgcagatggagaaggatgaaagctctctaaagaagagccacaccccagagaggtttagtggcacagggtgctatggggcagcaggaaatatattcattgacagtggctgccactattgggaggtggtcatgggttcctcaacatggtatgcaattggcattgcctacaaatcagctccaaagaatgaatggattggcaagaatgcctcctcatgggtcttctctcgctgcaatagtaacttcgtggtgagacacaacaacaaggaaatgctggtggatgtgcccccacacctgaagcgtctgggtgtcctcctggattatgacaacaatatgctgtctttctatgacccagctaactctctccatcttcatacttttgatgtgaccttcattcttccagtttgtccaacatttacaatctggaacaaatccctaatgatcctgtctggcttgcctgccccagattttattgattaccctgagcggcaggaatgcaactgcaggcctcaagaatccccttatgtttctgggatgaaaacctgtcattaa

SEQ ID NO: 132214 - DNA, 822 bp, Homo sapiens
tcacttggcctgagtccctgcggattggacttccatagatttgaaacttcctccgggtaccacaagcatcaggcctgtgattaagagcaaagagcggccaactattgtaactcttattcccaaggccctgtgggtcctatatgtgccctgcaacttggggaaaatggaggtggggttgtggtctctatgctgtagcagccggaaagccaaaaacaagccgtacttctcgctctgacccccagatttaccgcgaccatactgttgaccctctctaaaaccgacatcccaatcagtgcagataatccattcatctaggcaggtcccagttagaaaccgcatggcattttcagcatcagctctgttatggcattctacaaagcaaaaaccacatgctgttttctttattttatccaggcccataaagatattcctgatatcacatctactaaagagttaatgtattttctcttcggttgtataaaaggaaagattccccatattcaatgtggagctttccttcagtaatttttcctgctgaaatttacggccactgaactgatggtcccggtagcagctcagctccaaagcagggtctttacatagaattttcaggtctttggacatggtgctggttgggcagcatgccgatggccgttttcggtccagcttggcagcagtgacaccaccactgaaaaccttgggatcctgtcaagagcgagaagtacggcttgtttttggctttccggctgctacagcatagagaccacaaccccacctccattttccccaagttgcagggcacatataggacccacagggcct

SEQ ID NO: 132215 - DNA, 2154 bp, Homo sapiens
gttttcagtggtggtgtcactgctgccaagctggaccgaaaacggccatcggcatgctgcccaaccagcaccatgtccaaagacctgaaaattctatgtaaagaccctgctttggagctgagctgctaccgggaccatcagttcagtggccgtaaatttcagcaggaaaaattactgaaggaaagctccacattgaatatggggaatctttccttttatacaaccgaagagaaaatacatgaactctttagtagatctgatatcaggaatatctttatgggcctggataaaataaagaaaacagcatgtggtttttgctttgtagaatgccataacagagctgatgctgaaaatgccatgcggtttctaactgggacctgcctagatgaatggattatctgcactgattgggatgtcggttttagagagggtcaacagtatggtcgcggtaaatctgggggtcaggcttggagtaaatttctggcctggagctatagattcaggtgtcatcaggatgagggtaaaaatggaagcatccacattttaggggctgatgatgaaggaggatcacacaaaggacaaagtaagaacagactccttggagccttaatatgcgaatgtgtatcgcccagaggcctaggaggactaaatggtttcctgggccagggccagggcccctgctgccctgcacagccttgggaccctgctccctgcatcttagctgctccatctccagctgtggctcagaggggcccaagtacagctcaggtcactccttcagagggtgcaagctgctccttgctcgtaattgtttttgaaaagcggcagcggcggcgaaggcgggcggcggcctacagtggtagcggcggcggcggcgaccggggcccgggagctcgcgccggagcccgagccaacccgctgcggaggcagacgagagcccagcgccctcgagcgagcggaggagatggctggcacctgggaacgctatgggtaaaacgcgccccctcgccgcggccctggaggtcgagcgtcgtagccctcgcagggctagtctccggctccggccgcttttcaggtcagactccgctggttgatgaacggcatccccagtctctggatcatcgtcttactgagaccgaacaatctgataacaaacccatcatacaatctgaaatcgtcctgaaacatgaaatcccagtatttgcaatttgcctggataggagcataatcctctgcttcagctgtgcccatcgcattttggtatcaagctgcagctctggtgaatccattgaacccattactgctttccagtgtcctacctgcaggtatgttatctcgctgaaccaccggggcctggatggcctcaagaggaatgtgactctgcagaacattattgatcgcttccagaaggcttcagtcagtgggcccaattcccctagtgagagccgccgggaaaggacttacaggcccaccactgccatgtctagcgagcgaattgcttgccaattctgtgagcaggacccgccaagggatgcagtaaaaacatgcatcacctgtgaggtctcctactgtgaccgttgcctgcgggccacgcaccccaacaagaaacctttcaccagccaccgcctggtggaaccagtgccagacacacatcttcgagggatcacctgcctggaccatgagaatgagaaagtgaacatgtactgtgtatctgatgaccaattgatctgtgccttatgcaaactggtgggtcgtcaccgagaccatcaggtcgcatccctgaatgatcgatttgagaaactcaagttttctcttcaccaatatttgaaaggagctaacaatcgtttgtttgagaacaatttacaaaatgttgacacagagattgttcttgggtggatagaaatcctgtctgttattgttgggcaaagaaacatattacagaaatataatatagcagatatctccattccaatctcccctgccactttggctctcttgctgtcacggtttaactgtcctgagaaagttgcactaaccgggcttgaacataaggaacctggcccagtcattaactacattgcacaggagcagagcaaaacacaccaatatttcaaaactgaacaacaacgaagagacatgtttacttttatatag

SEQ ID NO: 132216 - DNA, 1215 bp, Homo sapiens; identical to SEQ ID NO: 120373

SEQ ID NO: 132217 - DNA, 597 bp, Homo sapiens
atggaacctactcctggtgaagatcctgtaaacaatgttgatatgacaacaaaggatttagaatattacataaacttggttgataaaacagcagcagggtttgaggccagttttgactccaattttgaaagaagttctacttggagagactttgctaaagaagtggatgggttacttcgaattggagctgttaactgtggtgatgatagaatgctttgccgaatgaaaggagtcaacagctatcccagtctcttcatttttcggtctggaatggatggtcttgttaatgtaggatggatggactgtgccacccaggataacctttgtaaaagcttagatattacaacaagtactactgcttattttcctcctggagccactttaaataacaaagagaaaaacagtattttggaagagctaggcagaggaggacaaaaaagggagagaaagatgcccaaatttactgaggaaaaaaaaaggcacaggaaaggaagtgaggaaggccaaaggaaagatgacaaggaggattacgatgttccattagcggaagaattgagtctaacttcacacacttctcttgcagataaactggtttga

SEQ ID NO: 132218 - DNA, 1380 bp, Homo sapiens
atggcaagtgatggcaatgcgaaagcttgcgccttgcatttacctggcgctttcacctgcccggtagctcgggccacgggcagttcggccacacccacgctgagaacaacccctgggcgagaaacatcttatcccaaagagttgattgagactatgccctctctttttctgatgggtgttttcttgtgtggatactcgttaatctctacatcattatatttttcaaagacattaactggactgatcaacgtgggcagtatagattgccaacagtatcattctttttgtgcccaggaaaacgttcaaagataccctgagataagattttttcccccaaaatcaaataaagcttatcattatcaatttttacctcaagtatccacagatctaacacctcagactttcagtgaaaaagttctacaagggaaaaatcattgggtgattgatttctatgctccttggtgtggaccttgccagaattttgctccagaatttgagctcttggctaggtcaggtaatactgatgaagaggctagcttcactgggaaaacaagacaaaacattacgtcagaggaggaggaacaggaacgcagctcctcaccagcaacgaaacaaagctggacggagaatgactttgatgagttgagagaagaaggtttcagacaattaaacttctccaagctgaaggaagttcgaacccatcgcaaacaagttaaaaaccttgaaaaaagattagacgaatggctaactagaacaaccaatgcagagaagtccttaaaggacctgatggagctgaaaaccatggcacaagaactatgcgatgaatgcaaaagcttcgtagccgattcgatcaactggaaaaaaggggagaatggaaccaagttggaaaacattctgcaggatattatccaggagaacttccccaacctagcaaggcaggccaacattcaaattcaggaaatacagagaatgcaacaaagatactccttgagaagagcaactccaagacacaaaattgtcagattcaccaaagttgaaatgaaggaaaaaacattaaggggagccagagagaaagatccggttacccacaaagggaagcccatcagactaacagctgatctctcggcagaaactctacaagccagaaaagagtgggggccaatatacaacattcttaaagaaaacaattttcaacccagaagttcatatccagccaaactaagcttcataagtgaaggagaaataaaatactttacacacaagcaaatgccgagagattttgtcaccactaggcctaccctacaagagctcctgaaggaagcactaaacatggaaaggaacaaccggtatcagccactgcaaaaacatgccaaattgtaa

SEQ ID NO: 132219 - DNA, 692 bp, Homo sapiens
atgaggagcgtggaccgtccggattcccggtcgacccacgcgtccgagaccggcgcgtgaggaacctaccggtaccggccgcgcgctgtgtattcgccggtgtggctgcacctcaccaatcccgtgcgccgcggctgggccgtcggagagtgcgtgtgcttctctcctgcacgcggtgcttgggctcggccaggcggggtccgccgccagggtttgaggatgggggagtagctacagggaagcgaccccgcgatggcaaggtatatttttgtggaatgaaaaggaagtattagaaatgagctgaagaccattcacagattaatattgttggggacagatttgtgatgcttgattcaccccttgaagtaatgtagaacggaattctcaaatatgcatattacatcaactggaaccagcagtgaatcttaatgttcacttaaatcagaacttgcataagaaagagaatgggagtctggttaaataaagatgactatatcagagacttgaaaatgatcattctctgttgtctgatagtgtatatggccatattagtgggcacagatcatgattattacagtttactcggagtgtccaacactgcaagcagtagagatataagacaagctttcaagagattggcatcgaagttacatcctgataaatacccgaataacccatatgcacatggcgat

SEQ ID NO: 132220 - DNA, 1311 bp, Homo sapiens
ccagcatgttagaagtacagtgacagaactttggacaggaaattttgtcaactccatacaaactgcttttgctgctggtattggctggctgatcactttttgttcaaaaggaggagattgtttgacttcacagacacgactcaggcttagtggcatgttgtttctcaactcattggatgctaaagaaatatatttggaagtaatacataatcttccagattttgaactactttcggcaaacacactagaggatcgtttggctcatcatcggtggctgttattttttcattttggaaaaaatgaaaattcaaatgatcctgagctgaaaaaactaaaaactctacttaaaaatgatcatattcaagtagacaggtttggctgttcctctgcaccagacatctgtagtaatctgtatgtttttcagccgtctctagcagtatttaaaggacaaggaaccaaagaatatgaaattcatcatggaaagaagattctatatgatatacttgcctttgccaaagaaagtgtgaattctcatgttaccacgcttggacctcaaaattttcctgccaatgacaaagaaccatggcttgttgatttctttgccccctggtgtccaccatgtcgagctttactaccagagttacgaagagcatcaaatcttctttatggtcagcttaagtttggtacactagattgtacagttcatgagggactctgtaacatgtataacattcaggcttatccaacaacagtggtattcaaccagtccaacattcatgagtatgaaggacatcactctgctgaacaaatcttggagttcataaaggatcttatgaatccttcagggggctcccttacacccaccaccttcatcgaactagttacccaaagaaaacacaccgaagtccggattggtgattccattgtccggggtggcctccctggccacgcttatggccaatggcaaagaagccccgcaatcttctgccctgatcatcgcgtccgttaaacacctagtcctctctcttttgctcctcgaaccaaccggatctccgtggtccgcttctccaccgtcccctgagtctcccccgccgataccgtggggcacaggttcccaaccccgacttcggtcattactccgtcagtccctcattaatccacggcctccaccagtgctctcacctcttctcccattctcctccccctcgtgtcctccggcccccacgaatcctcactacctcgacgggccttcccccgtctccgcgtcgctccgctacggatgtgcatacagcgtatcccccaacggcagac

SEQ ID NO: 132221 - DNA, 927 bp, Homo sapiens
atgctccgcgccaggccccgccccggctcgccgtggagaccggcgcgtgaggaacctaccggtaccggccgcgcgctggtagtcgccggtgtggctgcacctcaccaatcccgtgcgccgcggctgggccgtcggagagtgcgtgtgcttctctcctgcacgcggtgcttgggctcggccaggcggggtccgccgccagggtttgaggatgggggagtagctacaggaagcgaccccgcgatggcaagtgatggcaatgcgaaagcttgcgccttgcatttacctggcgcttccacctgcccggtagctcgggccacgggcagttcggccacacccacgctgagaacaacccctgggcgagaaacatcttatcccaaaaataacccaaatgcacatggcgattttttaaaaataaatagagcatatgaagtactcaaagatgaagatctacggaaaaagtatgacaaatatggagaaaagggacttgaggataatcaaggtggccagtatgaaagctggaactattatcgttatgattttggtaaggatggtcttgttaatgtaggatggatggactgtgccacccaggataacctttgtaaaagcttagatattacaacaagtactactgcttattttcctcctggagccactttaaataacaaagagaaaaacagtattttgtttctcaactcattggatgctaaagaaatatatttggaagtaatacataatcttccagattttgaactactttcggcaaacacactagaggttggcaggtttgactgttcctctgcaccagacatctgtagtaatctgtatgtttttcagccgtctctagcagtatttaaaggacaaggaaccaaagaatatgaaattcatcatgaatatttagcaaactccaaattgcctttcaaaacttaa

SEQ ID NO: 132222 - DNA, 1257 bp, Homo sapiens
tctgcatgacttcgcgacgagatggcctcggagttgggtgccagggatgatggaggctgcactgagctggcaaagcccctctatcttcagtacttggagagggccctccggttggaccattttctgcgactaacgtcagctatcttcaataggaatatttctagtgatgacagtgaagatggactggatgacagtaatccattattgccccagtctggggatcccttaatacaagttaaggaagaacctccaaattcattgcttggtgaaacttctggagcaggcagttctggaatgttaaacacatattctctgaatggagttctacagtcagaatcaaaatgtgataaggggaatttatataatttctctaagctgaagaaaagcagaaagtggctaaagagcattctgctaagtgatgaatccagcgaggctgattctcagagtgaagacgatgatgaagaagaactcaatctcagcagagaagaacttcacaacatgcttcgactacacaaatataagaaacttcaccaaaataagtatagtaaagacaaggagcctgcgggaacaaatatcccaggatcccgggcggtttcgattgacgttacttccgggaaaagtaaccttgcatcggcggttgcgggcctggaaagctctcgcgacattttctcctgcgagatctgcttgctcactgtagcgatgacaccctcctcctcctccccgccgcctttcggcaatcttcgccagtcccagtcccgactaatctgtactcagatggcatggatcagggtctcccctcgaaccccggttcgcacggggcgtcaggtggcagcggcggggtgcgagctgcgcgaggccgacggcagcggcactacgggtgggcacgggcaggcgacgagcattgaatgtgggcggggtggggatactccatatcaagaagcagaatgtcctgagtgtggcagcagaaggagcgaatgtatgtcgccatggcaaactgtgctggctgcagcccttatggagggcatggacattcacatcccccatcaacaaggaagacgaagtccaagcatgccgaacatggaggaccacccatgttcgatggaaaatttcagcaacttaccgcacgctgaggaacaccggacattgttcgctgatctgatgaagattgatcggtggatggatcgaatgttgcccctctttactctaccaatctttgctggcaactcggacaatattcttttatgcattcctttttag

SEQ ID NO: 132223 - DNA, 621 bp, Homo sapiens
atggtcctcaccaggtatgtcttctcaagcttggattcccagcctctggaaatacactctaatgaggagacccagaaccccagcaactgggagtctaagcccctggtcaccacactttctcaggccatggctgctaaattagtcaatttatccttgaaactggcaagagagtatcaagacacaccaaagtgtattatttgggtgccaaacatgctcttccctgcatacaccagcatggtggcaatattgaagatgtcagtctgcatccccagtgttgcatactggtccctggttccagatagagacactgaggacggtaaagatcacctgggtaccatcgagcagaccatccaaaggcaaaactccttatctgagaaatttagaaatataatgaaaagaacaaagaccacctgctgggcatcaagcagaccatccagaattccacgtggctggggaagcctcacaatcatggcagaaggcaaggaggagcaagtcctgtcttacatgatggcagcaggcaaagagagaatgaggaagacgcaaaagcggaaactcctgataaaaaccatcagatctcgtgagacttattcactaccacaagaacaacatgggggacattga

SEQ ID NO: 132224 - DNA, 549 bp, Homo sapiens
atggcggctccgatgactcccgcggctcggcccgaggactacgaggcggcgctcaatgccgccctggctgacgtgcccgaactggccagactcctggagatcgacccgtacttgaagccctacgccgtggacttccagcgcaggatgttttggatgttccttcccttctttaccttggccttttccccttctgtattagtccgttttcatgctgctgataaagacatacctgagactgggcaatttacaaaaggaagaggtttattggacttacagttccaagtggctgaggatgcctcgcaatcatggcagaagctgtatctcttgcctaattgctctggccaaccacaccaaaaattggttcccacagcgcagaagttttatatcacagtggaatggggtacttttttctcagtgcctggccaagttgtgggctctgaaggaagtcagatgtcagtgactgtagaaggcagtgaagaatctgaagatgacaagatgtacatgacctgctcttctgcactactagattcatttgccctttgcagctga

SEQ ID NO: 132225 - DNA, 585 bp, Homo sapiens
atggctgctgcagatagagtagagtggagctctgtagaactaccccagtccctcactaagcaaagaatgaagaagatgagcaacatttatgagtccgctgccaacacactgggaatctttaacagcccctgcctgaccaaagttgagctgcgtgtggcgtgcaaaggcatttctgacagagatgccctttccaaaccagacccctgtgtcatcctcaagatgcagtctcatgggcagtggtttgaggtagcaagaggaccaggaacagacgtgaacccagaccccagactgggccgggatgagagaactgagattcagagatgtcataataatatttctgtattagtctgttttcatgctgctgataaagacatacctgagactgggcaatttacaaaagaaagaggtttaattggacttacagttccacgtggctggggaagcctcacaatcatggcagaaggcaaggaggagcaagtcacatcttacatggatggtggcaggcaaagagagaatgacgaagacgcaaaagcagaaaccctagataaaaccatcagatcttgtgagacttattcactaccatga

SEQ ID NO: 132226 - DNA, 1581 bp, Homo sapiens
atgcccgacactgtgctaagcactggctgcgtgaagccttcacatttccgtgagacagaccaatcatttgtttctggaacaagaggtgctgtcaggaaaacagttggcattaagtcaaggaaaggtgaaagaaagcccaactccatcacctccaagcactctgaagccttggggtgggtctgggagaagcttctgacatccccaggtctggagcccatgggcccgggcactgtctgtgccagccccaggtccaagacaccgggcacagaaatgttgaaggaattgaaccagcaacgcagagcgaaagcgtttacagacctgaaaattgttgttgaaggcagagagtttgaagtccaccaaaatgttctagcttcctgcagcttgtatttcaaggacctgattcaaagctctgacacctccgggggatgggcagaggatgggcaggaccaggacggaaaggcaagcaccaggacccaaggaggtgaggtgtcacgggcatcagaggtcacgggcatcagaggtcacagggaggagagcaggtccacaggccagtgtcgggagagctggggagatgagcagttgaccatctggtccgtgcaagacagcggccagggcggccgggagaagctggagctcgtcctgtcgaacctgcaggcagacgtcctggagttgctgctggagtttgtctacacgggctccctggtcatcgactcggccaacgccaagacactgctggaggcggccagcaagttccagttccacaccttctgcaaagtctgcgtgtcctttctcgagaggcagctgacggtcagcaactgtctgggcgtgctggccatggccgaggccatgcagtgcagcgagctctaccacatggccaaggccttcgcgctgcagatcttccccgaggtggccgcccaggaggagatcctcagcatctccaaggacgacttcatcgcctacgtctccaacgacagcctcaacaccaaggctgaggagctggtgtacgagacagtcatcaagtggatcaagaaggaccccgcgacacgcacacaggaggaagaccctggaagaaccaggtctgcccctggttctctgggcccacccctcctgcccaacctggcccgggttgtgcctggtctccctgcgtcccaggccaatccctcctcctgggtgtgtgatctttgcctgctgaatcctgtcttccagttagcccgcgagctcaggataagcaacttctgcaacctgctggcttttggccttggtccccgagaaagactgagaggaactgctctcttcccacaggcctgtgacagcaacttttcaagcatagaaatctctgggcccctggagacaacacatccctccaagccctgcgcccctggtggcaatccagcccttcaagctgtaacacaagaccaagaactctacagggacaagcccagcatctgcatgggccgcactgggccagctcttaagcctctccaagcttgcccatgtggtgcacgctgccagcctctgggatcagagcagcacatcccaccgggagccctctgtactcagtggcagctccacaaggaatga

SEQ ID NO: 132227 - DNA, 1293 bp, Homo sapiens
atgatttccgcacttgtatggaatcttaattacgcattgcacggcgttccccactcgcggcagcaggcgtcatacagccagtcacgcgccgcaacaatcatcgagctcgaagttgtaatcgttaacgcctggctgaaagataaaagttaccagattgtcgacattacccatgctatccaaaagcgcgtcgataactggcgttacgtgacctggcagatctacgacaacattgccgcgacgacctccccctcctccggcgaaggtttacaagagacgcgcctgaaacaggatgtctactatctggagaaaccacgccgcaaaacggaagcgttaatctttggctctcacgacaactcaacgcttgagatgactcagcggatgtccacttatctggatacattgtctgctttcaccatacgctgtctcgcactcacccgtcactattgtaaactcccggatcacaggcatccccttctctacgcgaatactcggaatcacctatttcttcggttcttcgtcaccggattttcttccccgcaccatgaggcaagctgcatccaggtagccccagaggccgcttgcatgatgatgtttaaagcccaggagataaacatgctcgacacaaatatgattactcaactcaaggcttaccttgagaaattgaccaagcctgttgagttaattgccacgctggatgacagcgctaaatcggcagaaatcaaggaactgttggctgaaatcgcagaactgtcagacaaagtcacctttaaagaagataacagcttgccggtgcgtaagccgtctttcctgatcaccaacccaggttccaaccaggggccacgttttgcaggctccccgctgggccacgagttcacctcgctggtactggcgttgctgtggaccggtggtcatccgtcgaaagaagcgcagtctctgctggagcagattcgccatattgacggtgattttgaattcgaaacctattactcgctctcttgccacaactgcccggacgtggtgcaggcgctgaacctgatgagcgtactgaacccgcgcatcaagcacactgcaattgacggcggcaccttccagaacgaaatcaccgatcgcaacgtgatgggcgttccggcagtgttcgtaaacgggaaagagtttggtcagggccgcatgacgttgactgaaatcgttgccaaaattgatactggcgcggaaaaacgtgcggcagaagagctgaacaagaccccgaaaaggccggaagatacttgcccgcaacgaagattccttcataaccgg

SEQ ID NO: 132228 - DNA, 1470 bp, Homo sapiens
ctccggcggcccagtcaatacccacctgaatgatgctaagcccgatagaagtaataaccacaccggtaaccagtggcgggaataaaggcatcaagcgaccgataagtggcgctaataatgtggtgataaaacccgcggcgatagtggcaccaaatatccccagcaggccgatatccgggttcatcccaatggctatcattggtgttacagcagcaaaggtcaccgacataatcaccggcaggcggatccccataaagcggccgataccgatacattgcaataatgtgacgatcccgcagcaaaagagatccgagctaatgagcatcgcaatagcttcttttgagaggcccagtcggtcaccaatcataagaggaacagcgactgcacctttaaagaagataacagcttgccggtgcgtaagccgtctttcctgatcaccaacccaggttccaaccaggggccacgttttgcaggctccccgctgggccacgagttcacctcgctggtactggcgttgctgtggaccggtggtcatccgtcgaaagaagcgcagtctctgctggagcagattcgccatattgacggtgattttgaattcgaaacctattactcgctctcttgccacaactgcccggacgtggtgcaggcgctgaacctgatgagcgtactgaacccgcgcatcaagcacactgcaattgacggcggcaccttccagaacgaaatcaccgatcgcaacgtgatgggcgttccggcagtgttcgtaaacgggaaagagtttggtcagggccgcatgacgttgactgaaatcgttgccaaaattgatactggcgcggaaaaacgtgcggcagaagagtccgcacgtaaaggcatccgtaccggtctgatgggcgaacgttttggtggtcagatcctcgataccgttgatatcgaaaactacatttctgtaccgaagactgaagggcagaagctggcaggcgcactgaaagttcacgttgatgaatacgacgttgatgtgatcgacagcacgggtacgagatcgagtgtatctctggattttttcacacttacgattccaatagccccacagcccgttgtgccccgacatagcagaattgcgcccccagccccagtggcgaatacgcgccaggcgagaaagcgatgcggagaacgatccttgtttggcgtcactgtgattatcactctgcaatgccgggaatttcgtcagcatgatcagcagggcgaccagtaacacgatagccacgatgatcatataaggtgtctgtaccgataataccaggctgtgtttatacgcactcaattgctctggagacattttatcgagaacgtcttgcgattgatgtggcacgttagacaaaataagactttgcccaaagacaaccgcgataattgcgccaaacgagttaaatgtttgcgcaagatttaagcggaagtgaccactactttccggcc

SEQ ID NO: 132229 - DNA, 1561 bp, Homo sapiens
atgaccagcaatagtgtacatagctggtgtcgatcaggtcagcaggtacccagagatgaagagatgaccactttctccaaggccagccagtcagcatgcagggccatcagcatgggctggggcctcgggcgagctcgccacccagatccttgctgcccaggagaacagggcacggagcctgagatagacctagtgttctgctccccagagacccgagagccaagccccaaactggttgcctctgggaacgagggccggaggcgggttccctccctcggcaagatgccggagtgctgggatggggtgagtgagggcgctgcgggcatcaagccctggtgtggcctcctcatcccctgggtggtgcaatcagccgcatggctcaccctaaggctcattacctgggctctcctggaggacaacagggaaataaaaagggcctgcaagtcaaagagtgttctccagggtagagcctttggccaccaggaacatgacatcgagacaccctacggccttctgcatgtagtgatccggggctcccccaaggggaaccgcccagccatcctcacctaccatgatgtgggcctcaaccgcctcgggcgagctcgccacccagatccttgctgcccaggagaacagggcacggagcctgagatagacctagtgttctgctccccagagacccgagagccaagccccaaactggttgcctctgggaacgagggccgggtgggtctacaggaggtgggcatgtcaatgtcagcaagctgcctcctagccccgcttcctctccctggtggcctggagcccctggcagcaggaggatccccagtcacctttaaagaagataacagcttgccggtgcgtaagccgtctttcctgatcaccaacccaggttccaaccaggggccacgttttgcaggctccccgctgggccacgagttcacctcgctggtactggcgttgctgtggaccggtggtcatccgtcgaaagaagcgcagtctctgctggagcagattcgccatattgacggtgattttgaattcgaaacctattactcgctctcttgccacaactgcccggacgtggtgcaggcgctgaacctgatgagcgtactgaacccgcgcatcaagcacactgcaattgacggcggcaccttccagaacgaaatcaccgatcgcaacgtgatgggcgttccggcagtgttcgtaaacgggaaagagtttggtcagggccgcatgacgttgactgaaatcgttgccaaaattgatactggcgcggaaaaacgtgcggcagaagagctgaacaagcgtgatgcttatgacgtattaatcgtcggttccggcccggcgggtgcagcggcagcaatttactccgcacgtaaaggcatccgtaccggtctgatgggcgaacgttttggtggtcagatcctcgataccgttgatatcgaaaactacatttctgtaccgaagactgaagggcagaagctggcaggcgcactgaaagttcacgttgatgaatacgacgttgatgtgatcgacagccagagcgccagcaaactgg

SEQ ID NO: 132230 - DNA, 1401 bp, Homo sapiens
atgactgccttcggggggagactgctgcagcatgccgggaatatgaggatcccatcacaaattgagtggcataacctgcgcactgaccgcaagggcaacgccaaaagcgcccttgcgctgattggcaccgatacgctggcgggcgataactgccagttactgatttccggggccgacgaacaggaagcgcaccagcgtttaagccaatggctgcgcgatgaattcccccactgcgatgcgccgctggcggaagttaaatctgacgaactggaaccactgccggtttcactgaccaatctgaatccgcaaattatccgcgcccgcaccgtgtgcagcggtagtgcaggcggcattctgacgccgatctcttctttagatctcaatgcgctgggtaatcttcccgcagccaaaggcgttgacgccgagcaatccgcactggaaaacggcctgacgctggtactgaaaaacattgagtttcgtctgctggatagcgacggtgctaccagcgcgattctggaagctcaccgatccctggctggcgatacttccctgcgcgaacatttactgccagtcggacaatgcgccaacgccgccagcagcacgaatcacccgttcgttactaaaaaacggcagcaatgttttgtcttccgccagcggctggcgaacggcaggaacgactccggatggcagattacgcatgctttttggttccggttccaccagcactcgaggattatgaaatatctgtatggattcacggcccggcttaaggagcaccagcccaagctcaggcaccagaacagcatagaggcatcttcacaaaattttacgcattcttcgatgtcatcatcagatccttcggataatagtctcccctatttaaccgcgacgattgaacaacgaggaccacaaacggctgatgagctggctacattgtttggtaccacatcacgcaaagtggcttcaacgctggcaatggcaatcagcaaaggtcgtctgattcgcgtaaatcagggcggtaaatttcgttactgcataccgggcgataatttaccagcagagccgaaagcagcatcggtatctccgctctgcctgtcatgggcggtcaatcattaccgtgataacgcaatcgcctacaaagtccagcgcgacaaaaatgccagagaactgaagctggcgaacgcggcaattactgacatgcagatgcgtcagcgtgatgttgctgcgctcgatgcaaaatacacgaaggagttagctgatgcgaaagctgaaaatgatgctctgcgtgatgatgttgccgctggtcgtcgtcggttgcacatcaaagcagtctgtcagtcacctccccccgactggcagacaccgctgaacgggattatttcaccctcagagagaggctga

SEQ ID NO: 132231 - DNA, 933 bp, Homo sapiens
ttagagtgacatcgccatcggaatccctgaaaacacacctttttttgattgaaaatgagggcgccaaggggccacttcatcccgcagagcatcattttcagctttcgcatcagctaactccttcgtgtattttgcatcgagcgcagcaacatcacgctgacgcatctgcatctcagtaattgccgcgttcgccagtttcagttctctggcattttgtccgcgctgttctttgtaggcgatggcgttatcacggtaatgattaacaccccatgacaggcagacgacgatgcagataaccagagcggagataccgatgctgctttcggcgccctgatttacgcgaatcagacgacctttgctgattgccattgccagcgttgaagccactttgcgtgatgtggtaccaaacaatgtagccagctcatcagccgtttgtggtcctcgttgttcaatcgtcgcggttaaatcgcactctgagattttcgctactgttgctgtggtgatttcttccggcagttctgcctgcgctggctgttcctgctgaacattgttatcagccacacgccaggtgtacgcgcttttatcaacaaaaccagcctttttcagttcccatagttcgttcagcacttcttcacgactgatatcaagtcgcgcagcaagttctatggatgtggcttttcccattgctttcagtgcgtcaaaaacagtctccattaaatttttctcccggtaaaaattacttcgcaattcccatcgcccgccgttcatggtcatgcgatccataatccgctcgccgagcaatgttttcatggcctcatagttcaggtttgtcagcatccccacgctgcgcatcgacgctgtccggcgatcaacaatctggtgcagtaccactgctcgtttttcgtctcgcgctgatgccaaattcatcaagaa

SEQ ID NO: 132232 - DNA, 619 bp, Homo sapiens
caggaattcggcacgagaagaggatggaaggagctgcaaagatcttgatgagtgtgcaaccaagcaacacaactgccagttcctatgtgttaacaccattggcggcttcacatgcaaatgtcctcccggatttacccaacaccatacgtcctgcattgataacaatgaatgcacctctgacatcaatctgtgcgggtctaagggcatttgccagaacactcctggaagcttcacctgtgaatgccagcggggattctcacttgatcagaccggctccagctgtgaagacgtggacgagtgtgagggtaaccaccgctgccagcatggctgccagaacatcattggggggctacaggtgcagctgcccccagggctacctccagcactaccagtggaaccagtgtgttgatgaaaacgaatgcctcagcgctcacatctgcggaggagcctcctgtcacaacaccctggggaagctacaagtgcatgtgtcccgccggcttccagtatgaacagttcagtggaggatgccaagacatcaatgaatgtgggctcttcgcaggccccctgcagctatggctgtttccaataccgagggcggttacctgtgtggctgtccacc

SEQ ID NO: 132233 - DNA, 1935 bp, Homo sapiens
atgggttttaccccttgtttcctctggggccctcaagaggtttttatccggttgtcggacaagagcggtcttttcgcccccacacaaaagggtcgcatatgggcccttaaaaagcgaggactatatcgtttgattatattgatgagtgtcagagagatcctctcctatgccgaggtggtgtttgccataacacaaagggaagttaccgctgtgaatgcccgcctggccatcagctgtcccccaacaatttcgcgtgtatcgatcttgatgagtgtgcaaccaagcaacacaactgccagttcctatgtgttaacaccattggcggcttcacatgcaaatgtcctcccggatttacccaacaccatacgtcctgcattgataacaatgaatgcacctctgacatcaatctgtgcgggtctaagggcatttgccagaacactcctggaagcttcacctgtgaatgccagcggggattctcacttgatcagaccggctccagctgtgaaggccacatccatagaacttgctgcgcgacttgatatcagtcgtgaagaagtgctgaacgaactatgggaactgaaaaaggctggttttgttgataaaagcgcgtacacctggcgtgtggctgataacaatgttcagcaggaacagccagcgcaggcagaactgccggaagaaatcaccacagcaacagtagcgaaaatctcagagtgcgatttaaccgcgacgattgaacaacgaggaccacaaacggctgatgagctggctacattgtttggtaccacatcacgcaaagtggcttcaacgctggcaatggcaatcagcaaaggtcgtctgattcgcgtaaatcagggcggtaaatttcgttactgcataccgggcgataatttaccagcagagccgaaagcagcatcgaagctacaaacctggataaacatcaaagaggatgaacacaacctctttgtctacacaggcacacaatcacttccagggcttattcccagaagacagggaccaagaaactatgtggagttggatgcgagcattcctatctatgcagagttgaggtcacatttgtctgagtataagtgccctaaatatcccctgaacaatgagcacatgggaccatctaattgcaggaaaacaagctcagggcttccattgatctacattatgaggatccccccgtttacatattcatcgcccacgcttagcgtagaagctcttaagcactctatcgcttacaagctgatgtttacgattggaaaggacccggtcgtcgccaataaacatgaatggctgaacgcaacgttatttgctgtgcgcgatcgtctcgtggagcgctggttacgttcaaaccgtgcccagttgtcgcaagaaactcgtcaggtttactacctgtcgatggagtttttgattggccgtacgctctccaacgccatgttgtcgctaggaatttacgaagatgtacagggcgcactggaagcgatggggttaaatctcgaagagctgattgatgaagaaaatgacccaggcctcggtaacggtggcctgggacgtctggcggcttgcttccttgattctctggcgacgttagggttgccggggcgcggttacggcatccgctatgactacggtatgttcaagcagaacatcgttaacgggagccagaaagagtcgccagactactggctggaatacgggaacccgggggaattcaaacgccacaacacgcgctataaagtccgttttgggggtccgattcagcaggaaggtaaaaaaacgcgctggattgaaaccgaagagattctgggagtcgcttacgatcagataatccctggttacgacaccgacgcgaccaacacgctgcgtttgtggagtgcgcaagccagtagcgaaattaacctcggtaaattcaaccagggtgtattttaa

SEQ ID NO: 132234 - DNA, 2586 bp, Homo sapiens
atgcttcctcaacatgaatatgttgatatcgccagacgtcatggcctggaccctgctcagataaaaacgatgtcatcgacactagtgacgatgacatgtgatgacaatgtttatcgcgaaggagcaatgagtattggtgtgaaccagacgaccctgatcgtcataaaccggaacgcagggcgaatcgtgagcacagcccgccagcaatgcgcggcttccagctatgcggcgctaccggagacgaacgttcaggcggctgaactgctggcggagatggcgatttccagcgcccagcgccgtatgcgtgcggccaaaaaagtggtgcgtaaaaagctgaccagcggcccggcgttgcctggcaaactggctgattgtaccgcgcaggaccttaaccgtaccgagctgttcttgtggaaggggaagagaagttttcatcagggacctgcagaggaagaggatgtcgaaagactggtacaggacgccgggattatccgccatcgagggaaaattcaggcaattattggtaatgcgcgggcgtacctgcaaatggaacagaacggcgaaccgtttgtcgactttgtctggtcgtttgtaaatcatcagccacagataatggtgcgttcggcagtggtcgcgggaatcgcgcaggcagcactaccccagagcgtggtagcctgggagtatctggtggaagattatgatcgcattcgcaatgacattgaagctgtgctgccagagttcgccgactataaccagcgcatccgtcatcccggtggttttcacctgataaatgcagctgctgaaaggcgctggatgacgccgtcaggtaaggctaatttcattaccagcaaagggctgttagaagatccctcttcagcgtttaacagtaagctggtcatggcgacagtacgcagccacgatcagtacaacacgacgatttatggtatggatgatcgctatcgaggggtattcggtcaacgagatgggtaccgagactgggctggggcacttaactgcgaagagattgcccaactggctgaagactgtggcaatctcttcgcagttacggtgttccggtgcccagccggtgcgaatcttcagggtaacaggaacgtccactgcattgacgacctcggtaaggatcgatttaacgacatccgggcactggctgaagccgttaatctgacaaccaccccttgctggaagcgcctgaaacggctggaggacgacggtatccttatcggcaaagtcgccctgctggatccggaaaaaataggcctcggcctgaccgcttttgtgctgataaaaacgcaacatcacagcagcgaatggtattgccgctttgtcacggtggttaccgaaatgccagaagtgctggggttctggcgcaactggccccagccgtttatgggcggacaatggcaaaacgatacacccacgttgcgtattccctactatcgcccgctcgaaccgctacaaccaggctttttgcccggccgtgccgagcagcatctcgccgggcagatattttccggcctgacccgcttcgataataatactcagcgcccgattggcgatttagcgcatcactgggaaacctctactgacgggttacgctgggacttttatcttcgttcaaccctacactggcataacggcgatgcagtaaaagcctcacacttacaccagcgattattgatgctgttacaactgccagcactggatcaattatttattagcgtgaagcgtattgaagtcacccatccgcagtgtctgaccttctttttacatcgccctgattactggcttgcgcaccggctggcgagctattgcagccatctggcgcatccgcaattcccactgatcggcacgggtccttttcgcttaacacaattcacagcagagctgttcggttatgatatggatgctattgttggcggagctcataatggggccgccgatgcaatgagacattgttacttgatgtgtcgaatgactaagacatttggatcaacaatagctgacgtgatgaactgtttcgacagggcgtacgaccaacagccagaccagaaccgttcagggtatgaaccagacgggttttcttgtccgacttgctgcggcaacgtgcctgcatacgacgtgcctggaaatcccaaacgttggagcaggaagagatctcacgggcatcctggagcgaaagtggcgaatttagtgccgaaaaccacctttatcgatggtgtggaccagacatccttcttcctgggaacaaatggtcagtctaaccgtaaggccgagcactacttcctcaacggtaaactcgctgctgtgcgtatggatgagttcaagtatcacgtcctgattcagcaaccttacgcttatacccagagcggatatcagggtggattcaccggcacagtaatgcaaacggcgggatcgtcggtgtttaacctctacaccgatccgcaggaaagcgactccatcggcgtgcgccatattccgatgggtgtaccgctacagaccgaaatgcacgcgtatatggagatcctgaaaaaatatccaccacgcgcgcagattaaatctgactaa

SEQ ID NO: 132235 - DNA, 498 bp, Homo sapiens
atgagcctgcacatggtaactgccctcatagggaattctgtgaagaatgaagaagttttgtctttttcaagaatgtcacataaatggaatcatactgtaagcaacctcttgaggctggcgtctttcagcatgtgtgagaaccgtcaagtcgttggcgcgtttgtgacggattatttcgatgacgcccggcaaaatagaaaccacaataatcccgacgatcagcagcttaagagatattgtgaggattcagtccaggcactggctgaagccgttaatctgacaaccaccccttgctggaagcgcctgaaacggctggaggacgacggtatccttatcggcaaagtcgccctgctggatccggaaaaaataggcctcggcctgaccgcttttgtgctgataaaaacgcaacatcacagcagcgaatggtattgccgctttgtcacggtggttaccgaaatgccagaagtggggtgtcacgtattctcacgtgcacattaa

SEQ ID NO: 132236 - DNA, 801 bp, Homo sapiens
atggcagtaaaagcatggctcggtaccgcttttgaaaacagcgccactcgtgcttttggtcctgctggttttctcgagcaggatgactcggagaactggtgtgaaatccagaaattgcttaaaggccaccgcgcccgcaacagcaaactgtgtctggaaatggggcttggtcaggaaaagcgccgcgacgacggcattcctggcattactaactatatcttttcagaaactgccgctcgtggaatgtaccaacgctgggccgatcttctgagtagcgaaagctggcaggaagtgctcgataaaaccgccgcttaccagcaggagttacatcaccgcattagccagtttctctttcacgaagccagcttactggacgactggaaatttcgtgactggctggcgcagctcgacgaagagattcgttacaccatgcgcaccacagttaacgcgcaaacacgcgaccgccgcaaaggcgtccagccaccgacaacctggatttttaatgacaccaaagaccagctggagcggcgaatcgcccgtctggaaacgggcatggcctgggcagaagagccgccgtcacgcacccgtcacttaatcagcaactgccagataagcgaaaccgacatcccaaacgtatttgctgtgcgggtaaattatctgctttatcgggcacaaaaagagcgcgatgaaacattctatgttggaacgcgtttcgacaaagttcgccgtctggaagatgacactggcgctagctggaacggaaatcgtactggatcagccggaatcatttccataacctga

SEQ ID NO: 132237 - DNA, 1521 bp, Homo sapiens
atgaaagttataccatcactaagtttgaaaagactttttactaaagggggagacaccagtgcccaacatcatggagactgccttctacttcgagtcagccggcgtcggcctgagctcggacgagagttccgcattttcctggccatgaaacagctggtggagcagcagcccatccacacctgtcgcttctggggcaagatcctgggaatcaaacgcagctacctggtggccgaggtggaattccgggagggcgaggaggaggcagaggaggaggaggtggaggagatgacggaaggaggagagccctcaggcgccaacaagtacctgtactttgtgtgcaacgagccgggcctgccatggacgcggctgccccacgtcactccagcccagatcgtgaacgcccgaaagatcaagaagttcttcacaggctacctggacacgccagtcatagcccgcatctcggccgccacgcaggtcagcccgctggacctgcaggtctatggcaagcgcctggccttcgacatcacctacacgctggaatacagccgcctgaagaacaaacactactttgactgcgttaacgtgaacccggagatgccctgctttctcttccgggacagtgaagccgttgatattcatctggaacctagcagcaggcccacctttgctgcggaagggggcagcctccatctggatctgcagctgctctatcttccagcggtagaagttgactggggactggaagcgagtgcatcaagaagctgtgccctgtggactctagaggttcgctggtacacgagctcgtattcgaagatcatctgcgcagcgtgcttagcccgattgtgtgaagtcgctattgacgcgtatcttgtcgacccgaaagaagtcgacgtgacgcatctgaagtcgatgggctttcagaaagtgtttatcgcgctacacggtcgcggcggtgaagatgttccgctgcaggggatgctcgagctgatgggcttgccttataccggaagcggagtgatggcatctgcgctttcaatggataaactacgcagcaaacttctatggcaaggtgccggtttaccggtcgcgccgtgggtagcgttaacccgcgcagagtttgaaaaaggcctgagcgataagcagttagcagaaatttctgctctgggtttgccggttatcgttaagccgagccgcgaaggttccagtgtgggaatgtcaaaagtagtagcagaaaatgctctacaagatgcattaagattggcatttcagcacgatgaagaagtattgattgaaaaatggctaagtgggccggagttcacggttgcgatactcggtgaagaaattttaccgtcaatacgtattcaaccgtccggaaccttctatgattatgaggcgaagtatctctctgatgagacacagtatttctgccccgcaggtctggaagacctgcaggcatgtaaacttcgcgaaaactatggtgcctctgataaaaacattttagatctgggtacgttctgttaa

SEQ ID NO: 132238 - DNA, 2133 bp, Homo sapiens
atggtggaggcgatccgcgcttccggcagccagctggtgacactggcgatgaaacgtgtcgacttgcgccagcacaacgacgctatcctcgaaccgcttatcgcggcgggtgtgaccctgctgccaaatacatccggggcgaaaacagcggaagaagccattttcgccgcccatctggctcgtgaagcgttaggcacaaactggttaaaattagagattcaccctgacgcccgctggctgttgcccgatcccatcgaaaccctgaaagccgccgaaacgctggtacaacagggatttgtcgtgctgccttactgcggggccgatccggtattgtgtaaacgtctggaagaagtcggctgtgcagcggtgatgccgctcggcgcgccgattggctcgaatcagggactggaaacccgcgccatgctggagattattatccagcaggccacagtgccggtggttgtcgatgctggcatcggcgttcccagccatgccgcgcaggcgcatggaaatgggggccgacgcggtgttagtgaatacgcgattggtaccgacaccgaccccgcagtggttgccaccgtcattaatgtagtgagtttcgatctcttttgtatcgccccacgcggcacgctcgccgtctctgatgtgcaatatctgctgaccttcgcggtgatgttaaccgtcgggctggtgatcgggaaccttactgctggcgtgcgttatcaggcgcgggtagcccgttaccgcgagcaacgcacacggcacttatatgaaatgtcgaaagctctggcggtgggccgcagtccgcaggatatcgctgccaccagcgaacaatttattgcctccacgtttcatgcccgcagtcaggtgttgttgcccgatgacaacggtaaattgcagccgttaacacatccgcaaggaatgacgccgtgggacgatgccatcgcgcagtggagttttgataaaggcctgcctgcgggcgcgggcaccgacacgttacccggtgtaccgtaccagattttgccgctaaaaagcggcgagaaaacctacgggctggtggtggtggagccggggaatctgcgccagttgatgatcccggaacagcagcgcctgctggagacgtttacgctgttagtcgccaatgcccttgagcggctgacgctaaccgccagcgaagaacaggcgcggatggcaagcgaacgtgaacagatccgcacagcctgctgcggcgctttcgcatattacgcaggtccagctactttgccgcttgccggtgtgtctggggtacggccccgggcaaccggatacccctgtggccaggaaccaacgctggcaaatagcgcaaacacaaccggttcggcagtcgatgttcagcatgagctggcgggcctggtggatcagggcgcgacgttttgcgcaatggaagtttcctcccacgggctggtacagcaccgtgtggcggcattgaaatttgcggcgtcggtctttaccaacttaagccgcgatcaccttgattatcatggtgatatggaacactacgaagccgcgaaatggctgctttattctgagcatcattgcggtcaggcgattattaacgccgacgatgaagtgggccgccgctggctggcaaaactgccggacgcggttgcggtatcaatggaagatcatattaatccgaactgtcacggacgctggttgaaagcgaccgaagtgaactatcacgacagcggtgcgacgattcgctttagctcaagttggggcgatggcgaaattgaaagccatctgatgggcgcttttaacgtcagcaacctgctgctcgcgctggcgacactgttggcactcggctatccactggctgatctgctgaaaaccgccgcgcgtctgcaaccggtttgcggacgtatggaagtgttcactgcgccaggcaaaccgacggtggtggtggattacgcgcatacgccggatgcactggaaaaagccttacaggcagcgcgtctgcactgtgcgggcaagctgtggtgtgtctttggctgtggtggcgatcgcgataaaggtaagcgtccactgatgggcgcaatcgccgaagagttgctggtccactaccttatatggcgcgtctgggcgaccaggtag

SEQ ID NO: 132239 - DNA, 1021 bp, Homo sapiens
agagatgacactcgacagccgtgtggctgcggcgggcgatctctttgtagctgtagtaggtcatcaggcggacgggcgtcgatatatcccgcaggcgatagcgcaaggtgtggctgccattattgcagaggcgaaagatgaggcgaccgatggtgaaatccgtgaaatgcacggcgtaccggtcatctatctcagccagctcaacgagcgtttatctgcactggcgggccgcttttaccatgaaccctctgacaatttacgtctcgtgggcgtaacgggcaccaacggcaaaaccacgactacccagctgttggcgcagtggagccaactgcttggcgaaatcagcgcggtaatgggcaccgttggtaacggcctgctggggaaagtgatcccgacagaaaatacaaccggttcggcagtcgatgttcagcatgagctggcggggctggtggatcagggcgcgacgttttgcgcaatggaagtttcctcccacgggctggtacagcaccgtgtggcggcattgaaatttgcggcgtcggtctttaccaacttaagccgcgatcaccttgattatcatggtgatatggaacactacgaagccgcgaaatggctgctttattctgagcatcattgcggtcaggcgattattaacgccgacgatgaagtgggccgccgctggctggcaaaactgccggacgcggttgctgtatcaatggaagatcatattaatccgaactgtcacggacgctggttgaaagcgaccgaagtgaactataccgccagcagaaagttccaacggcagcccgtccggatcgttaaagaaggtgaagcgtttttgcgtgtatggatcgacaccgatggtttcacacttcacgttatggctttaaggctgtcagggatactgtcccacgaatggccacctgaatacccccagccagccgaggaacggcgagaagaaggtgaatgcatgaccggtgtgcgccagtgccagcgaggctacagcctatgccgccgtgtttaa

SEQ ID NO: 132240 - DNA, 672 bp, Homo sapiens
cctgctggtcgactttagaggatcttctgagtagcgaaagatggcaggaagtgctcgataaaaccgccgcttaccatcaggaggtgatgaaatgagtgcgcaagtttcactagagttacatcaccgcattaggccagttttctcgttcaggaatccagctgctggaccgactgggaaatttcgggacggggtggcccaacttcgaccgaaagaggttcggttccaccatgcgcaccacagttaacgggcaaacacgcgtcccccgcaaaggcgtccagccgccgacaacctggatttttaatgacaccaaagaccagctggagcggcgaatcgcccgtctggaaacgggcatggcctgggcagaagagccgccgtcacgcacccgtcacttaatcagcaactgccagataagcgaaaccgacatcccaaacgtatttgctgtgcgggtaaattatctgctttatcgggcacaaaaaggagcgcgatgaaacattctatgttggaacgcgtttcgacaaagttcgccgtctggaagatgacaactggcgcttgctggaacgggatatcgtcctggatcaagcggtaatcacttcccataacctgagtgtactgttctgatgaatcgaatttatgcgtgtcccgttgcggatgagccggagggtgaggctctcc

SEQ ID NO: 132241 - DNA, 3668 bp, Homo sapiens
  misc_feature (1)...(3668): n = a,t,c or g
atgaccactcattacggtcaaattactcatctacaaggtcgacgtatattccctgcgtcaggtctcgtgatgtatggcgaatatcttccgcaagcggtttgtgctggacaacaatggtcaatgaaactcaaagttcgtgcagttcatggccaacttaatgatggcggctttgatagccagcgttatgccattgcccagcatcagccgctcaccggccgttttctgcaggcaaatataagcgtacaatattctttcaatgccagaaaacttatcagcgcaaaaaacgtcaacgtcatccagcgtggacctgaaatcaccattgaaaaacaaatgacgatgccccaccagggcgaaccctttgccgatggtcacggacaggtgatgcatagcaaccgcgactgggaggacagctatcgccagcgttggcagttcgacaaaatcgtgcgttccacccacggtgttaactgtacaggctcctgtagctggaaaatctacgttaaaaatggtctggtgacctgggaaatccaacagaccgactacccgcgcactcgccctgacctgcccaatcatgaacctcgcggctgcccgcgtggcgcaagttactcctggtatctttacagcgctaaccgcctgaaatacccgctcattcgtaaacgactgattgaactgtggcgcgaagccctcaagcaacacagcgatccggtactggcgtgggcatcgattatgaacgatccgcaaaagtgcctgagctacaaacaagtgcgtgggcgcggcgggtttatccgctccaactggcaggaactaaaccagctgattgccgccgctaacgtctggaccatcaaaacctacggcccggatcgcgttgccggtttctcgccgatcccggcgatgtcgatggtttcttacgccgccggaacgcgttatctgtcgctgcttggcggcacctgtttaagtttctacgactggtattgcgacctgccgcccgcctcgccgatgacctggggcgagcaaaccgacgtaccggaatctgccgactggtataactccagctacatcatcgcctgggggtctaacgtaccgcagacacgtacgccggacgcccacttctttaccgaagtacgctacaaaggcactaaaaccatcgccattacccctgactactctgaagtggccaaattgtgcgaccagtggctggcaccgaaacaaggcactgatagcgccctggcgatggcaatgggccatgtgattttaaaagagtttcatctcgataatcccagcgactactttatcaactactgccgccgctacagcgacatgccgatgctggtaatgctggagcctcgcgacgatggtagctacgttcccgggcgcatgatccgcgcatctgacctggtggatggactgggcgaaagcaacaatccgcagtggaaaaccgtagcagttatacccgagcnggtgttagccggactgcgtgaaggcggtattgacgcgtatcctgtcgacccgaaagaagtcgacgtgacgcaactgaagtcgatgggctttcagaaagtgtttatcgcgctacacggtcgcggcggtgaagatggtacgctgcaggggatgctcgagctgatgggcttgccttataccggaagcggagtgatggcatctgcgctttcaatggataaactacgcagcaaacttctatggcaaggtgccggtttaccggtcgcgccgtgggtagcgttaacccgcgcagagtttgaaaaaggcctgagcgataagcagttagcagaaatttctgctctgggtttgccggttatcgttaagccgagccgcgaaggttccagtgtgggaatgtcaaaagtagtagcagaaaatgctctacaagatgcattaagattggcatttcagcacgatgaagaagtattgattgaaaaatggctaagtgggccggagttcacggttgcgatactcggtgaagaaattttaccgtcaatacgtattcaaccgtccggaaccttctatgattatgaggcgaagtatctctctgatgagacacagtatttctgccccgcaggtctggaagcgtcacaagaggccaatttgcaggcattagtgctgaaagcatggacgacgttaggttgcaaaggatggggacgtattgacgttatgctggacagcgatggacagttttatctgctggaagccaatacctcaccgggtatgaccagccacagcctggtgccgatggcggcacgtcaggcagctgctctgaacacgcgaaacagcgaagaagaggttcttctcgccgcaataatggacgacaagtcacaagcagtgaaggcacatggcaaggcgactgctagaggagcacaagcaagtaggagcgacaacacactgggcagcacaggggtgctgtttaaggcgctggattttggcatcgatgtttctattcaagccgccaccaaatatctggttgggcattcagatgcgatgattggcactgccgtgtgcaatgcccgttgctgggagcagctacgggatgatacacttcatctcgttggtaaagaccgacgccgcaaatttcaatgccgccacacggtgctgtaccagcccgtgggaggaaacttccattgcgcaaaacgtcgcgccctgatccaccagccccgccagctcatgctgaacatcgactgccgaaccggttgtattttctgtcgggatcactttccccagcaggccgttaccaacggtgcccattaccgcgctgatttcgccaagcagttggctccactgcgccaacagctgggtagtcgtggttttgccgttggtgcccgttacgcccacgagacgtacattgtccgagggttcatggtaaaagcggcccgccagtgcagattaacgctcgttgagctggctgagatagatgaccggcaccacctggcttgccgggccgtaatatttctcggcaaattcattaccaacctgactcggttcaagattcagttccacgagcagttcgccagtgaccagtatcatgctctgttcagccatgcttctgccgttcaggtattaggggcgaaagatgatggcagcgataagcgcctcggtgatggacaaaccgcccgcccggtgtgggaaaccgccaaagatgcgctgcaatttggtcaggacggtcacggtagcggtttcttctttactgaaaaaccggatgctaatgtctgggtcgatggcgcagtttcaagctattaccgcgaaacctatgccgaagcagaacaacgtttaggtgaagttcgcgccctgcgcctggcgggtcataacaatattttccccacgctttcatggctaaacggcactgccacactccgcgtctggcatccgcgcggccctgatcaagttgaagtgtgggcgttctgtattactgacaaagccgcctccgatgaagttaaagccgcttttgaaaacagcgccactcgtgcttttggtcctgctgggtttctcgagcaggatgactcggagaactggtgtgaaatccagaaattgcttataggccaccgcgcccgcaacagcaaactgtgtctggaaatggggcttggtcagaaaagcgccgcgacgacggcattcctggcattactaactatatcttttcagaaactgccgctcgtggaatggaccaccgctgggcc

SEQ ID NO: 132242 - DNA, 918 bp, Homo sapiens
ctaccattcaattaacgccgcttccgcttgctctgcgctacatccggtggcgtttttaacaatattgacctgtcgcacatgcagttcttcgttggtggcgaccacatcgaccatgaggttgccgaacactttgccggatttaatcatcagcccggtggaaagcatattgagcaccagtttctgcgctgtacctgctttcatccgcgaagaaccggtaacaacttcggcacctacaatcggtgtaatggcaaactcagcggtggttgaaacggcgctccccggattacaggaaattcccactgtgcggcagccgagctggcgtgcgtattccagtccggcaatcacatacggcgtgcgaccgctggcagcaatgccaaccaccacatcctgtgccgttaaattaatatttttcagatcattaacaccgccttcccggctatcttccgcgccttccaccgcgtgctgaatggcatattctccgccagcaatcaaaccaaccaccagacccggtttcacgccgtatgtgggcggacattcggagatgtaggctgggtagccaaatcctatcaggttgcagaggagagaggctccataaccgaacaccaggtacaaggccaccagtccgatgacaccgaacattttcacggtggcgagattgagcgtcagcagcagcactatcaccgccagcgaggcgacccagtcggagagatcggggaaccagaactgagcataagccgtgatcgccaccacgtctgccataccggttacaacccagcagaaccagtaagtccagccggtgaaatatccaatggcaccgccaatggcaataagctgaatatgtcggtttgtgagattgcgccgtagcgactgttcagccggagcctgatcatcggcaacgacttttacctgatctaccat

SEQ ID NO: 132243 - DNA, 2023 bp, Homo sapiens
actgtgcaggtgcagtgccgtggcattcgttttctcccggctggcactgtattcgcctattaacgccatacgcaattcagtaaatccttgcgcgccgagtttttgggcaaatttcactatgctcgactggctaatgccgagctgtttcgccatctgccgtgaagaaacggattgcagctcactcacgttggcctgcagaaagtcagcgattttttgctcgttttcggtgaattcactccccgcattgcttattttcgtcaggtacaacatcttccactctcctgggctggcagcataaattccgcttaagttcttatgacgctcttcacactctgcgagtgtagactcaatgattcctttaagcctgtcaattcgggatatatgattccatacatctgcaattatttgatcgtaaatagtaaggtcaccaccgatgcaatttgaaaagatgattactgaaggctcgaacaccgcctcggctgaaattgaccgcgtatcgacgctgggaaatgtgccggattatcaacgatgaagataaaaccgtaccgcttgccgttgaagcgcgtactgccggatatcgccgcggcgatccgatgttatccacgcccaggtaagcggcggcgggcgtctgatttacctcggtgcgggaacatccggtcgtctggggattctggatgccagcgaatgtccgcccacctacggcgtgaaaccgggtctggtggttggtttgattgctggcggcgaatatgccattcagcacgcggtggaaggcgcggaagatagccgggaaggcggtgttaatgatctgaaaaatattaatttaacggcacaggatgtggtggttggcattgctgccagcggtcgcacgcctttcctcgatatgagcgatgacgatcgcgatttccatattgacatcaatattaaaggcgtatggaacgtcacgaaggcggtgctgccggagatgattgcccgcaaagatggtcgcattgtgatgatgtcttcagtcactggtgatatggtggccgatcctggcgaaacggcgtacgccttaacgaaagcggcgattgttggcctgacaaaatcgctggcggtggagtacgcgcagtctggtattcgcgttaacgccatttgcccgggatacgtgcgcacaccatggcggaaagcattgcccgccagtcgaacccggaagatccagagtcgtagagatcagtggcgattaagtttgccccgtgacgatatggaactggctgctttatctcttctggtttgcattgggcaaattatcgccccggcaaaagatgacgttgaatttcgacatcgtataatgaatccgctcactgaagatgagtttcaacaactcatcgcgccgtggatagatatgttctaccttaatcacgcagaacatccctttatgcagaccaaaggtgtcaaagcaaatgatgtgactccaatggaaaaactgttggctggggcgaatcaggcaccaggttttggtggtggttttaaaagcggtttacgtggaggaacacctgtaacaacgttcgtacgtgggatcgatcttcgttcaacggtgttactcaatgtcctcacattacctcgtcttcaaaaacaatttcctaatgaatcacatacggaaaaccaacctacctggattaaacctatcaagtccaatgagtctatacctgcttcgtcaattgggtttgtccgtggtctattctggcaaccagcgcatattgaattatgcgatcccattgggattggtaaatgttcttgctgtggacaggaaagcaatttgcgttataccggttttcttaaggaaaaatttacctttacagttaatgggctatggccccatccgcattccccttgtctggtaacagtcaagaaaggggaggttgaggaaaaatttcttgctttcaccacctccgcaccatcatggacacaaatcagccgagttgtggtagataagattattcaaaatgaaaatggaaatcgcgtggcggcggttgtgatggctccttag

SEQ ID NO: 132244 - DNA, 807 bp, Homo sapiens
atgcctacagccgttgccgaacgtaggctggataaggcgttacgccgcatccggcaattctctgctcctgatgagggcgctaaatgcccgtggcctggaattattgattgctcaaaccattttgcaaggcttcgatgtcagtatggtcgattcctcgaagtgacctccgcaggcgatgaaaaaccgtatccactttacgatcatcacgttggtctggtcgtggagcaactgcgctgcattataacggccaaagtacggacgcggcatttttactacgtgttaaagagcatacacccggctgttgccggattacccgcgcttcgagattgcggagagctttttaactccgtgtactgtcgaaaaccagcaactggtcccgaactgcaggctgatgttatggtcgtcgtcgcctatggtttaattctccgaaagcagtgctggagatgccgcgtcttggctgtatcaacgttcatgttcactgctgccacgctggcgcggtgctgcaccaatccaacgctcactagggcgggtgatgcagaaactggtgtgaccattatgcaaatggatgtcgagataccagtggtacgctgtacgacaagctggcagagcttggcccacaaggcttatcaccacgttgaaacaactggcagacggcacggcgaaaccagagttcaggacgaaactcttgtcacttacgccgagaagttgagtaaagaagagcgcgtattgactggtcactttcggcagcacagcttgaacgctgcattgcgctttcaatccatggccaatgagctggctggaaattga

SEQ ID NO: 132245 - DNA, 2775 bp, Homo sapiens
tcacaatatccgctggttgccgggcatgaggtgattgggcgcgtggtggcactcgggagcgccgcgcaggataaaggtttgcaggtcggtcagcgtgtcgggattggctggacggcgcgtagctgtggtcactgcgacgcctgtattagcggtaatcagatcaactgcgagcaaggtgcggtgccgacgattatgaatcgcggtggctttgccgagaagttgcgtgcggactggcaatgggtgattccactgccagaaaatattgatatcgagtccgccgggccgctgttgtgcggcggtatcacggtctttaaaccactgttgatgcaccatatcactgctaccagccgcgttggggtaattggtattggcgggctggggcatatcgctataaaacttctgcacgcaatgggatgcgaggtgacagcctttagttctaatccggcgaaagagcaggaagtgctggcgatgggtgccgataaagtggtgaatagccgcgatccgcaggcactgaaagcactggcggggcagtttgatctcattatcaacaccgtcaacgtcagcctcgactggcagccctattttgaggcgctgacatattctgttttgtcgtatcgccagcacagcctgccgacattgttcggtgacattggcaatatcatggttgatatcaatgcgcacaatatcctgttcatctgcttgtggacgctccagtgcctcaaactgactttttagtaacgctaccggcataaaatgcccagcccgacgctgcattcgcgcgagaatagtttcatagtcgccattcagaaatcgtttggcactttgttgtttgccattggcgtagtgcatattgccaacgttaatgcgattcaccggaacgccacctttcaccagcgtcaggaaatcggcgggtgttttacaaaccagcaggattttctgtcgatcggcggcgcgatgaatgttgtcgataactttttgcagcgtccagaaacgtacggcgatcccttctgccagtaccatttccatcaggttttgttgtaccggatcttcggcaacctcatcgttggctaccagcaccagatttgcccccgcaaatccgacccattgaacgccgacctgaccgtgaatcaagcgttcatcaatccggcttaaaacaatatttggcatagcgtgttcctctttgttttgcttattggccttcacaggctgtgtggtatgcgccaggatgtcctgaatatggttgataatgagttcccgtggcgttggctgcagctcgccggagcgaactttcacgtactgcagcggcagatactggctgatcagcggcagcggaattggtgaatccgccagattacgtaccagatgagcgaaagcgtcatcaatctggctgtccggccagtaatagcgcacgcgatccgagtagctataaccacgcgccagacgacgcgcgttgccgtcaccgtggtagtggctttgccagtattccgggcggtcgagcatcacgtcttccagcacctgacgcagaccagaacaggctttcgctggcaccagttcttcttcaatcgccgcccgagagaacagagcttcacgcagggggacagtcaagctgggcccctttcgaatgggaaggggcaccccgcggggaggaatggactctagtatctgtaggggctctaaaataagatctactcgccactcgcatagccaggcggtggcttctttaatgccaactcgtcgcatccgtttgaaaacccaaccgcactgaccaacttcgtgcagatgctggcgatcttcttgatcccaacggcgctgtgctttgcctttggtgaagtgatgggcgatcgccgccaggggcgcatgttggggagagctgttgaccgcgggggggaatgccgggcaaaatgggcaacccgaattgggaaaaacactgccaaagaaaccggcggactggtaccacggattgggcgagtataacaccgaatggtacggacgatgaaggaggtacaaagaggcgacactctttgtgtccttctgcttcacgtcgagaagaagacagaacgaaacatcggacagaggaagagacaaaggatggaccgaactggctgttttgttggcttcaagatcgttcctggctgcagcgttggttgccgtatcaatgaccgatgctttccagactttaaccggctgtccttcaatttccagccagctcattggccatggattgaaagcgcgaatgcagcgttcaagctgtgctgccgaaagtgaccagtcaatacgcgcttcttctttactcaacttctcggcgtaagtgacaagagtttcgtcctgaacttctggtttcgccgtgccgtctgccagttgtttcaacgtggtgataagcccttgtgggccaagctctgccagcttgtcgtacagcgtaccactggtatcttctgcagtaatcgggcaggagagcttatagagcatatcaccggtgtctaaaccgacatccatttgcataatggtcacaccagtttctgcatcacccgcccatagtgagcgttggattggtgcagcaccgcgccagcgtggcagcagtgaaccatgaacgttgatacagccaagacgcggcatctccagcactgctttcggcagaattaaaccataggcgacgacgaccataacatcagcctgcagttcggcgaccagttgctggttttcttgtggacgcagggaaacaggttgaaaaacgggcagacctttttcctcagccagaactttaaccgggctgggcat

SEQ ID NO: 132246 - DNA, 1656 bp, Homo sapiens
ttaattacgcagggcgctatttgccagacgatcgtcttctgcctggcaagctgccgcagtgaacagcacgtcagttgaagagttcagcgcggtttcgcaagagtcctgcaatacgccgatgataaagccgacggcaaccacctgcatggcgatatcgttcgaaataccgaacatattacaggccagtgggatcagcagcagagacccccccgccacgccggatgcgccacaggcacacagagaagccaccacgctcaacagcagcgccgtgggcagatcgaccggaatacccagcgtattaaccgcagccagcgtcaacacggtaatagtgattgctgcgcccgccatattgatggtggctcccagcggaatagaaacggaataggtatcgcgatccagattcagcttttcacacagcgccatattcaccggaatgttcgctgcagagcttgcggcttgtgctgatgcatcctgaacggtaacccatccgtcttcaaaaccaggtagcgcatgaacaggtgcaggtgtttccagacgtacagcatcagggtaatccgcatgcgggaaacctttcattcctgcttcatccagcaatgcaagccagctgtcgcgggaatgatgcgtacgattaatacgcagccacattggcggacgctggttattggcttcgacgatggattgccactgctctggatacgctttttgcagacgcttcagcaaccaggaaggatgcagataacgtgcatcactggcattaaactcggctaataactcttcttgctgacgctggaactggcgtaatacaccgtttatcaaccctttaagttgcggacgcttaattgcgatagcgccttcaaccgtttcagccagcgcagcatgaggtggaatgcgggtataaagcagttgatacaaaccaaccataatcaggtaatgcacggtccgctgtttgccggtcatcggacgggccattaacttattaatcagccagtctaactgcgaaagcgtacgcagtacgccaaagcacaactcttgaagaagtgctttgtctttatcggaaactttttgcagacggttgcccggaacaaaccattcccgacgagagttcaggaggtcttgcgcgctcatcgctttcttacccgcaggttgtaacgagagcaggttcaggatgccatcaccagtcgcaacctgaatgccttgtttgttggcttcaaggatcgttcctggtgcagcgttggttgccgtatcaatgaccgatgctttccagactttaaccggctgtccttcaatttccagccagctcattggccatggattgaaagcgcgaatgcagcgttcaagctgtgctgccgaaagtgaccagtcaatacgcgcttcttctttactcaacttctcggccagtgcgctgccgccctttctttggcggtggacggagatcaaattcaatggtcggctggtaatacccagcgctttcagaccttcgcggatggcatcatcgacgcgtgcgcgaaagcgacggtctggcgtcacttcatcactttcaatcgtagaaagtgcgcacgaacgttcttttccagctgtcccgataacccctcgacctgtagacggacgttcgcggcgacggcagatccgcttaagcagagtaagcttacacagcat

SEQ ID NO: 132247 - DNA, 816 bp, Homo sapiens
tcaatatgaatcttgatgtccgttctcgcagattatgagcacctttgtgccgccagaaaccccggatgtcggttcaagcgtcaactttgcctcttctgttgaagatctgttacccaaacgctggagttcaccatcgaagaagtgaatgccgatcgcaatgtttctaataacgccaaaaatcgtcagatcgtgctgaatctctacgagaaagggatcttcgatattaaagatgcgatcaaccaggttgctgaccgcctgaacatctccaaacacactgtctatctctacatccgccagttcaagagcggtgatttccaggggcaagataagtaatgcgttttgccatcgtggtgaccgggccagcatacggtacgcaacaggcgagtagtgcttttcagtttgcgcaggcgctgatagcagatggccatgagttaagcagcgtctttttctatcgggaaggggtctataacgctaaccaattgacctctccggcaagtgacgaatttgacctcgtacgggcctggcaacaactgaatgcgcaacatggtgtggcgctgaatatctgcgtagcggcagcattacgccgtggcgttgttgatgaaacggaggccggaagactggggctggcttcgtcaaaccttcagcagggatttaccttaagcggacttggggcgctggcggaagcctcgctgacctgtgacagggtggtacaggtctgatgaaacgaattgcgtttgttttttttactgcccctcatggtacacccggaggcccggaaaggttaaatgctttaatgggcacttcccgattatctgc

SEQ ID NO: 132248 - DNA, 2655 bp, Homo sapiens
atgaaaatggtctcacgtattaccgcgatcggcctggctggcgtcgcgatttgctatttagggttatctggttatgtgtggtaccacgataataaacgcagtaaacaggccgatgttcaggcatctgctgtcagtgaaaataataagtgtgactgtgggaagatggaggagtatgagaagttctgtgaaaagagtcttgccagaatacaagaagcatcactatccacagagagctgtctccgtgctcagtctgaaagtatctcacttattcgctttcatggagtgggctcaatatgtggcacaaggagaataggagttcacactatccgggcgacctataccgttaggcgaatggcaccggaaggcaaccaaagcggggaagacagagcgaacacaggggcccagggtcccacaggaccacaggaaaccgaaagcgcccagaggtcagagagctataccgtgaggggacaaagcgcgaaaagcgcgaaaagagttggaccccacacagtggacaagatacgtgttgagtcctgctcgcccttcattccgaagaagcagacagaggagccaaccagcaaggcacgacagcgcacagcaagagcaacagaagcaaagaaacagcaaagaggagcctactcaaagcctcgtacctgcagagcagctgctactaccaacccctgtgccagaaccagcccctgcctaaaccccacgggaactggagcttcagcccagggtaagccgtcacgacctatgccagaaccatgcagcacctaccctcttgggaccaaaagcaccagctccacagagcagcaacccattggagctgagttgatggcacaccactcttggggacagagttcagtccagtggcagtcacaaaccagactggccaatagacagcaggatcttagaccagagcgaccggcaggacgcggtaaaaaactgatgcccagcccggttaaagttctggctgaggaaaaaggtctgcccgtttttcaacctgtttccctgcgtccacaagaaaaccagcaactggtcgccgaactgcaggctgatgttatggtcgtcgtcgcctatggtttaattctgccgaaagcagtgctggagatgccgcgtcttggctgtatcaacgttcatggttcactgctgccacgctggcgcggtgctgcaccaatccaacgctcactatgggcgggtgatgcagaaactggtgtgaccattatgcaaatggatgtcggtttagacaccggtgatatgctctataagctctcctgcccgattactgcagaagataccagtggtacgctgtacgacaagctggcagagcttggcccacaagggcttatcaccacgttgaaacaactggcagacggcacggcgaaaccagaagttcaggacgaaactcttgtcacttacgccgagaagttgagtaaagaagaagcgcgtattgactggtcactttcggcagcacagcttgaacgctgcattcgcgctttcaatccatggccaatgagctggctggaaattgaaggacagccggttgacgatctgcatgatgcccacttcctggtgagtattggcatcgaccgccgccatggtgatgaggatatccaccggatcgttgtcatcgtggttgaactcccgcggctttttcagcgttaccagagagaaaccggttttcttaacgccctcttccggacgcccccggactggcctgcattaactaaccttgatattgaactggactttattaacgacggtttatggatgaaaaccgatggcgttaatctgggcggcgtgcgcgcgagtaatcttaccgcagtgatccctgactactcaaaagaaaaactgctgattgacgctgacattaaaggtccgggtaaagccgttggcccttactttgatgagacaccgctgaaagattctctgcgtgcgaccctgcaagaactccagctcgacggcgatgtgaatgctcgcttacatcttgatatcccgctgaacggcgaactggtaaccgcgaaaggtgaagtgacgctgcgtaataacagtctgtttatcaaaccactcgacagcaccctgaaaaatttgagcggtaaattcagctttatcaatagcgatctgcaaagtgaaccactgacagcaagctggtttaatcagccgttgaacgtggatttttccaccaaagaaggggcaaaagcctaccagcgtgtaatcggcatgaataaacgcctctttgctccccgcttctcgccgcgtggtgccgagacaacaaaacacaatgtcgatgggatcggtgacaatgcgctcaggcttaccgaaatcttcttcccacggctgttcgaagccaggaattcgcaggttggaaacggagaaaccaaccagacccgctttcggctttgcgccgcgcccggtggcaccttcatcgcggatttcaccgccggaaccggtcgccgcgcccggccacggagaaatcgccgtcgggtggttgtgagtttcgactttcatcagaatatgcgccggttcctgatggaaatcgtagcggcccgtttcgtggtcagcaaagtagcggcccacttcagaaccttccattacggcggcgttatctcttataagcagagagaacgtgatctggcgtggtttcgaaagtatttttga

SEQ ID NO: 132249 - DNA, 2760 bp, Homo sapiens
ttatactgtaaaataccagatgcttgcctctgctgtccaaaagtcagttgcacaaaaacctcccagtaacccaaagggaaagtcccagacctcttcgcgatggatgacgagtgatcgacgatcggtcacggatcgatggacgatcgatggtcgacgatgatcgatgatggatgacgatgaggataatgataagagagtgaaacgctgtatgcgtctgagtccctctagaggatccccttccctgatactcgtgaaatggcctccgggctttccatgccggttggttttaaaaacggcaccgacggcagtctgtatgttgggacgcttaattgcgatagcggcttcaaccgtggcaaccagcgcagcatgaggaggaatgcgggtataaagcagttgatacaaaccaaccataatcaggtaatgcacggtccgctgtttgccggtcatcggacgggccattaacttattaatcagccagtctaactgcgaaagcgtacgcagtacgccaaagcacaactcttgaagaagtgctttgtctttatcggaaactttttgctggagcggaggcagaatgttgcttaatgattgcccttgctcgacgacttgtgtaacggcctgggccggcatgcccaggttgtaacaaagcaggttcagaatgccatcaccagtcgcaacctgaatgccttgtttgttggcttcaaggatcgttcctggtgcagcgttggttgccgtatcaatgaccgatgctgtccagactttaaccggctgtccttcaatttccagccagctcattggccatggattgaaagcgcgaatgcagcgttcgagctgtgctgccgaaagtgaccagtcaatacgcgcttcttctttactcaacttcagagcaattttgccttccccgttgagcacgctaaacgctgcaacgtcctgagcatttgcaccttttagcggaacgcagatataaaaaatccccggctttttgggccagggatatgtgttaatgaaaccttcttgacgctgattttttttcaactctgctttttcttcgacgggagttgttgaggttaagggtgaaatcaatgccgccagtgaaccgcctgaaacgccaatttcattgagcaaagagtcaatcagcggggcctgtgtgccgtaataaaaagcggctgataatgcttgttccgacaagtttccgccccacacattacccgtgtttgcatcacccgcatcgaccccacaattgagaccatccgacttgataattccaagaacgtcaaggttgtcggtgaaccgcctgaagaaccaagcctgctggcttctatcttcatctcctggttcccgatgctgttgctgattggagtctggatcttcttcatgcgtcaaatgcagggcggcggtggcaaaggtgccatgtcgtttggtaagagcaaagcgcgcatgctgacggaagatcagatcaaaacgacctttgctgacgttgcgggctgcgacgaagcaaaagaagaagttgctgaactggttgagtatctgcgcgagccgagccgcttccagaaactcggcggtaagatcccgaaaggcgtcttgatggtcggtcctccgggtaccggtaaaacgctgctggcgaaagcgattgcaggcgaagcgaaagttccgttctttactatctccggttctgacttcgtagaaatgttcggcggtgtgggtgcatcccgtgttcgtgacatgttcgaacaggcgaagaaagcggcaccgtgcatcatctttatcgatgaaatcgacgccgtaggccgccagcgtggcgctggtctgggcggtggtcacgatgaacgtgaacagactctgaaccagatgctggttgagatggatggcttcgaaggtaacgaaggtatcatcgttatcgccgcgactaaccgtccggacgttctcgacccggccctgctgcgtcctggccgtttcgaccgtcaggttgtggtcggcttgccagatgttcgcggtcgtgagcagatcctgaaagttcacatgcgtcgcgtaccattggcacccgatatcgacgcggcaatcattgcccgtggtactcctggtttctccggtgcttagctcggtacccctatgaacaaccctcatcggcacagcgctagcagtttgaacgacatcgacgcgaccccttcctgtccgattggcttgcatgcactgcgccggctgcgctggcacgaacgtgtagcccacgtgctgcgtctgaccgtatcggaatcccttggcaaactgtgtcatctttttaacccggccatttgttttgggcattgcaaccctttgaccatttgggaagaagcagccttcaatttcagtgccttccagcgccatctgacgcaggcggatgtaatagagcgttttgatacccttgcgccaggcgtaaatctgcgctttgttgatatcgcgagtggtggcggtatcggggaaaaaaagcgtcagcgacagcccctgatcgacatggcgagtcgcttccgcgtaggtgtcgatgatcttttctgcgccaatttcgtaagcgtcctgatacagcgccagattctcgttagtcataaacggggcagggtagtaaacgcgtcctgttttgccctctttgcgtatctctactttcgccacaatcggatgaatactcgacgtagcatgggtgatataagagatagaaccgggtggcggcaccgcctgaagattctggttggatatgccgtagcgcattacgtcgtcgggcaactgcgcccacat

SEQ ID NO: 132250 - DNA, 1201 bp, Homo sapiens
tcaatttccagccagctcattggccatggattgaaagcgcgaatgagcgttcaagctgtgctgccgaaagtgaccagtcaatacgcgcttcttcttactcaacttctcggcgtaagtgacaagagtttcgtcctgaacttctgtttcgccgtgccgtctgccagttgtttcaacgtggtgataagcccttgtggccaagctctgccagcttgtcgtacagcgtaccactggtatcttctgcgtaatcgggcaggagagcttatagagcatatcaccggtgtctaaaccgaatccatttgcataatggtcacaccagtttgtcggctggcttggtccatcggcgcgcgcatctgtgtgtatgtggacccgttgcgtcctaaagtcgcgaagagatgttcggtccggtccttgtgttaacggtttcacatcagaagaacaggcgcgcagagccgacgcctgaaagccggttccgtcttcgtcaataactacaacgacgcgatatgaccgtgccgtttggcggctataagcagagcggcaacggtcggacaaatccctgcatgcccagcagttactacgccgccagtgcgaataaatatgcaccattcgacacgctgaatgagtcaatcacctgcgacgtttgcgtggttggcggcggatataccgggctctcctccgcgctgcatctggcggaagcgggctttgacgtagtggttctcgaagcctcacgcatcggcgagctattattttctgtggggctgcgttgcggattggtttcttggtgtgctgtggggttgttcggttcttgctggggggcttcttttgtgtcgtggttgtgactggctgcgtgtgttttgttgacgtggtcctgggcttggccgtagcggctgatctgtgtggtgttgtgtgtgtgtggtgatggttgggcatgatggcggtaccgccggtcatgtgtacttgcctctctgttgaagatctggttacccaaacgctggagttcaccatcgaagaagtaatgccgatcgcaagtttctaataacgccgaaatctcagatcggcgaattctagagaaagggatcttcgatattaaagatgcgatcaaccaggttgctaccgcctgaacatctccaaacacactgtctatctctaatcgcagttcaaagcgggatttccaggggcaagataagtaatagcgttttgccat

SEQ ID NO: 132251 - DNA, 2946 bp, Homo sapiens
atggccatctacaagcagtcacagcacatgacggaggttgtgaggcgctgcccccaccatgagcgctgctcagatagcgatggtctggcccctcctcagcatcttatccgagtggaaggaaatttgcgtgtggagtatttggatgacagaaacacttttcgacatagtgtggtggtgccctatgagccgcctgaggttggctctgactgtaccaccatccactacaactacatgtgtaacagttcctgcatgggcggcatgaaccggaggcccatcctcaccatcatcacactggaagactccagtggtaatctactgggacggaacagctttgaggtgcgtgtttgtgcctgtcctgggagagaccggcgcacagaggaagagaatctccgcaagaaaggggagcctcaccacgagctgcccccagggagcactaagcgagcactgcccaacaacaccagctcctctccccagccaaagaagaaaccactggatggagaatatttcacccttcagatccgtgggcgtgagcgcttcgagatgttccgagagctgaatgaggccttggaactcaaggatgcccaggctgggaaggagccaggggggagcagggctcactccagccacttgaagtccaaaaagggtcagtctaggctaggtacccgttttctctgtcagcctgccgtgacggtcataccggtaaagatagtgcgcgtcacgggcgatacggttatccggccacatgctgagggtgctgtccgggtgcagctccgggtcgggcaggcggttacctgccgggtctgtggcatacgggatgcggatatccagattcgctgcggtggtgtgaacgccggtcagcctgccggtggtgctgtagctgtaactccgggtctggcgcgggctgctgatgcggatgagttcgccgttgtcgttccaggtcagccattccacggcgggcaggctgtacggtatacagcggttcgccagcccctgcgcgttggacgcatgtctggtctcatgctggcaaaaacatgctttcgtctgcaggtgatgcaccgtctgacgctcaccgttttcagtcagaaagtgttcactgaaagtattgaagtggtcgaagccttaaaggtcaatctgatgcgtgtgtttttacgccgtatggacctgcgccaacatcgcaagatgatcatgatcgataattacatcgcgtacaccggcagcatgaatatggtcgatcctcgctactttctccgtgatgctctccctcactgccccaaccctctgactggccccacattcgcggtgctcgaaaaacttggatatccgcatactttcgtttctaccgacttcaatacagtcgcgctagatgttaagacgttcggcatcaaagcgaatgacgacaaagccaagctcaaagcgctgggggaaatcgcgcacgcatgtgtcgacgcaacgatcatttattgcaagtcaccaactgttgcgggcctggtggcgcgcgagctgatcaagcttgggcatggcactccgactgagaatccccatgtctactggtcgcccttagaaacggtattggcttgcattttggcgcgctaccgagggcactgcagcaatacactggcgaccaattcaatgctggaaaactgcgctttttgctctgcacctccacgatcattgaaggagtcaacactatcgcttaataccgttgtgatctacgacaaccgcgatggaactcgcagcattgacaaattcaatcgattttgcattcatgcatttcctaaaattatcaggaatgcaatttatgaagtggaacagcatacgcaggcccctcaaggtttgattgctgcttctgctcttggggtaatttctcttgcctgtcagaaccggattgatgtttgccgattgaataatctacgtggcccggtatcacttttcttaatgactctggctgaatcaggtgaacgtaagagtacggttgataaactgctgatgaagccattatatcaactggaagaggatttatttgaaaaatacacccacgatcttaccgcatggaaaaatgatgaaacaatttttaatattgaaaaaaaagcactgatgtcaaaacttaaatcaaatattcgacctattaaactcatctcttggggcacttgcgatcagtcggcatcatgtctgatgaagctgggatcatttttaatgggtacacacttaacgagcctgccgttatcaataagatgtgggatggttcaatatttatcaacccggaatctccctggccgcctcgaagcactgctcaacttccagcaggtaacgctggatttgactggactggatatggcctctgcttctcttctggacgaggccaccgctgccgccgaagcaatggcgatggcgaaacgcgtcagcaaactgaaaaatgccaaccgcttcttcgtggcttccgatgtgcatccgcaaacgctggatctcatgtcttacttcacctcaaactcgcccctgcccggggttttttattgtaaaagtggggccacacggctgtcgagtgtcatctctcgcagtgctcgcgaaggtgcgtctggcacccacggagcaagaaggtcgcgcaaattacgatctgccacctgtcccctcgccttgattaatcacaaattcatttttatcgcccgttgtcagcgcatccggctcgatgttcatggtacgcaatacgccgcccatgatggcaccaaagaccggcgcggaaacggcgccgccgtagtatttacccgcctgcggatcgttgataacaacaaccagcgcgaagcgcggctgactcgcaggcgcaacgcctgcggtataagcaatatatttattgatgtagcgaccgtccggcccgacctttttcgcggtaccggttttaatggcgatacgatagcctttaatcgccgacttcacgccgccgccgaccggtag

SEQ ID NO: 132252 - DNA, 776 bp, Homo sapiens
atggacgaatatgtcggtctgccgaaagagcatccagaaagctactacagctttatgcaccgtaatttcttcgatcacgtggatattccaagcagaaaccttcacccttttcaaccggcaccgccccgaatatcgccgccgagtgccgccagtatgaagaaaaaatccgttcttaccgaaaaattcctgctgtttatgggcggtgtaggtaacgacggtcatattgcatttaacgaaccggcgtcttctctggcttctcgtactcgtatcaaaaccctgactcatgacactcgcgtcgcaaactctcgtttctttgataacgatgttaatcaggtgccaaaatatgccctgactgtcggtgttggtacactgctggatgccgaagaagtgatgattctggtgctgggtagccagaaagcactggcgctgcaggccgccgttgaaggttgcgtgaaccatatgtggaccatcagctgtctggaactgcatccgaaagcgatcatggtgtgcgatgaaccttccaccatggagctgaaagttaaaactttaagatatttccctggattagaagccgaaaacatcccaggtctggacattggtatccctgccctggctccttgctcagggcaatattttttataaatcggggggcagaaagtgtatgcattaacccagggccggatctttaccggccacgaatttcttgatgaccacgcggttgttatcgctgatggcctgattaaaagcgtctgtccggtagcggaactgccgccaga

SEQ ID NO: 132253 - DNA, 1260 bp, Homo sapiens
atgcgtgtgtttttacgccgtatggacctgcgccaacatcgcaagatgatcatgatcgataattacatcgcgtacaccggcagcatgaatatggtcgatcctcgctacttcaaacaagatgcgggcgtagggcaatggattgatctgatggcgcgtatggaaggccctatcgccaccgcgatggggattatttattcctgcgactgggagattgaaaccggaaaacgtattctgccgtggaccatcagctgtctgcaactgcatccgaaagcgatcatggtgtgcgatgaaccttccaccatggagctgaaagttaagactttaagatatttcaatgaattagaagcagaaaatatcaaagggcaatattttttaaaatcgggggtcagaatgtatgcattaacccagggccggatctttaccggccacgaatttcttgatgaccacgcggttgttatcgctgatggcctgattaaaagcgtctgtccggtagcggaactgccgccagagatcgaacaacgttcactgaacggggccattctctcccccggttttatcgatgtgcagttaaacggctgcggcggcgtacagtttaacgacaccgctgaagcggtcagcgtggaaacgctggaaatcatgcagaaagccaatgagaaatcaggctgtactaactatctgccgacgcttatcaccaccagcgatgagctgatgaaacagggcgtgcgcgttatgcgcgagtacctggcaaaacatccgaatcaggcgttaggtctgcatctggaaggtccgtggctgaatctggtaaaaaaaggcacccataatccgaattttgtgcgtaagcctgatgccgcgctggtcgatttcctgtgtgaaaacgccgacgtcattaccaaaggcctgaaggggcggggccttaaacattatccaatcagggacgctggactgggaccgtccaatcaggcacgcagctggagcggacagggcggcttccgggatgtggtaggaccgttggctctcgctgcacgcggaggtcaaggtgtcgtccttactgctgtgtgtcgtccgctcctaaaggcccagcttctatggccctgtgacctgcaggtattgggagattcacaactaagtcgccaggacccccggaagcctagaaatggaggtattgtgacatattcctggaccaagtacctaggtgagattgtgacaaatatcctggcccaactcataggtgctatgatgatacctggaatcagccaatag

SEQ ID NO: 132254 - DNA, 347 bp, Homo sapiens
gtgccaaccattcggcatttagccttaagctggcactggaactgttcagacagccaaaactgtggtttttgtcactgtatgttattggcgtttcctgcacctacgatgtttttgaccaacagtttgctaatttctttacttcgttctttgctaccggtgaacagggtaccagctcgagttcgtatctcaacgtgctgtggaatgacaacgatggcggctgtaaaggtgcctgcgaccgcgtgcctcaccagaacgtcaccgcgctgaatctacctgatcagtgcatcaacggcgctggtgttcccggaaaccttgccgttgttacctgcactggagcagttccgtaa

SEQ ID NO: 132255 - DNA, 2874 bp, Homo sapiens
ttattgcgctgatcctcccggaaaaaccagaaatagccaatgagttggtaccctatacggcgtttccagttcggcaatctgttccggcttcaaagtgatatccaccgcgttcaatagctcatcaagctgttcttcgcgcgaagttccgataatcggtgcggcaatgcccggtttactcaacaaccaggccagcgcaacttgtgctcgtgtcgcccccagttcttcactgacgcctgttaaccgctctgcgatctgcgcgtcattttcatcgctttctttatagagatttttccccacctcatcagacaccagtcgtgcggtagtttctccccacggacgcgtcagacggccccttgccagcgggctccatggaattaccgccacgccctcctgataacacagtggtagcatctcgcgctcttcttcacgataaatcagattgtagtgatcctgcatactgacaaactgcgcccagccgtgctgtttttggagttccagtgcctgagcaaactgcgaagcgtgcattgatgacgcgccgatataacgcgctttcccggcttttaccacgtcgttgagggcttccagcgtctcttcgatcggcgtgttgtaatcccagcgatgaatttgcaggatatcgacataatccatgccaaactgacgccggaaaacgcgacaaaaatagtcgctatccggaaaaccgcaacgctgtgccacttcatgaattgacagatgatatttctgcaaaatcatcctcgccttcgccattcgcacccaacgcacatactcgataaaacgcatcgttccatgctgagcaaacagttttgacagatgattgggcgtgatattaaaaaactgcgccacgctctcgcgggtgagcggctgggcataattatcctgaacccagttacaaatgcgcgttgcaggctgggaagctggatctggcgagcaggtttccggttgttcaacagcagccataccacccaggatctcgcctttgaagatccacactttaacgccgattacaccgtaagtggtgtgcgcttcagaggacagcaccggggagatcagcagcagaataagcgtcgccagcacaatgtcttccgcacgtttgagcagtgattgtacaccatcggcagccacggtccgacctattacaaccgctatccgcctcagttcaggaaatttacggaggggaccctttattatctcacagtttctgtagatccgaaatccaggcaggtccaacagaaacctctgctcaggatcgcccaaggccaacatcaaagaatcagaactattcctctccagaggcttggtgatgccgataacgccgtttgagatcatgatggcgaagatctggtcgatggggctggtggtgctggtggtatcgggattatcgctggtgctgatggtgaaaggtgtactgggcgtaccgattgaaggctcgatcccgctgtttatgctgggcgtggcgctcagtctgtttgccaccacgtcaatcggcatttttatggggacgatagcgcgttcaatgccgcaactggggctgctggtgattctggtgctgctgccgctgcaaatgctttccggtggttccacgccgcgcgaaagtatgccgcagatggtgcaggacattatgctgaccatgccgacgacacactttgttagcctcgcgcaggccatcctcggggtgccggattcgaaatcgtctggccgcagtttctgacgctgatggcaattggcggcgcatttttcaccattgcgctgcttgcccatgcaagatgaaaaactcagagatgcataggtgttcttctgaagatctgctccaactctgggagggagctgcgggcagctggggtcctcatccatgtccccacacccactctcacaggggctctccagggcagggatctggggtccccgtaggagctgctggtcttggccactgtcctcgtccgtggggctgcccagctcccgctctacgtcgtaggccttgggagccaggcacagtgacggcagagcaccttggggctccgaggggaccagcggctcatctgcaaatgtcagccaggggcccagctcagggttcagtctccgagaacgccggggatccttccaggtcctgcccatgttcctagagatatattcaatgtaagaaccgttcccatacaggaaggctgatgctataacactacttaaaaaggctgtaagggatttgatcgacagctccgcatcaatgcgcgttgcctgatgcgcgtcggcagtagcgataatctctccttgcggattaatcacccggctgtcaccgcgataatggcagccgttgccatcgctgccgacgcgattgcatcccgccacatacgcctgattctcaatcgcgcgggccgtcagcaatgcctgccagtgcagagagcgcggagcaggccagttggcgacgtacagggcgaggtcataatcgttgagattgcgcgaccacacaggaaaacgtaagtcgtagcacaccagcggcaaaatacgccagccgcgccatttcacaatcactcgcgcattgcccgctttataatgtagatgctcatctgccatgcggaacagatgacgcttatcataaaaatgtaccgtgccgcccggctcaaccagcaaaaagcggttaaccgaaccagactccgtttgtaatgcaacactgcctgcaatcagcgcattgcactgctgcgccttagctgtcatccagttcactacgtcatcttgtgctagcgacgaagctgccgcttccatggcaaagccgctggtaaacatctccggtagaacgatcacatcgcgcccggtaataccttccagttgacgatcaaaatgacgcaggttggcaggaccatccat

SEQ ID NO: 132256 - DNA, 1109 bp, Homo sapiens
ttgcatgctcatctgtctttactcccgtgattcaattggtgacaattaccagctagcctttttcagacccgggatttcaccgcgcatagcggcttcacggaccttaatacggctcaacccgaacttccgcaggaaaccatgcggacgacctgtttgacggcagcggttacgctgacgagacgggctggaatcacgcggcagagtctgcagcttgagaacagcgttccaacgatcttcgtcggaagcgttcacatcagacctgcaggcagcagagttgcaaaatcgagcttcgaatcgcccggccagaataggacacgcttcatttggtcattttcccggtccagagttcttgggatgtagagaaaactagcttctcccagggacaatcttgtgattccgcaggagaaggctctgaaagaatacatcaagattgggaatctggtgatgagcttagcagcagctccactgaacagataaggtctcttaaagagtggaatgacaacgatggcggctgtaaaggtgcctgcgaccgcgtgcctcaccagaacgtcaccgcgctgaatctacgtgatcagtgcatcaacggcgaatgctatgacgaagtgctgttccacgggcttgaagagtacatcaataacctgcaaggtgatggcgtgattgtcttacacaccatcggcagccacggtccgacctattacaaccgctatccgcctcagttcaggaaatttaccccaacctgcgacaccaatgagatccagacctgtaccaaagagcaactggtgaacacttacgacaacacgctggtttacgtcgactatattgttgataaagcgattaatctgctgaaagaacatcaggataaatttaccaccagcctggtttatctttctgaccacggtgaatcgttaggtgaaaatggcatctatctgcacggtctgccttatgccatcgccccggatagccaaaaacaggtgccgatgctgctgtggctgtcggaggattatcaaaaacggtatcaggttgaccagaactgcctgcaaaaacaggcgcaaacgcaaaaagattgtgtcttattgatctttgccaaacaaccctttgacaacagataa

SEQ ID NO: 132257 - DNA, 747 bp, Homo sapiens
atggtgctccttgaactacacatatcacaaacaagaacccacagcagtcctggttggcactctgtagaaacaggatctccaatgatgaaggaagagaggaaaggagggggagaaggagaaactctggttgatagagctgacgtgatttggcccaaaattagccccaaagcctgtattccccatatacaccacccaagcctactgcttcagttaaaccaggctactcgtagctttgcaaatatgatgtacattcccaccttgtccccatctgatcacacgcctaagcgtgctcccactgcttgcttactaattatcaaacaagttatgaaattattgatggtgctaattatttgggcggttgacccgcaatatcgcctgaatgcgatgattgccaccaccgtggtgttgctgctactggcactgattggcggtatctggacgctacgtaaatcgctaaagaacacagatgaagaggagagatattttatatcagagaaactttctcagaatgacggcaggcaacgagttggatttgcagcggcgacgttgtctcatcgctacattgctgaccgtcagctgccggataaagccatcgacctgatcgatgaagcagcatccagcattcgtatgcagattgactcaaaaccagaagaactcgaccgactcgatcgtcgtatcatccagctcaaactggaacaacaggcgttaatgaaagagtctgatgaagccagtgaaaaacatggatga

SEQ ID NO: 132258 - DNA, 1341 bp, Homo sapiens
tcatgaccggcagacagcgctttcacacccgcacaaacaagtttcacggtccgaccccagcaccaccgctcgctcatccagcgccgaccgtgtcaacgccagcgagtacccaacatccagcgaggagacatcaggtcgctcgtccagataggtcatcaacgccgttgcctgcgcggatagcgcttcgggtgttttgcccgacaccatccacggcaccaccggaacatccacgacagaacccgaacccggccccgcagactgactcggcactcccgggggctgttcgaggatgacgtgcgcgttagtaccactgatcccgaacgacgacacccccacccgacgaacacgaccactcctgggccagggcgtgttctccgtaaggagttgaaccgtccccgccgaccaatccacctccggcgacggcgattccacgtgcaacgtgcgtggcagctgcccgtgccgcatcgccatcaccatcttgatcacaccagccacacccgccgccgcttgcgtatgaccgatgttcgacttgaccgaccccaaccacaacggccggccaggatcacgatcacggccgtaggtggcgatcagcgcctgcgcctcgatcggatcacctgtcagatatgcttcaagaacaagtatgtctttattaccattaattctttcatcaactagatcaggctcgaaccctttaagatcaacgttcttgagcagatcacgaagcatatcgaaaaactgcagtgcggaggtgtagtcaaacaactcagcaggcgtgggaacaatcagcacatcagcagcacatacgacattaatcgtgccgatacccaggttaggcgcgctgtcaataactatgacatcatagtcatgagcaacagtttcaatggccagtcggagcatcaggtgtggatcggtgggcagtttaccttcatcaaatttgcccattaactcagtttcaatacggtgcagagccagacaggaaggaataatgtcaagccccggccagcaagtgggctttattgcataagtgacatcgtccttttccccaagatagaaaggcaggagagtgtcttctgcatgaatatgaagatctgtacccatccgtgatacattgaggctgttcccttccacgagcaaaacacgtagccccttcagagccagatcctgagcaagatgaacagaaactgaggttttgtaaacgccacctttatgggcagcaaccccgatcaccggtggaaatacgtcttcagcacgtcgcaatcgcgtaccaaacacatcacgcatatgattaatttgttcaattgtataaccaacacgttgctcaacccgtcctcgaatttccat

SEQ ID NO: 132259 - DNA, 1002 bp, Homo sapiens
tcatccagctcggcacaagttcgtcaaaggcagcagcgaacaccgtaaaagcccggtaaagcccccgcccatccccagccactgaccaccttgaccggaaaacacaaacccgatgcggcccctagcccctacagatccggtcaccaacctcagaagcctcatgaccggcagacagcgcttcacaccgtacaacaacgtttcacggtccgaccccagcaccaccgctcgctcatccagcgccgaccgtgtcaacgccagcgagtacccaacatccagcgaggagacatcaggtcgctcgtccagataggtcatcaacgccgttgcctgcgcggatagcgcttcgggtgttttgcccgacaccatccacggcaccaccggaacatccacgacagaacccgaacccggccccgcagactgactcggcactcccgggggctgttcgaggatgacgtgcgcgttagtaccactgatcccgaacgacgacacccccacccgacgaacacgaccactcctgggccagggcgtgttctccgtaaggagttgaaccgtccccgccgaccaatccacctccggcgacggcgattccacgtgcaacgtgcgtggcagctgcccgtgccgcatcgccatcaccatcttgatcacaccagccacacccgccgccgcttgcgtatgaccgatgttcgacttgaccgaccccaaccacaacggccggccaggatcacgatcacggccgtaggtggcgatcagcgcccagggattggctgagacgaaaaacatattctcaataaaccctttagggaaataggccaggttttcaccgtaacacgccacatcttgcgaatatatgtgtagaaactgccggaaatcgtcgtggtattcactccagagcgatgaaaacgtttcagtttgctcatggaaaacggtgtaacaagggtgaacactatcccatatcaccagctcaccgtctttcattgccatacggaactccggatgagcattcat

SEQ ID NO: 132260 - DNA, 723 bp, Homo sapiens
atggtgatggcgatgcggcacgggcagctgccacgcacgttgcacgtggaatcgccgtcgccggaggtggattggtcggcggggacggttcaactccttacggagaacacgccctggcccaggagtggtcgtgttcgtcgggtgggggtgtcgtcgttcgggatcagtggtactaacgcgcacgtcatcctcgaacagcccccgggagtgccgagtcagtctgcggggccgggttcgggttctgtcgtggatgttccggtggtgccgtggatggtgtcgggcaaaacacccgaagcgctatccgcgcaggcaacggcgttgatgacctatctggacgagcgacctgatgtctcctcgctggatgttgggtactcgctggcgttgacacggtcggcgctggatgagcgagcggtggtgctggggtcggacgtgaacgttgttgtacgctggccgctgcaaaacgctgacggaacagtagctgaatacaacggctatcacgttgtgtttgctcttgcgggaagcccgaaagacgctgatgacacatcaatctacatgttttatcaaaaggtcggcgacaactcaatcgacagctggaaaaacgcgggccgtgtctttaaagacagcgataagttcgacgccaacgatccgatcctgaaagatcagacgcaagaatggtccggttctgcaacctttacatctgacggaaaaatccgtttattctag

SEQ ID NO: 132261 - DNA, 1410 bp, Homo sapiens; identical to SEQ ID NO: 127567
  misc_feature (1)...(1410): n = a,t,c or g

SEQ ID NO: 132262 - DNA, 1776 bp, Homo sapiens; identical to SEQ ID NO: 129903

SEQ ID NO: 132263 - DNA, 3084 bp, Homo sapiens
tcacggttccgaaccccaagcaccaccggttcgttcatccagcgcggacggtgtcaccgccagcgagtacccaacatccagcgaggagacatcaggtcgctcgtccagataggtcatcaacgccgttgcctgcgcggatagcgcttcgggtgttttgcccgacaccatccacggcaccaccggaacatccacgacagaacccgaacccggccccgcagactgactcggcactcccgggggctgttcgaggatgacgtgcgcgttagtaccactgatcccgaacgacgacacccccacccgacgaacacgaccactcctgggccagggcgtgttctccgtaaggagttgaaccgtccccgccgaccaatccacctccggcgacggcgattccacgtgcaacgtgcgtggcagctgcccgtgccgcatcgccatcaccatcttgatcacaccagccacacccgccgccgcttgcgtatgaccgatgttcgacttgaccgaccccaaccacaacggccggccaggatcacgatcacggccgtaggtggcgatcagcgcctgcgccttggttgccgctgaagagatctttaatttgctttctatcagcgcatttttggcttgatgtgcgaaggccaaaaaggatggtgtaaaccggtacaggttagcgcgacgttcacggtgatcgccgataacaatctctacagacagaattcctttgtttacagcttcacggaatgcacgaacgacggttgattggctataaccagtttctgccgcgatcaggcggtgaggcttgtgaatgaagtattcactggttgttgccgcgagatttgcacattgcgacaggatatgcccggcgcttttaaatataagttccagtttcaggtcatttctttgcgtatgcatatgagcataggttgttagaaacagccaggccacatcttgaagactttgctgcttagaaatttcttccactggataccctaaatcatccatctcaagttccaagtatccacagatccctagagcaggggcacagtgcagccaggctgtttgatcaggctcgaaccctttaagatcaacgttcttgagcagatcacgaagcatatcgaaaaactgcagtgcggaggtgtagtcaaacaactcagcaggcgtgggaacaatcagcacatcagcagcacatacgacattaatcgtgccgatacccaggttaggcgcgctgtcaataactatgacatcatagtcatgtgcaacagtttcaatggccagtcggagcatcaggtgtggatcggtgggcagtttaccttcatcaaatttgcccattaactcagtttcaatacggtgcagagccagacaggaaggaataatgtcaagccccggccagcaagtgggctttattgcataagtgacatcgtccttttccccaagatagaaaggcaggagagtgtcttctgcatgaatatgaagatctggtacccatccgtgatacattgaggctgttccctgggggtcgttaccttccacgagcaaaacacgtagccccttcagagccagatccaacacatcacgcatatgattaatttggttcaattggataaccaacacgttgctcaacccgtcctcgaatttccatatccgggtgcggtagtcgccctgctttctcggcatctctgatagccagcacaacgtggagatacaggtccggaagcgcagtccgggcatgcggagcagggtgcccaggctggcaggaggctggcccatgctcagctcctcccgcatggctgaaagcaagacctcaggggtcagggtgtcctgcactgccccctttccgttgatggcagccaccctccacagctcctgcaggccccaatccagcctgccgtcatcaccgaaacgcgcgaggcagctgcggtaaagctcatcagcgtggtcgtgaagcgattcacagatgtctgcctgttcatccgcgtccagctcgttgagtttctccagaagcgttaatgtctggcttctgataaagcgggccatgttaagggcggttttttcctgtttggtcactgatgcctccgtgtaagggggatttctgttcatgggggtaatgataccgatgaaacgagagaggatgctcacgatacgggttactgatgatgaacatgcccggttatggaacgttgtgagggtaaacaactggcggtatggatgcggcgggaccagagaaaaatcactcagggtcaatgccagcgcttcgttaatacagatgtaggtgttccacagggtagccagcagcatcctgcgatgcagatccggaacataatggtgcagggcgctgacttccgcgtttccagaccgtggccaggacccaacgctgcccgagatgcgccgcgtgcggctgctggagatggcggacgcgatggatatgttctgccaagggttggtttgcgcattcacagttctccgcaagaattgattggctccaattcttggagtggtgaatccgttagcgaggtgccgccggcttccattcaggtcgaggtggcccggctccatgcaccgcgacgcaacgcggggaggcagacaaggtatagggcggcgcctacaatccatgccaacccgttccatgtgctcgccgaggcggcataaatcgccgtgacgatcagcggtccaatgatcgaagttaggctgcctggacagcatggcctgcaacgcgggcatcccgatgccgccggaagcgagaagaatcataatggggaaggccatccagcctcgcgtcgcgaacgccagcaagacgtagcccagcgcgtcggccgccatgccggcgataatggcctgcttctcgccgaaacgtttggtggcgggaccagtgacgaaggcttgagcgagggcgtgcaagattccgaataccgcaagcgacaggccgatcatcgtcgcgctccagcgaaagcggtcctcgccgaaaatgacccagagcgctgccggcacctgtcctacgagttgcatgataaagaagacagtcataagtgcggcgacgatagtcatgccccgcgcccaccggaaggagctgactgggttgaaggctctcaagggcat

SEQ ID NO: 132264 - DNA, 783 bp, Homo sapiens; identical to SEQ ID NO: 119094

SEQ ID NO: 132265 - DNA, 856 bp, Homo sapiens
tcacggttccgaaccccaagcaccaccggttcgttcatccagcgcggacggtgtcaccgccagcgagtacccaacatccagcgaggagacatcaggtcgctcgtccagataggtcatcaacgccgttgcctgcgcggatagcgcttcgggtgttttgcccgacaccatccacggcaccaccggaacatccacgacagaacccgaacccggccccgcagactgactcggcactcccgggggctgttcgaggatgacgtgcgcgttagtaccactgatcccgaacgacgacacccccacccgacgaacacgaccactcctgggccagggcgtgttctccgtaaggagttgaaccgtccccgccgaccaatccacctccggcgacggcgattccacgtgcaacgtgcgtggcagctgcccgtgccgcatcgccatcaccatcttgatcacaccagccacacccgccgccgcttgcgtatgaccgatgttcgacttgaccgaccccaaccacaacggccggccaggatcacgatcacggccgtaggtggcgatcagcgcctgcgccttggttgccgctgaagagatctttaatttgctttctatcagcgcatttttggcttgatgtgcgaaggccaaaaaggatggtgtaaaccggtacaggttagcgcgacgttcacggtgatcgccgataacaatctctacagacagaattcctttgtttacagcttcacggaatgcacgaacgacggttgattggctataaccagtttctgccgcgatcaggcggtgaggcttgtgaatgaagtattcactggttgttgccgcgagatttgcacattgcgacaggatatgcccggcg

SEQ ID NO: 132266 - DNA, 547 bp, Homo sapiens
tcaggataattgtttcagcatcgcaaccgcatcagactccggcatcgcaaactgcacccggtgccgggcagccacatccagcgcaaaaaccttcgtgtagacttccgttgaactgatggacttatgtcccatcaggctttgcagaactttcagcggtataccggcatacagcatgtgcatcgcataggaatggcggaacgtatgtggtgtgaccggaacagagaacgtcacaccgtcagcagcagcggcggcaaccgcctccccaatccaggtcctgaccgttctgtccgtcacttcccagatccgcgctttctctgtccttcctgtgcgacggttacgccgctccatgagcttatcgcgaataaatacctgtagaacggagtaccctcggtgtgcggttgtatgcctgctgtggaaggatgctgtgtcctgcttatccacaactttttgcgcacggttatgtggacaaaatacctggttacccaggccgtgccggcacgttaaccgggctgcatccgatgcaagtgtgtcgctgtcgacggtgacc

SEQ ID NO: 132267 - DNA, 1113 bp, Homo sapiens; identical to SEQ ID NO: 119098

SEQ ID NO: 132268 - DNA, 1173 bp, Homo sapiens; identical to SEQ ID NO: 119099

SEQ ID NO: 132269 - DNA, 961 bp, Homo sapiens
atgcccaaccataaagcaatccttatcaaattcaaaaaaactgaaatcataccaatcacactcttggaccacagtacaataaaaattgaaatcaatattaagaaaattgctcaaaatcatacaatcacatggaaattaaacaacttgctcctgaattacttttggcctcttactgtttctctgtgtgaaatgtgcaaggatttttacagtctgggaatagagttttcccgttttcccctacaggagctccagaacaaagactgtgcattagagaagcctcacattgggcacagatgtggccttaatatccctgccctgctaagcactggtggagttgcaggagagaacatgtccttgtcgtcaacgctgcagcacatcctgaaactcatactggcatttttcggactaactgcgcgcaatgaagcgcagaaacgagcaatgcaagcgttaagcaattcgaagcctttcacgttccttaccggcccggcaggatctgaaattgctgagttaaagcgcttcgggtgttttgcccgacaccatccacggcaccaccggaacatccacgacagaacccgaacccggccccgcagactgactcggcactcccgggggctgttcgaggatgacgtgcgcgttagtaccactgatcccgaacgacgacacccccacccgacgaacacgaccactcctgggccagggcgtgttctccgtaaggagttgaaccgtccccgccgaccaatccacctccggcgacggcgattccacgtgcaacgtgcgtggcagctgcccgtgccgcatcgccatcaccatcttgatcacaccagccacacccgccgccgcttgcgtatgaccgatgttcgacttgaccgaccccaaccacaacggccggccaggatcacgatcacggccgtaggtggcgatcagcgcctgcgcctcgatcggatcaccaagcagcgtgccc

SEQ ID NO: 132270 - DNA, 873 bp, Homo sapiens; identical to SEQ ID NO: 119100

SEQ ID NO: 132271 - DNA, 1425 bp, Homo sapiens; identical to SEQ ID NO: 119112

SEQ ID NO: 132272 - DNA, 1602 bp, Homo sapiens; identical to SEQ ID NO: 127341

SEQ ID NO: 132273 - DNA, 1575 bp, Homo sapiens
tcatgatacacagacacagataaaagatgtaagtagacagcttgaggtttcagagtccctcctgcagtgtgtatagcacagatacaagataaatatccgaaacatgatagaacaaactgtagcctcccaaacccgtaattgcctgcccgaagatgtggatccaagtcggacagaagtttcgtcaaaaggcagcagcgacaccgtgaaaagcccggtaaagccccaggccaatcccaagccactgacaaccctgaccgaaaatacaaacccgatgcggcccccagcccccacagatccggtcaccaacccagaagcctcatgaccggcagacagcgctttcacaccgcacaacaacgtttcacggtccgaccccagcaccaccgctcgctcatccagcgccgaccgtgtcaacgccagcgagtacccaacatccagcgaggagacatcaggtcgctcgtccagataggtcatcaacgccgttgcctgcgcggatagcgcttcgggtgttttgcccgacaccatccacggcaccaccggaacatccacgacagaacccgaacccggccccgcagactgactcggcactcccgggggctgttcgaggatgacgtgcgcgttagtaccactgatcccgaacgacgacacccccacccgacgaacacgaccactcctgggccagggcgtgttctccgtaaggagttgaaccgtccccgccgaccaatccacctccggcgacggcgattccacgtgcaacgtgcgtggcagctgcccgtgccgcatcgccatcaccatcttgatcacaccagccacacccgccgccgcttgcgtatgaccgatgttcgacttgaccgaccccaaccacaacggccggccaggatcacgatcacggccgtaggtggcgatcagcgcctgcgcctcgatcggatcacctaagccgcggcccgccctatcgatgatcctgctacaaggaagcaagttatttaaatcccgatgagtctcagtttcctcatttgtaataatggggataagaatatgtgttctgtgggttatagtgtgaattggagataatgagcctaaaatgaggagtggagggctggcatgtaggagatgcctgagaattgataggtgctgctggtgttgtaatagtatttcctcggttactgattcctcttcttgcttccaatcttgtacacgggggaaagatgaagaacaattgtgctcctcaaattcctcatcaggagtaaatttacccaggagcccaggagggaagcagtgtcctccgagaagacccttgccaactggtcccttctgaagagccctcctcaacgtggcctgtggcccagggacttcctctgcgagctcgatgcagaacctgaatggacaacttctggaacacgaggagtgcccctggagacccactgaaatcactgggggagatacttgaacagccctggcctctgtaactaatgcaatggcatattgcagaaatgacagagcgccgtctgaggttaagtcataaaagccttgtcttgctttctcttgggtcactctttgtgggggaaagtcagccgccat

SEQ ID NO: 132274 - DNA, 895 bp, Homo sapiens; identical to SEQ ID NO: 119104

SEQ ID NO: 132275 - DNA, 1536 bp, Homo sapiens
ctaatttctcttcgtcaaaggcagcagcgaacaccgggaaagcccggtaaaggcccccggcccatccccagcccatggccaccctgaccggaaaacacaaacccgatgcggccccccagccccacaagatccggtcaccaacccagaagcctcatgaccggcagacagcgctttcacaccgcacaacaacgtttcacggtccgaccccagcaccaccgctcgctcatccagcgccgaccgtgtcaacgccagcgagtacccaacatccagcgaggagacatcaggtcgctcgtccagataggtcatcaacgccgttgcctgcgcggatagcgcttcgggtgttttgcccgacaccatccacggcaccaccggaacatccacgacagaacccgaacccggccccgcagactgactcggcactcccgggggctgttcgaggatgacgtgcgcgttagtaccactgatcccgaacgacgacacccccacccgacgaacacgaccactcctgggccagggcgtgttctccgtaaggagttgaaccgtccccgccgaccaatccacctccggcgacggcgattccacgtgcaacgtgcgtggcagctgcccgtgccgcatcgccatcaccatcttgatcacaccagccacacccgccgccgcttgcgtatgaccgatgttcgacttgaccgaccccaaccacaacggccggccaggatcacgatcacaaccgtaggtggcgatcagcgcctgcgctttctttgtcgcgcggatggctatgttagcgttgtaatgcgtggccagggaggcgcaggtagggggtagcaaaccgttaaaaggctgtggttgcgactgcgacatgggctccttttggatgtctggccactctggactgaagagcgagttcttggactgcgacgagtgctgggatgcctccggaggcatctgttgctgctgagactgaggcactggctgctgctgcatgtggccgtagctctggctctgggaatagggcaattgctgctcgagaggcggcatgccatggacggtggaccggatttgctgcgatggccgccgtatccggcgggaggcgggggctgggatccattgtagcgccggctgctgctgcggctgctggggcttggagcccgaagtcatcttgtggctgccgtgaggtggcatgcccagccctaccggcggcatgccgcgagaggatttgtgatagtccacgggcatagacggtcggccaggctgctggccgtatgagcgtcgggcggcatgccaccagggtaatttggcatcttgtgactggaggaagacgacgaagagctgctgcctggcactccgctcactgaggacgagcgctgatggccaccatcctgtcgtctttgctgcggcaccatcagccggtggcggcagtagtgacgacggatcccgttcccgctctctctcccgttcacgatctcggtcccgatcccggctgtcgttgccgtttaacagctctggtggtgtcgtgatgtttgagtggtagcccttcatcat

SEQ ID NO: 132276 - DNA, 1419 bp, Homo sapiens; identical to SEQ ID NO: 117440

SEQ ID NO: 132277 - DNA, 2787 bp, Homo sapiens; identical to SEQ ID NO: 127351

SEQ ID NO: 132278 - DNA, 1434 bp, Homo sapiens
tcaggataattgtttcagcatcgcaaccgcatcagactccggcatcgcaaactgcacccggtgccgggcagccacatccagcgcaaaaaccttcgtgtagacttccgttgaactgatggacttatgtcccatcaggctttgcagaactttcagcggtataccggcatacagcatgtgcatcgcataggaatggcggaacgtatgtggtgtgaccggaacagagaacgtcacaccgtcagcagcagcggcggcaaccgcctccccaatccaggtcctgaccgttctgtccgtcacttcccagatccgcgctttctctgtccttcctgtgcgacggttacgccgctccatgagcttatcgcgaataaatacctgtgcggtgaagaaggctggggtgagggatcccgaggggagggctgggctgttgagggcgatggagccgatgtcggtgccggagagcaccagcgggggcgctgagatttccaagcctttgggttttttggcctttgggggaagagatggagacttggtcttggagcccgatgacaggttcaagggctccagggaatcggagtcatggcaggcggcctccaggaagaggcttctgtgttcagaagggaggggtgagttgggggacagggacggggaccgagatgagaagggtgaggcggatgaaatactggcagcgtttggcaacattaaagaggagatcttggccgagacggacgagaacaggaaggcggacgccgccgcagcctctgacgtggaaggcagggacaccaccggcctggtgacgtgcttgtcggttttattggtcacaaacctgatcacagtcctgacttcttccacgggggggctgtcttcgggcggctcctccagcttctccgtcttgatggccttgaaggcgtctggtgggttctgcagggaattaatggtgaaggacgagtacaggcctgagtggatgtattcgttgcggctcgtgcttctgagggcggccaggccgtgtttgtgggcctcgcggccctccggagacgccttgcagtcgctgtcctgcagcagaaggctctcccggctgatctccaccgcgtgaggatccatcttcaggatctccgggaaagagacaaacttgtacacaaacttctgcccgatcaccttcttgatgatgttcttgtcataatagtatcgcagggctctgctcagcttatcatagttcatatttgttttgttttttcggagtccccacagcttggccacttcttctgctttgaggagcttgaattcaccatcgttcgaggtccagcagatcaaatgctcatgtttctgatccagcagcaactgcaacaggaactgccacagcgtgattgcactctccataccatgctgcaggtcaaagcccaccatcacagatgcacagatgggaaaagcaatttctcccat

SEQ ID NO: 132279 - DNA, 1314 bp, Homo sapiens
gatctggctctgaaggggctacgtgttttgctcgtggaaggtaacgacccccagggaacagcctcaatgtatcacggatgggtaccagatcttcatattcatgcagaagacactctcctgcctttctatcttggggaaaaggacgatgtcacttatgcaataaagcccacttgctggccggggcttgacattattccttcctgtctggctctgcaccgtattgaaactgagttaatgggcaaatttgatgaaagtaaactgcccaccgatccacacctgatgctccgactggccattgaaactgttgctcatgactatgatgtcatagtctatgttgaagtcgaggagcttatcggggaaataggagaagtacggacgccacacgtatttattcgcgataagctcatggagcggcgtaaccgtcgcacaggaaggacagagaaagcgcggatctgggaagtgacggacagaacggtcaggacctggattggggaggcggttgccgccgctgctgctgacggtgtgacgttctctgttccggtcacaccacatacgttccgccattcctatgcgatgcacatgctgtatgccggtataccgctgaaagttctgcaaagcctgatgggacataagtccattcagtcaacggaagtctacacgaaaggttttgcgctggatgtggctgccccgcaccgggtgcagtttgcgatgccggagtctgatgccggtgcaatgctgaaacattatcctgagaataaatgcttggcctttatatggaaagcagcttcggtccccggtccccctcgttctgcccatgcaagagctgcatctatagtcaagttcgaccgtcttctcagcgctccgccagggccgtgggccgaccccggcggggccgatccgagggcctcactaaaccatccaatcggtagtagcgacgggcgttacgcgacccccgacggtcggcgtcccccacttcttagaggcaagtggcgttcaccacccgagattgacatacaggtctgtgatgcccttagagtccggggctgcacgcgcgctacactgactggctcagcgtgtgcctaccctacgccggcaggcgcgggtaacccgttgaaccccattcgtgatggggatcggggattgcaattattccccatgaacgaggaattcccagtaagtgcgggtcataagcttgcgttgattaagtccctgccctttgtacacaccgcccgtcgctactaccgattggatggtttagtgaggccctcggatcggccccgccggggtcggcccacggccctggcggagcgctga

SEQ ID NO: 132280 - DNA, 1424 bp, Homo sapiens
atgataatagtccgcctaagcactaccgttttccatgagcaaactgaaacgttttcatcgctctggagtgaataccacgacgatttccggcagtttctacacatatattcgcaagatgtggcgtgttacggtgaaaacctggcctatttccctaaagggtttattgagaatatgtttttcgtctcagccaatccctgggtgagtttcaccagttttgatttaaacgtggccaatatggacaacttcttcgcccccgttttcaccatgggcaaatattatacgcaaggcgacaaggtgctgatgccgctggcgattcaggttcatcatgccgtttgtgatggcttccatgtcggcagaatgcttaatgaattacaacagtactgcgatgagtggcaagacagggctgcagaacgataccacgctgatcgccagaccgtgggtcaagccataccttggtttggagataatgaggatagtaggaaattgaccacatcttacctggtgtttcccttgtactatgtacatacctcttttctctcagctattgtgttgccctgtgagctttggccaatgtggggcattccgaaacccgggacacccaccttccccgaaccccgaatttttcctgggccccagaaggtgcaatccaagtctcgggcacaaagctttggttcaagaggcagcaagcgacacacccggaaaaagctccgggtaaaagccccccgggccccatccccaagcccattggaccaccctgacccggaaaacacaaacccgatgcggcccccagcccccacagatccgggtcaccaaacccagaagcctcatgaccggaagacagcgctttcacaccgcacaacaacgttttcacggtccgaccccagcaccaccgctcgctcatccagcgccgaccgtgtcaacgccagcgagtacccaacatccagcgaggagacatcaggtcgctccgcttcgggtgttttgcccgacaccatccacggcaccaccggaacatccacgacagaacccgaacccggccccgcagactgactcggcactcccgggggctgttcgaggatgacgtgcgcgttagtaccactgatcccgaacgacgacacccccacccgacgaacacgaccactcctgggccagggcgtgttctccgtaaggagttgaaccgtccccgccgaccaatccacctccggcgacggcgattccacgtgcaacgtgcgtggcagctgcccgtgccgcatcgccatcaccatcttgatcacaccagccacacccgccgccgcttgcgtatgaccgatgttcgacttgaccgaccccaaccacaacggccggccaggatcacgatcacggccgtaggtggcgatcagcgcctgcgcctcgatcggatcaccaagccgcgtgcccgtcccaattga

SEQ ID NO: 132281 - DNA, 2489 bp, Homo sapiens
  misc_feature (1)...(2489): n = a,t,c or g
ccatttccatataaaggcaaaggcatttattctcaggataattgtttcagcatcgcaaccgcatcagactccggcatcgcaaactgcacccggtgccgggcagccacatccagcgcaaaaaccttcgtgtagacttccgttgaactgatggacttatgtcccatcaggctttgcagaactttcagcggtataccggcatacagcatgtgcatcgcataggaatggcggaacgtatgtggtgtgaccggaacagagaacgtcacaccgtcagcagcagcggcggcaaccgcctccccaatccaggtcctgaccgttctgtccgtcacttcccagatccgcgctttctctgtccttcctgtgcgacggttacgccgctccatgagcttatcgcgaataaatacnccgaagaggacctcctcggtttggcttatgacatctaggatctccccgacactgtcgctcagttccgctgtcttcccatcttcctctggcgaactgtttccaacctcgggcagggtcctctcattccgccaggaggcgcccggggcttctgtgtcgcttccatcagaggagccgctatggacgctgagctcctcagcttcgtccgtgtccgagtcaggggctgtgtggcggcggatacgggacacggcttctcgcagggccccggcgtagggccctggggtccgcgcccagccccggccggcgcgccgctggaccaccgccacttccgacccctcggctctgccctgggctcccgaagctgctgggcctaaggcttggtgctctgggctacctggctgcgtgggggcgtcccgcaggtttacttcgggggccgggagccccaagatgcggaaagtgcgctcctccagtgtggagtcccccggcctcccgccctcagcttcgcccccgcggcccccgccgggctggtgtaaaaggcgactgctcgacagccgcttttgacaaggggaaggaaagaccgtggccccttcaccctcctccttgccgggcttcgattggctgggggaatcccccaccacgcgtgtcaccccagagggcaaaagctgcacctgctgggttcggggggttggaacatattgggatcgtatcactacgcacgtggcgtcaatgacaaagacgccttccccacgggacaggccctgggaactgcggggcaaggtgtgggcacggcgggtcgccttccaaccctccagggtctccggtcctgccccctctccaagacccagagattctctccatccggtgcctccgggagcccagggtctggggagtgtctggctatggcggggcggctgctttttaggggagggaatccagcatttgggaaaccagatctgttctccttctttcccttccctcgagcccttgaggtggtgcctggatctgggagcgggatgcggggcacagggagccgcagttgcagaccccgcaggagctatctcggtgcctgcgctccctgtagctttggcttggggatggctgtcgctaccactgttcaggtcagcagcagccagccccaggcttttctccacgacccccttgccgggctctggccttgctctggccgctccacagcctggggatccccccaagagaccttgcccctgtcggagaccccaagccccgaggacgtcccggtagatccgaggatccagcctcttctttgtgcgccctccgtctgtcctggctggagtcgcagctggggctgatgaagtgggcacctgagagttcccggggcctctcttagtccccaaggtcctatgggggccttcgtaagaaggtggagccacgtagggtggcggccggtcccagcggcgtcgtggggcggtcccggcagaacctctcagcagcaggtgagcctcgtagcttgggggcccgggccgccgacctccccagggccccgcccacgccgaccctgggtcgctctgcggctgcgcggatggacggggcgctcgccccacaggcgccaggcgctccggccgcaagggagcagggagccctgccagctgggccacccgaggggcgttgcggggctccgggcggggtcgacccggggggctccgtcgggccccaccagccttgcgcctttttcgctcggtctccttggcctcccgctcctgcgacgccgctttccttttctcttgctcccgagctcggacctcggccaggggccccgcccgccagttggtcgcctcctgcagcaccctggaggcccagggccggcggggcggcggctgtggggatcccgggcgcggcccacacgtgcggttctggaacccgcgagcccagtggctggcctggaagtccatgggctgtcgagaaggggcgcggcgactataatgacaggaaatagtcttcacttctatcaccaatagcttggacttctgcacccagaggcagctgccagactcctcatcctggagctcccgggggctgtcaggcccctcggagaacagtgggccatccagcat

SEQ ID NO: 132282 - DNA, 1422 bp, Homo sapiens
atggcaaaccatcgaggcggttccggcaattttgcagaagaccgcgaaagagcatcagaagcagctcgtcaaaaagccatcaccgccggttacccggtggttgatactgatgaaaaatcgccgccgtatttttcggttctccctgcccgggatccttccttgttccggcaggtcaggtgctttcactccgcctcaaccgccgtttctcggttccgcctccgagcccccccggttctctcttccagcgccggcccgtgtcatccgccacgcttcgggtgttttgcccgacaccatccacggcaccaccggaacatccacgacagaacccgaacccggccccgcagactgactcggcactcccgggggctgttcgaggatgacgtgcgcgttagtaccactgatcccgaacgacgacacccccacccgacgaacacgaccactcctgggccagggcgtgttctccgtaaggagttgaaccgtccccgccgaccaatccacctccggcgtcggcgattccacgtgcaacgtgcgtggcagctgcccgtgccgcatcgccatcaccatcttgatcacaccagccacacccgccgccgcttgcgtatgaccgatgttcgacttgaccgaccccaaccacaacggccggccaggatcacgatcacggccgtaggtggcgatcagcgcctgcgcctcgatcggatcaccaagccgcaatgggaaagagaagaacttgataaaaagcaaaaagaaaaggcatctttatggaaagagaagaaaaccagagtgggaaatctgggaaagggttacctaccttacggaagtgaactacactccccagagagaagccccaaaacatacaggttctctgaatcctcagagagattatttaatgggcatcatttgcaagacatcagtttctcaactccaaaaggagaaggtcagaattcaggaaatgttagaagtccagcctcccctaatgagttcgcatttggtagctacgtgccttcgtttgcaaaaacatcagagaggtcaaatccatttagtcaaaaaagtagttttttggatttccaaagaaacagtatggaaaaacttagtaaagatggtgtagatttaattacaagaaaagagaaaaaagctaatttgatggaacagttatttggtgccagtggtagcagcaccatttcctccaaaagcagtgacccaaattctgtggcttccagtaaaggagacattgaccctctaaattttctccctgggaataaaggcagcagagatcaagaacatgatgaagatgaagactttttcctcagtgaaggaagaagttttaatccaaataggcaccgattaaaacatgcagacgataaaccagcagtaaaagcagctgattctgtagaagatgaaattgaagaagtagcactgagatga

SEQ ID NO: 132283 - DNA, 1891 bp, Homo sapiens
atcctgctttcagagaacttaaggaaagatgtagaagctgtaactggcagtcctgctagtcagacatccatttgtattggaattttacttagaagtgcagaactggctcttttgctccatccagtggatcaagcaaatactcttaagtctcctgtttctgaaagtgtgagcccagtggtacctgattatttgcctacagaaaatggggattttttgtcttcaaaaagaaaacaaattagtagggatataaatagaattagaagtgtaactgttaatcatatgtcagacaacagatctatgagtgttgaccttagccatatccctttaaaggatcctttgctttttaaatcagctagtgatacaaatctgcaaaaaggcatttcttttatggactatttatcagataaacatttagggaaaataagtgaagatgaaagtagtggacttgtttacaaaagtggctcaggagaaattggatcagaaacaagtgacaaaaaggattcattttatacagattcaagtagtatcttaaactacagagaagattcgaatatactttcatttgatagtgatggtaatcaaaacatactttcaagtactttaactagtaaaggaaatgaaaccatagagtccatctttaaagctgaagatttgcttccagaagcagcttcactctctgaaaacctggatatcagtaaagaagagacccccccagttagaacacttaaatcacagtcatctttaagtggaaagcctaaggaacgttgcccacccaacctggctcctctctgtgtttcttataagaatatgaaaagaagctcttcacaaatgtcattggataccatttcacttgacagcatgatattggaagaacagttattagaaagtgatggaagtgatagccatatgtttttggaaaaaggaaataaaaagaacttaactacaaattacaggggcacagcagaaagtgtgaatgctggtgcaaacctacagaattatggtgaaacttctccagatgccatcagtacaaattcagagggtgctcaggaaaatcatgatgacctgatgtccgttgtggtatttaaaattactggtgttaatggggaaattgacatccgaggggaagatacagaaatctgtcttcaagtgaaccaggtgacaccagaccaattaggcaatatcagccttcggcattacctttgtaatcgtccagttggttccgatcagaaagctgtaattcattccaaatcctctcctgagatttctctgagatttgaaagtgggcctggtgctgtaatacactctttacttgcagaaaaaaaatggatttctgcagtgccacatagaaaacttcagcactgagtttcttacatcttctcttatgaatattcaacattttttggaagatgaaactgttgcaacagtaatgccaatgaagatacaagtttctaacacgaaaataaatttaaaagatgatagtccccggagtagtacagtatcccttgaaccagctcctgtaactgtacatattgatcatcttgtggtagagagaagtgacgatggctcttttcatatcagagattctcacatgcttaacactggaaatgatttgaaagaaaatgtcaaaagcgattcagtgctgctgaccagtggaaagtatgatctgaagaaacaacgcagtgtcacgcaagccactcagacaagcccaggggttccttggccttctcagtcagctaactttcctgagttctcctttgacttcactagggaacagctcatggaagagaatgaatctcttaaacaggaactggctaaagctaaaatggctcttgcagaggctcacttggaaaaagatgctcttcttcatcatataaagaagatgacagttgaa

SEQ ID NO: 132284 - DNA, 1800 bp, Homo sapiens
atgtgcgaactcgatattttacacgactctctttaccaattctgccccgaattacacttaaaacgactcaacagcttaacgttggcttgccacgcattacttgactgtaaaactctcactcttaccgaacttggccgtaacctgccaaccaaagcgagaacaaaacataacatcaaacgaatcgaccgattgttaggtaatcgtcacctccacaaagagcgactcgctgtataccgttggcatgctagctttatctgttcgggcaatacgatgcccattgtacttgttgactggtctgatatccgtgagcaaaaacggcttatggtattgcgagcttcagtcgcactacacggacgttctgttactctttatgagaaagcgttcccgctttcagagcaatgttcaaagaaagctcatgaccaatttctagccgaccttgcgagcattctaccgagtaacaccacaccgctcattgtcagtgatgctggctttaaagtgccatggtataaatccgttgagaagctgggttggtactggttaagtcgagtgggttggcggcgtcatgctcagaacaaagttggagcagctcgttcatcagaaacccggtaccggcacgtaggcaaccagaacgcctttaccgtgggcagtaatctgggccggtcattgcatttgaaaaaacactcgcgctgcgacgcttttgaagattcttgtgaaatgctgttcatgggggccctcttcagacatataaaggtttttgctgggggggctgcagtagttcataatgggacgggcacgcggcttggtgatccgatcgaggcgcaggcgctgatcgccacctacggccgtgatcgtgatcctggccggccgttgtggttggggtcggtcaagtcgaacatcggtcatacgcaagcggcggcgggtgtggctggtgtgatcaagatggtgatggcgatgcggcacgggcagctgccacgcacgttgcacgtggaatcgccgtcgccggaggtggattggtcggcggggacggttcaactccttacggagaacacgccctggcccaggagtggtcgtgttcgtcgggtgggggtgtcgtcgttcgggatcagtggtactaacgcgcacgtcatcctcgaacagcccccgggagtgccgagtcagtctgcggggccgggttcgggttctgtcgtggatgttccggtggtgccgtggatggtgtcgggcaaaacacccgaagcgctatccgcgcaggcaacggcgttgatgacctatctggacgagcgacctgatgtctcctcgctggatgttgggtactcgctggcgttgacacggtcggcgctggatgagcgagcggtggtgctggggtcggaccgtgaaacgttgttgtgcggtgtgaaagcgctgtctgccggtcatgaggcttctgggttggtgaccggatctgtgggggctgggggccgcatcgggtttgtgtttttccggtcagggtggtcagtgctggggatgggccgggggctttacccgggcttttcccgggggttggcttgctggccttttgaccaaaacctttgggcccgaagctcgggatgccccacttctgggggcccaggaaaaactccgggggttctggggcaaggtggtttgttcccggtttctggtatagccccaacctttgctctgggaatatcgggcaccgtttggtgtctggagatggctgaggagcccatgactttcctgtatgatcccttgaacgtaacttccaagtcagtagatttcttctcaggttttggaggtttctattaa

SEQ ID NO: 132285 - DNA, 1574 bp, Homo sapiens
  misc_feature (1)...(1574): n = a,t,c or g
acaggaagctacagacgtagaaaccaaggcagtgagtgaagtctgtctggtggcagaggaggaggaaggaggcagcccgaaagacgctgatgacacatcaatctacatgttttatcaaaaggtcggcgacaactcaatcgacagctggaaaaacgcgggccgtgtctttaaagacagcgataagttcgacgccaacgatccggggctgaaagatcagacgcaagaatggtccggttctgcaacctttacatctgacggaaaaatccgtttattctacactgactattccggtaaacattacggcaaacaaagcctgacaacagcgcaggaggctaggcagaaaatacttgacccaatcttggctaaatctctgattgggactctagaggatccccggccgctgcaaaacgctgacggaacagtagctgaatacaacggctatcacgttgtgtttgctcttgcgggaagcccgaaagacgctgatgacacatcaatctacatgttttatcaaaaggtcggcgacaactcaatcgacagctggaaaaacgcgggccgtgtctttaaagacagcgataagttcgacgccaacgatccgatcctgaaagatcagacgcaagaatggtccggttctgcaacctttacatctgacggaaaaatccgtttattctacactgactattccggtaaacattacggcaaacaaagcctgacaacagcgcaggtaaatgtgtcaaaatctgatgacacactcaaaatcaacggagtggaagatcacaaaacgatttttgacggagacggaaaaacatatcagaacgttcagcagtttatcgatgaaggcaattatacatccggcgacaaccatacgctgagagaccctcactacgttgaagacaaaggccataaataccttgtattcgaagccaacacgggaacagaaaacggataccaaggcgaagaatctttatttaacaaagcgtactacggcggcggcacgaacttcttccgtaaagaaagccagaagcttcagcagagcgctanaaaacgcgatgctgagttagcgaacggcgccctcggtatcatagagttaaatatgattaccattgaaaaagtatttattcgcgataagctcatggagcggcgtaaccgtcgcacaggaaggacagagaaagcgcggatctgggaagtgacggacagaacggtcaggacctggattgtcgaggcggatgccagccgctgctgctgacggtgtgacgttctctgttccggtcacaccacatacgttccgccattcctatgcgatgcacatgctgtatgccggtataccgctgaaagttctgcaaagcctgatgggacataagtccatcagttcaacggaagtctacacgaaggtttttgcgctggatgtggctgcccggcaccgggtgcagtttgcgatgccggagtctgatgcggttgcgatgctgaaacaattatcctgagaataaatgccttggcctttatatggaaatgtggaactgagtggatatgctgtttttgtctgttaaacagagaagctggctgttatccactgagaa

SEQ ID NO: 132286 - DNA, 1860 bp, Homo sapiens
atggcggaaacagcggttatcaatcacaagaaacgtaaaaatagcccgcgaatcgtccagtcaaacgacctcactgaggcggcatatagtctctcccgggatcaaaaacgtatgctgtatctgttcgatgaccagatcagaaaatctgatggcaccctacaggaacatgacggtatctgcgagatccatgttgctaaatatgctgaaatattcggattgacctctgcggaagccagtaaggatatacggcaggcattgaagagttacgcggcgaaggaagtggttctttatcgccctgaagaggatgccggcgatgaagaaggctatgaatcttttccttggtttatcaaacgtgcgcacagtccatccagagggctttacagtgtacatatcaacccatatctcattcccttctttatcgggttacagaaccggtttacgcagtttcggcttagtgaaacaaaagaaatcaccaatccgtatgccatgcgtttatacgaatccctgtgtcagtatcgtaagccggatggctcaggcatcgtctctctgaaaatcgactggatcatagagcgttaccagctgcctcaaagttaccagcgtatgcctgacttccgccgccgcttcctgcagtgcataaacgctggtcatgaaatgacgaaggctatcgccattgcacagtttaatgatgacagcccggaagcgaggaaaataacccggcgctggagaataggtgaagcagcggatttagttggggtttcttctcaggctatcagagatgccgagaaagcagggcgactaccgcacccggatatggaaattcgaggacgggttgagcaacgtgttggttatacaattgaacaaattaatcatatgcgtgatgtgtttggtacgcgattgcgacgtgctgaagacgtatttccaccggtgatcggggttgctgcccataaaggtggcgtttacaaaacctcagtttctgttcatcttgctcaggatctggctctgaaggggctacgtgttttgctcgtggaaggtaacgacccccagggaacagcctcaatgtatcacggatgggtaccagatcttcatattcatgcagaagacactctcctgcctttctatcttggggaaaaggacgatgtcacttatgcaataaagcccacttgctggccggggcttgacattattccttcctgtctggctctgcaccgtattgaaactgagttaatgggcaaatttgatgaaggtaaactgcccaccgatccacacctgatgctccgactggccattgaaactgttgctcatgactatgatgtcatagttattgacagcgcgcctaacctgggtatcggcacgattaatgtcgtatgtgctgctgatgtgctgattgttcccacgcctgctgagttgtttgactacacctccgcactgcagtttttcgatatgcttcgtgatctgctcaagaacgttgatcttaaagggttcgagcctgatgtatttattcgcgataagctcatggagcggcgtaaccgtcgcacaggaaggacagagaaagcgcggatctgggaagtgacggacagaacggtcaggacctggattggggaggcggttgccgccgctgctgctgacggtgtgacgttctctgttccggtcacaccacatacgttccgccattcctatgcgatgcacatgctgtatgccggtataccgctgaaagttctgcaaagcctgatgggacataagtccatcagttcaacggaagtctacacgaaggtttttgcgctggatgtggctgcccggcaccgggtgcagtttgcgatgccggagtctgatgcggttgcgatgctgaaacaattatcctga

SEQ ID NO: 132287 - DNA, 1068 bp, Homo sapiens
tcatctattagaatcaacaggacttaagactaatttcaggaactgtgactcagacctgccagtgtttgatgtcatgtaaaccagacttccaaggctcactttatgaacaactctgtaagtagttaggttgcggagatcacaaacacctagaagcctcatgaccggcagacagcgcttcacaccgcacaacaacgtttcacggtccgaccccagcaccaccgctcggtcatccagcgccgaccgtgtcaacgccagcgagtacccaacatccagcgaggagacatcaggtcgctcgtccagataggtcatcaacgccgttgcctgcgcggatagcgcttcgggtgttttgcccgacaccatccacggcaccaccggaacatccacgacagaacccgaacccggccccgcagactgactcggcactcccgggggctgttcgaggatgacgtgcgcgttagtaccactgatcccgaacgacgacacccccacccgacgaacacgaccactcctgggccagggcgtgttctccgtaaggagttgaaccgtccccgccgaccaatccacctccggcgacggcgattccacgtgcaacgtgcgtggcagctgcccgtgccgcatcgccatcaccatcttgatcacaccagccacacccgccgccgcttgcgtatgaccgatgttcgacttgaccgaccccaaccacaacggccggccaggatcacgatcacggccgtaggtggcgatcagcgccatggccatgcaggcccgtgggctcaagagggtggaatagcgtaggggctggcagatggcaacatatcggtcataggccatggccgtgagcaggcagcactccgagatgcccaggacaatgaagacgtacatctgggctgcacagccctggaaagagatggcctggggatgcggggagcccagattggccagggtcctgggcacgatgtcagtggtgtagaagagctccaccactgagagttggcgcaggaagaagtacatgggggagtgcagggcagggctgaccgtcagggcaacggtaaggctgtgaaccaccgtcat

SEQ ID NO: 132288 - DNA, 2537 bp, Homo sapiens
cagacttcgaagaaaagttgactcgggtcctcagttgacccaaagtatctatgataccatgatctcatggctgatggaactattcagtgctgctgaaacagacctctctgaggagccctggatcctccactctgggttcatcaatggggacgggcacgcggcttggtgatccgatcgaggcgcaggcgctgatcgccacctacggccgtgatcgtgatcctggccggccgttgtggttggggtcggtcaagtcgaacatcggtcatacgcaagcggcggcgggtgtggctggtgtgatcaagatggtgatggcgatgcggcacgggcagctgccacgcacgttgcacgtggaatcgccgtcgccggaggtggattggtcggcggggacggttcaactccttacggagaacacgccctggcccaggagtggtcgtgttcgtcgggtgggggtgtcgtcgttcgggatcagtggtactaacgcgcacgtcatcctcgaacagcccccgggagtgccgagtcagtctgcggggccgggttcgggttctgtcgtggatgttccggtggtgccgtggatggtgtcgggcaaaacacccgaagcgctatccgcgcaggcaacggcgttgatgacctatctggacgagcgacctgatgtctcctcgctggatgttgggtactcgctggcgttgacacggtcggcgctggatgagcgagcggtggtgctggggtcggacgtgaaacgttgttgtgcgatccctaaacagcagcaaaacgaaaaataccaagtgcctcaattcgatcaatcaacgattaaaaatattgagtctgcaaaaggactcgatgtgtgggacagctggccgctgcaaaacgctgacggaacagtagctgaatacaacggctatcacgttgtgtttgctcttgcgggaagcccgaaagacgctgatgacacatcaatctacatgttttatcaaaaggtcggcgacaactcaatcgacagctggaaaaacgcgggccgtgtctttaaagacagcgataagttcgacgccaacgatccgatcctgaaagatcagacgcaagaatggtccggttctgcaacctttacatctgacggaaaaatccgtttattctacactgactattccggtaaacattacggcaaacaaagcctgacaacagcgcaggtaaatgtgtcaaaatctgatgacacactcaaaatcaacggagtggaagatcacaaaacgatttttgacggagacggaaaaacatatcagaacgttcatttttttatcgatgaaggcaattatacatccggcgacaaccatacgctgagagaccctcactacgttgaagacaaaggccataaataccttgtattcgaagccaacacgggaacagaaaacggataccaaggcgaagaatctttatttaacaaagcgtactacggcggcggcacgaacttcttccgtaaagaaagccagaagcttcagcagagcgctaaaaaacgcgatgctgagttagcgaacggcgccctcggtatcatagagttaaataatgattacacattgaaaaaagtaatgaagccgctgatcacttcaaacacggtaactgatgaaatcgagcgcgcgaatgttttcaaaatgaacggcaaatggtacttgttcactgattcacgcggttcaaaaatgacgatcgatggtattaactcaaacgatatttacatgcttggttatgtatcaaactctttaaccggcccttacaagccgctgaacaaaacagggcttgtgctgcaaatgggtcttgatccaaacgatgtgacattcacttactctcacttcgcagtgccgcaagccaaaggcaacaatgtggttatcacaagctacatgacaaacagaggcttcttcgaggataaaaaggcaacatttgcgccaagcttcttaatgaacatcaaaggcaataaaacatccgttgtcaaaaacagcatcctggagcaaggacagctgacatggctccaagtagcgaagcgagcaggactgggcggcggccaaagcggtcggacagtgctccgagaacgggtgcgcatagaaattgcatcaacgcatatagcgctagcagcacgccatagtgactggcgatgctgtcggaatggacgatatcccgcaagaggcccggcagtatttattcgcgataagctcatggagcggcgtaaccgtcgcacaggaaggacagagaaagcgcggatctgggaagtgacggacagaacggtcaggacctggattggggaggcggttgccgccgctgctgctgacggtgtgacgttctctgttccggtcacaccacatacgttccgccattcctatgcgatgcacatgctgtatgccggtataccgctgaaagttctgcaaagcctgatgggacataagtccatcagttcaacggaagtctacacgaaggtttttgcgctggatgtggctgcccggcaccgggtgcagtttgcgatgccggagtctgatgcggttgcgatgctgaaacaattatcctga

SEQ ID NO: 132289 - DNA, 873 bp, Homo sapiens; identical to SEQ ID NO: 119114

SEQ ID NO: 132290 - DNA, 2071 bp, Homo sapiens
  misc_feature (1)...(2071): n = a,t,c or g
tcagtcagtagagatggaccactgtggtggagggcccggggctgctgagagaaaggcaggatacatctgtagaactgcccatggcaggttcatgttccagggctcccatctgggtacctgagcattttccatatagatcacaggtgttggggcccacatcggctcctgaaagtctccgggaatgccataggcgtggggctggtgctcgggaggtgcaaggtcagccacatcagcacagggaggacctgagaagacgctgatcttccatctgtatcccagaatcctgtgcagggcctctccataaggacattgcaaggggtggcaccttggcctctggttggcctcatgaatagtgaagtataagtcctgcaagcttatcagcatctggagacattcctgccagctcttctttatacctctgtgcttgagatgcggggcaactgcttttgatactgtgtgatacttcttcaccccgtacacttcacgctcaagaaattcccattcttgcaggaaactctggacttcctggctactccatggtttaattaactggactgagggcttttctggtccctggactgctttttttccctttggggaacccccgtataatccaaaatttaagaaaggccccttgcaagggacaacggatgtgggccccacaatgtcgttatcaaaaaatggggatttcgacggganccctttttcggaaccgatttttttccttgggccagatggtgcatccagcttcggcacaagttttggtccaagggcaagcagcggaccacgaaaaaagccccggtaaagcccccgggcccatccccagccattgaccacccttgaccgggaaaacacaaacccgatgcggccccaagcccccacagatccggtcaccaacccaaaacctccatgaccggcagacagcgctttcacaccgcacaacaaccgtttcacggtccgaccccagcaccaccgctcgctcatccagcgccgaccgtgtcaacgccagcgagtacccaacatccagcgaggagacatcaggtcgctcgtccagataggtcatcaacgccgttgcctgcgcggatagcgcttcgggtgttttgcccgacaccatccacggcaccaccggaacatccacgacagaacccgaacccggccccgcagactgactcggcactcccgggggctgttcgaggatgacgtgcgcgttagtaccactgatcccgaacgacgacacccccacccgacgaacacgaccactcctgggccagggcgtgttctccgtaaggagttgaaccgtccccgccgaccaatccacctccggcgacggcgattccacgtgcaacgtgcgtggcagctgcccgtgccgcatcgccatcaccatcttgatcacaccagccacacccgccgccgcttgcgtatgaccgatgttcgacttgaccgaccccaaccacaacggccggccaggatcacgatcacggccgtaggtggcgatcagcgcctgcgcctcggtcggcgttccaccctgtggtctgccaggtgacagcttgccccagcccctgctggagctcatgaggcccccgtggggaccctttcttccccagcacctatggtccgactcctctgaaggttcctcttcctgctcctggcccttgcctctccatggcggcttcacagattccaggcccacattgagaactctttctgtggccagctcctgtttgataaaccaaggaaaagattcatagcctttttcatcgccggcatcctcttcagggcgataaaaaaccacttccttccccgcgaaactcttcaatgcctgccgtatatccttactggcttccgcagaggtcaatccgaatatttcagcatatttagcaacatggatctcgcagataccgtcatgttcctgtagggtgccatcagattttctgatctggtcaacgaacagatacagcatacgtttttgatcccgggagagactatatgccgcctcagtgaggtcgtttgactggacgattcgcgggctatttttacgtttcaagagattgataaccgctgtttccgccat

SEQ ID NO: 132291 - DNA, 4274 bp, Homo sapiens
atgagtgaactcccattcacaattgcttccaagagaataaaatacctaggaatccaacttacaagggatgtgaaggacctcttcaaggagaactacaaaccactgctcaaggaaataaaagaggatacaaacaaatggaagaacattccatgctcatgggtaggaagaatcaatatcgtgaaaatggccatactgcccaaggtaatttacagattcaatgccatccccataaagctaccaatgactttcttcacagaattggaaaaaactactttaaagttcatatggaaccaaaaaagagcctgcatcgccaaggcaatcctaagccaaaagaacaaagctggaggcatcacactacctgacttcaaactgtactacaaggctacagtaacgaaaacagcatgtttgttaaacagaagggctctccccctggcaaaccggggaagaaaaaaccctgtttttggggggcccccaaaaacggtgccgatatccccagccaaagttggcggccatccggaaacccgggaacaaccccccctctcccgaaaccccccagttttttccctggggcccccagaatggggcaatcccaagcttggggccacaaaggcttttggttcaaaaagggcaagccaaccgaaccccccggaaaaaaggcccgggttaaaaagccccccgggggccaatcccccaaggccattggacccacccgtggcccgggaaaaccaccaaaacccgatatgcgggcccccaagccccccacagattccggtcaccaaacccagaagccctcatgaccggcagacagcgctttcacaccgcacatcaacgtttcacggtccgaccccagaaccaccgctcgctcatccagcgccgaccgtgtcaacgccagcgagtacccaacatccagcgaggagacatcaggtcgctcgtccagataggtcatcaacgccgttgcctgcgcggatagcgcttcgggtgttttgcccgacaccatccacggcaccaccggaacatccacgacagaacccgaacccggcgccgcagactgactcggcactcccgggggctgatgacgtgcgcgttagtaccactgatcccgaacgacgacacccccacccgacgaacacgaccactcctgggccagggcgtgttctccgtaaggagttgaaccgtccccgccgaccaatccacctccggcgacggcgattccacgtgcaacgtgcgtggcagctgcccgtgccgcatcgccatcaccatcttgatcacaccagccacacccgccgccgcttgcgtatgaccgatgttcgacttgaccgaccccaaccacaacggccggccaggatcacgatcacggccgtaggtggcgatcagcgcctgcgcctcgatcggatcaccaagccgccgaagcgagcaggactgggcggcggccaaagcggtcggacagtgctccgagaacgggtgcgcatagaaattgcatcaacgcatatagcgctagcagcacgccatagtgactggcgatgctgtcggaatggacgatatcccgcaagaggcccggcagtaccggcataaccaagcctatgcctacagcatccagggtgacggtgccgaggatgacgatgagcgcattgttagatttcatacacggtgcctgattttgggctccgttgaagagagctcggtcttttggggtgtcaccaacttcaattatcttggcgccagccaagagttgcattataaggccagacgtgacaataggagagatccctagctccatcaatgtgcctctgttagaggctagaatcactctcatccaatagaaagggtcagctgaatctgaagacatgatcccaaacaggggaatctggcagcacactaagaagataaagagggtgatagcggtccacagcactttctccttaaactgaatttgccatggcggcggctgctcgggctccgggtcccgcttcagctcagctctgctccgcgtgaggcgacgctgcccgcggcccagcgcgttccactgcacagcagctccgccgagagacacgtcagtgcgagcaccctcgctgtctgagtcattaagcaaacccggaggcttgtcgtgggtgtgggtccccttccatctgagaacgaatgggatgagtttctggagagacttggccggagaagggccggggcagctcgggaagtagtctgcctcacagaagaattcaggaaggcctcctgggagagtacctttgtgccgagccttgatagattctcggccagtgttgacagtagtggggctgaatgccttccatacgatggtttcacagatgttagttgcaatgaagagagaaataccagagccaaggccatatcctttttgcaggagttcatccaaaagtaggacaattaagccagcaacaaagagctgaatggtgattagcaggcaaattccagcacccatttcagaagggtccccatacatcccggtcatcacatacacgatagactggccgatagtaatgatcatgccaaataccagctcggccaaagcttcgtcaaaggcaccagggaacaccggaaaagcccggtaaagccccgggcccatccccagccattgaccaccttgaccggaaaacacaaactcgtatcggaccgccagactcccacagaaccgggtcaacaacccagtaagctcaatgaccggcagaacagcgcttatcacaccgcacactaacgtttcacggtccgaccacagcaccaccgctcgctcatccagcgccgacccgtgtcaacgccagcgagtacccaacatccagcgaggagacatcaggtcgctcgtccagataggtcatcaacgccgttgcctgcgcggatagcgcttcgggtgttttgcccgacaccatccacggcaccaccggaacatccacgacagaacccgaacccggccccgcagactgactcggcactcccgggggctgttcgaggatgacgtgcgcgttagtaccactgatcccgaacgacgacacccccacccgacgaacacgaccactcctgggccagggcgtgttctccgtaaggagttgaaccgtccccgccgaccaatccacctccggcgacggcgattccacgtgcaacgtgcgtggcagctgcccgtgccgcatcgccatcaccatcttgatcacaccagccacacccgccgccgcttgcgtatgaccgatgttcgacttgaccgaccccaaccacaacggccggccaggatcacgatcacggccgtaggtggcgatcagcgcctgcgcctcgatcggatcaccaagccgcgtgcccgtcccattgataacgcagatgccgttggcgtacatgaagttcacgccgtctggcctggtagccgcatgcgcaccatggcttcggcagcggcgggtagtaacagctgggtacaggtgaaaacacaccgcaccattggcgatgccgtcgctcatctcaaaggccagggcatgcagattctggcaacccatctttctgataacgctgtcgatttccgcgaaattgattacactcgcccgacctgcattttgatgggacaggagaaaacgggcatcacgcaggaagcattggccctgcgtgaaaacagcatgttgccggaagcagagcaacaacgcctgttgtttgaaggcggctatccggtgctggcgaaagtcgcaaaacgcaaaggcctgccttatccccacgtcaatcagcaaggcgagatcgaagctgatgccgactgatgggctactatgcaggtgacgtatcatttggtccgcccgaaacaggttggccagcgtgaataacatcgccagttggttatcgtttttcagcaaccccttgtatctggctttcacgaagccgaactgtcgcttgatgatgcgaaatgggtgctccaccctggcccggatgctggctttcatgtattcgatgttgatggccgttttgttcttgcgtggatgctgtttcaaggttcttaccttgccggggcgctcggcgatcagccagtccacatccacctcggccagctcctcgcgctgtggcgccccttggtagccggcatcggctgagacaaattgctcctctccatgcagcagattacccagctgattgaggtcatgctcgttggccgcggtggtgaccaggctgtgggtcaggccactcttggcatcgacaccaatgtgggccttcatgccaaagtgccactgattgcctttcttggtctgatgcatctccggatcgggtttctgctctttgttcat

SEQ ID NO: 132292 - DNA, 1776 bp, Homo sapiens
tcaggataattgtttcagcatcgcaaccgcatcagactccggcatcgcaaactgcacccggtgccgggcagccacatccagcgcaaaaaccttcgtgtagacttccgttgaactgatggacttatgtcccatcaggctttgcagaactttcagcggtataccggcatacagcatgtgcatcgcataggaatggcggaacgtatgtggtgtgaccggaacagagaacgtcacaccgtcagcagcagcggcggcaaccgcctccccaatccaggtcctgaccgttctgtccgtcacttcccagatccgcgctttctctgtccttcctgtgcgacggttacgccgctccatgagcttatcgcgaataaatacctgtgacggaagatcacttcgcagaataaataaatcctggtgtccctgttgataccgggaagccctgggccaacttttggcgaaaatgagacgttgatcggcacgtaagaggttccaactttcaccataatgaaataagatcaattcctgggcatcctgtcctactgatgaatttctcactgggagagcaccagataatggcattgcaggaacaggggtgaaacctgcaccaacacgcctttcctgtgccttctccagcttacaaccctgctctgggtaaataccactgccccagatcattttcttttccactgaaagaatcttatcttggtgacccaggaaatccagggcttgcagccagatacggtgctgtgggtgtggtgcctccgcttggccaaacagccgcatataacaacacagaattagaagtggagtcagggcaatgcgtctcactcgccactcttttatctctggagacaggttgctattaatcactccgaccacatctatcaggcttctatcaggctcgaaccctttaagatcaacgttcttgagcagatcacgaagcatatcgaaaaactgcagtgcggaggtgtagtcaaacaactcagcaggcgtgggaacaatcagcacatcagcagcacatacgacattaatcgtgccgatacccaggttaggcgcgctgtcaataactatgacatcatagtcatgagcaacagtttcaatggccagtcggagcatcaggtgtggatcggtgggcagtttaccttcatcaaatttgcccattaactcagtttcaatacggtgcagagccagacaggaaggaataatgtcaagccccggccagcaagtgggctttattgcataagtgacatcgtccttttccccaagatagaaaggcaggagagtgtcttctgcatgaatatgaagatctggtacccatccgtgatacattgaggctgttccctgggggtcgttaccttccacgagcaaaacacgtagccccttcagagccagatcctgagcaagatgaacagaaactgaggttttgtaaacgccacctttatgggcagcaaccccgatcaccggtggaaatacgtcttcagcacgtcgcaatcgcgtaccaaacacatcacgcatatgattaatttgttcaattgtataaccaacacgttgctcaacccgtcctcgaatttccatatccgggtgcggtagtcgccctgctttctcggcatctctgatagcctgagaagaaaccccaactaaatccgctgcttcacctattctccagcgccgggttattttcctcgcttccgggctgtcatcattaaactgtgcaatggcgatagccttcgtcatttcatgaccagcgtttatgcactggttaagtgtttccatgagtttcat

SEQ ID NO: 132293 - DNA, 2337 bp, Homo sapiens
ttaccaatggtagctttcccgaaccaaccctttcccattaagggccaggcatttattctcagaataatgtttcagcatcgcaaccgcatcagactccggcatcgcaaactgcacccggtgccgggcagccacatccagcgcaaaaaccttcgtgtagacttccgttgaactgatggacttatgtcccatcaggctttgcagaactttcagcggtataccggcatacagcatgtgcatcgcataggaatggcggaacgtatgtggtgtgaccggaacagagaacgtcacaccgtcagcagcagcggcggcaaccgcctccccaatccaggtcctgaccgttctgtccgtcacttcccagatccgcgctttctctgtccttcctgtgcgacggttacgccgctccatgagcttatcgcgaataaataccaggtcatcatgattttcctgagcaccctctgaatttgtactgatggcatctggagaagtttcaccataattctgtaggtttgcaccagcattcacactttctgctgtgcccctgtaatttgtagttgagttctttttatttcttggaaaatcctttccatctggatagtaatattctgtgaattctatatagacagctgacatttcttgtggaagatatagggattttttattgcagcaaatcatgcttttgggggaagaacgacattgttccgctgtagagactagtgggtagatccacaggacgggtgtggtcgccatgatcgcgtagtcgatagtggctccaagtagcgaagcgagcaggactgggcggcggccaaagcggtcggacagtgctccgagaacgggtgcgcatagaaattgcatcaacgcatatagcgctagcagcacgccatagtgactggcgatgctgtcggaatggacgatatcccgcaagaggcccggcagtaccggcataaccaagcctatgcctacagcatccagggtgacggtgccgaggatgacgatgagcgcattgttagatttcatacacggtgcctgactagcaacaggatcttgggtttcagtaaccttctcaaatgctcttcttaggctctggtggactttttctggttctatttccttccttccttccttccttccttccctccttccctccttcccaccttccttccttctcattgaaggtgggaaaaaaattggcggcttggtgatccgatcgaggcgcaggcgctgatcgccacctacggccgtgatcgtgatcctggccggccgttgtggttggggtcggtcaagtcgaacatcggtcatacgcaagcggcggcgggtgtggctggtgtgatcaagatggtgatggcgatgcggcacgggcagctgccacgcacgttgcacgtggaatcgccgtcgccggaggtggattggtcggcggggacggttcaactccttacggagaacacgccctggcccaggagtggtcgtgttcgtcgggtgggggtgtcgtcgttcgggatcagtggtactaacgcgcacgtcatcctcgaacagcccccgggagtgccgagtcagtctgcggggccgggttcgggttctgtcgtggatgttccggtggtgccgtggatggtgtcgggcaaaacacccgaagcgctatccgcgcaggcaacggcgttgatgacctatctggacgagcgacctgatgtctcctcgctggatgttgggtactcgctggcgttgacacggtcggcgctggatgagcgagcggtggtgcttgggtcggaccgtgaaacgttgttgtgcgacgtactaacgctgggtaccgggacaaactgcgaaccgccacaatggttgtggcaacggcaaggagatacaaatgaagcaatggatagccgcactactgttgatgctgatacccggcgtacaggcggcaaagccgcaaaaagtgacgctgatgctcaggtgttgcaggcgctggctgaacaggagaagttgaacctggtcgtgtcgccagacgtcagcggtacggtgtcgttacatctaacagatgttccctggaagcaggcactacaaactgtagtgaaaagcgccggactgataacgcggcaggaaggcaacattctctcagtgcattccattgcctggcagaataacaatatcgcccgccaggaggcggagcaggcgcgggcgcaggcaaatctgccgctggaaaatcgcagtataaccctgcaatacgccgacgcgggagaactggcgaaagcgggggagaagctactgagtgccaaagggagtatgaccgtcgataaacgcaccaatcgccttttgctacgagataacaaaacgggcgttaagcgcgcttga

SEQ ID NO: 132294 - DNA, 3799 bp, Homo sapiens
  misc_feature (1)...(3799): n = a,t,c or g
tcattgtttggttcgcttctccagggaataccagccagcttctctgtttaccagacaaaacnagcatatccactcagttccacatttcaaataaagggccaaggcatttatctcaggataatgtttcagcatcgcaaccgcatcagactccggcatcgcaaactgcacccggtgccgggcagccacatccagcgcaaaaaccttcgtgtagacttccgttgaactgatggacttatgtcccatcaggctttgcagaactttcagcggtataccggcatacagcatgtgcatcgcataggaatggcggaacgtatgtggtgtgaccggaacagagaacgtcacaccgtcagcagcagcggcggcaaccgcctccccaatccaggtcctgaccgttctgtccgtcacttcccagatccgcgctttctctgtccttcctgtgcgacggttacgccgctccatgagcttatcgcgaataaatacctgtgacggaagatcacttcgcagaataaataaatcctggtgtccctgttgataccgggaagccctgggccaacttttggcgaaaatgagacgttgatcggcacgtaagaggttccaactttcaccataatgaaataagatcacttcagggcatggtaaccgattagattttggagatgaaggagagacactaccaaaggactctctcagatgacaagtatggataacggggtcatgagctaagattgtgtcaacaggaggtaaaacttttttaatggagaagatgataaatttcattctaaacgtgaagttctgggtgcctttgggacagccagcatgagccagaaaatgctgcaggaagcggcggcggaagtcaggcatacgctggtaactttgaggcagctggtaacgctctatgatccagtcgattttcagagagacgatgcctgagccatccggcttacgatactgacacagggattcgtataaacgcatggcatacggattggtgatttcttttgtttcactaagccgaaactgcgtaaaccggttctgtaacccgataaagaagggaatgagatatgggttgatatgtacactgtaaagccctctggatggactgtgcgcacgtttgataaaccaaggaaaagattcatagcctttttcatcgccggcatcctcttcagggcgataaaaaaccacttccttccccgcgaaactcttcaatgcctgccgtatatccttactggcttccgcagaggtcaatccgaatatttcagcatatttagcaacatggatctcgcagataccgtcatgttcctgtagggtgccatcagattttctgatctggtcaacgaacagatacagcatacgtttttgatcccgggagagactatatgccgcctcagtgaggtcgtttgactggacgattcgcgggctatttttacgtttcttgtgattgataaccgctgtttccgccatgacagatccatgtgaagtgtgacaagtttttagattgtcacactctgctttccttcctactgtcttcactgtgaggcaggccctctccatgtgggcatccctggctctggctgtgctaggttcttggaagtcctggctgaactcagagaactggttcttgggccatgccgggggtgcaggcaagtaagcctgcatgtgggtgaaaggtagccccagcagcaaggcgtgtgccacaccccctccatatgttgcctcattctggccactccgcagcctctggtggtgcctcatgcccactttgcagaggatgagccacaggttctgatcaggtgctaaagcatgcgttccggaaaggccgatccagcaactgcgcatcgaacgggactccccccccgaacgccgatttcctgggccaggatgtgcatccagctcggcacaagcttcgtcaaaagtcagcaagcgaaccccgaaaaaaagcccggtaaagccccccgggcccatccccagcccattgaccaccctgaccggaaaacacaaaacccgatgcggccccccagccccccacagtatccggtcaccaaacccagaagcctcatgaccggccagacagccgctttcaccacggcacaacaaacgtttcacggtccgaccccagcaccaccgctcgctcatccagcgccgaccgtgtcaacgccagcgaggtacccaacatccagcgaggagacatcaggtcgctcgtccagataggtcatcaacgccgttgcctgcgcggatagcgcttcgggtgttttgcccgacaccatccacggcaccaccggaacatccacgacagaacccgaacccggccccgcagactgactcggcactcccgggggctgttcgaggatgacgtgcgcgttagtaccactgatcccgaacgacgacacccccacccgacgaacacgaccactcctgggccagggcgtgttctccgtaaggagttgaaccgtccccgccgaccaatccacctccggcgacggcgattccacgtgcaacgtgcgtggcagctgcccgtgccgcatcgccatcaccatcttgatcacaccagccacacccgccgccgcttgcgtatgaccgatgttcgacttgaccgaccccaaccacaacggccggccaggatcacgatcacggccgtaggtggcgatcagcgcctgcgcctcgatcggatcacctaagccgcgtgcccgtcccaattgatgaacttactttgcattcttgacattctgtgcagctccatgtcatcactgccccgaaatcctttggcaaagggattattctcaatctttaattgcgtgatcatttgtcttgcggtcggggcctggataactggcgcgccatcaacaggccgctgggagcgaacagagctctgcccggagggcaccaggagcctcgggttcgccaggctacaacctttcctcttggtacaatggtaaatctggctatgctcctggggcagtgggtatgggttggttggaggcaggaggtcctgggaggggccggaaacaccattctcacactggtattggacccccaaattggatgaggtggagagagctcgagactcgctgctgaaaggactgtggttggaggccactttttgcctcacggtgctcctggggaccacgggatattctttacattcttcatcctggttcagtagcctagaagctgacattgtgtagataccacaaatgggccccacgcccactaggtcctggtgggtaaggccaataggaagctccacggaatagtcagtgtataataaacggatttttccgtcagatgtaaaggttgcagaaccggaccattcttgcgtctgatctttcaggatcggatcgttggcgtcgaacttatcgctgtctttaaagacacggcccgcgtttttccagctgtcgattgagttgtcgccgacctttgtataatacatgtagattgatgtgtcatcagcgtctttcgggcttcccgcaagagcaaacacaacgtgatagccgttgtattcagctactgttccgtcagcgttttgcagcggccagctgtcccacacatcaagtccttttgcagactcaatatttttaatcgttgattgatcgaattgaggcacttggtatttttcgttttgctgctgtttagggatctgcagcatatcatggcgtgtaatatgagagacgccgtacgtttctttgtatgctttttggttattttctttcgcgaaggcttgagtcgctcctcctgccagaagtgcagtcgtaaaagtcagaactgtggcttgttttacaatttttttgatgttcatgttcat

SEQ ID NO: 132295 - DNA, 2495 bp, Homo sapiens
atgaacatgaacatcaaaaaaattgtaaaacaagccacagttctgacttttacgactgcacttctggcaggaggagcgactcaagccttcgcgaaagagaatgaccaaaaagcatacaaagaaacgtacggcgtctctcatattacacgccatgatatgctgcagatccctaaacagcagcaaaacgagaaataccaaaggtccccaggccgccggcaggagcagctgggccaattccctggccgggagcggaaggggatggcgtcgggcctgggctccccgtccccctgctcggcgggcagtgaggaggaggatatggatgcacttttgaacaacagcctgcccccaccccacccagaaaatgaagaggacccagaagaggatttgtcagaaacagagactccaaagctcaagaagaagaaaaagcctaagaaacctcgggaccctaaaatccctaagagcaagcgccaaaaaaaggagcgtatgctcttatgccggcagctgggggacagctctggggaggggccagagtttgtggaggaggaggaagaggtggctctgcgctcagacagtgagggcagcgactatactcctggcaagaagaagaagaagaagcttggacctaagaaagagaagaagagcaaatccaagcggaaggaggaggaggaggaggatgatgatgatgatgattcaaaggagcctaaatcatctgctcagctcctggaagactggggcatggaagacattgaccacgtgttctcagaggaggattatcgaaccctcaccaactacaaggccttcagccagtttgtcagacccctcattgctgccaaaaatcccaagattgctgtctccaagatgatgatggttttgggtgcaaaatggcgggagttcagtaccaataaccccttcaaaggcagttctggggcatcagtggcagctgcggcagcagcagcggtagctgtggtggagagcatggtgacagccactgaggttgcaccaccacctccccctgtggaggtgcctatccgcaaggccaagaccaaggagggcaaaggtcccaatgctcggaggaagcccaagggcagccctcgtgtacctgatgccaagaagcctaaacccaagaaagtagctcccctgaaaatcaagctgggaggttttggttccaagcgtaagagatcctcgagtgaggatgatgacttagatgtggaatctgacttcgatgatgccagtatcaatagctattctgtttctgatggttccaccagccgtagtagccgcagccgcaagaaactccgaaccactaaaaagaaaaagaaaggcgaggaggaggtgactgctgtggatggttatgagacagaccaccaggactattgcgaggtgtgccagcaaggcggtgagatcatcctgtgtgatacctgtccccgtgcttaccacatggtctgcctggatcccgacatggagaaggctcccgagggcaagtggagctgcccacactgcgtgagtgtctggccattgtggccccttggaacccatgagaagaagggtgggacagtaaagctcttcggggcctggatggaaatggaaatgctggtgctgcgggttgagaaggaaggcatccagtgggaagctaaagaggacaattcggagggtgaggagatcctggaagaggtatttattcgcgataagctcatggagcggcgtaaccgtcgcacaggaaggacagagaaagcgcggatttggggaagtggacggacagaacggtcaggaacctggattggggaggccggttgcccgccgctgctgctgacggtgtgacgttctctgttccggtcacaccacatacgttccgccattcctatgcgatgcacatgctgtatgcccggtataccgctgaaagttctgcaaagcctgatgggacataagtccatcagttcaacggaagtctacacgaaaggtttttgcgctggatgtggctgccccgcacccggtgcagtttgcgatgcccgagtctgatgcggttgcgatgcctgaaacaattatcctgagaataaatgccttggcctttatatggaaatgccgcaactgagtggataatgctgttttttggctgctaaaaaaagaagctgggctgttatcccactgagaagcgaacgaaacaggccgggaaaatctccccttattggggaagatccggattatttaatctaaggaccctggggtaccggttataggaaagaatggttctgtcatgatgcctgcatgcggtaacgaaaacgatttgaatatgccttcaggaacaatacaaatctttctgcgggggtaccttgaattggagcggattatgttagcaatgggccgaacaacctaatgaacacaaaaccatgatggggcctgtccttttacagccagtagtgctcgccgcagtccagcgacagggcgaagccctcgagtgagcgagggagcacccaggaacagcacttatatattctggg

SEQ ID NO: 132296 - DNA, 912 bp, Homo sapiens
atggggcatttggagaaggctggagggaaacatttcgatctctctgaggaatttaagccaattcagagaggtcttgttatccataatctggaattcttattaggattttaccaagaggcctccgatcctgttcctccttactgggtacgacttcaagacaggggtgtccagccacctcctacaggtgtgttcaggcctccaacaggtcagcaccccctgggacagagcttccagagggagaagcaggctgccacttttgttgtttcacagccttcactggtgaaacctccaggtatgggaaaaactgagaacgaccgaattgaacgtccccagggtggcggcggaggttccggcagtggtcagggccaggccagccaggatggtgaaggtcaggatgaatttgtctttcagatttcgaaagatgagtatcttgatctgctctttgaagatttggccttaccgaatctgaaacaaaaccaacaacgccagctgaccgaatataaaacgcatcgggcgggttataccgctaacggcgttccggccaatatcagcgttgtgcgttcattgcagaactcactggcgcgacgcacagccatgacggcaggcaagcggcgggaacttcatgcactggaagagaatttggccatcatcagcaacagtgaacctgcgcaactgctggaagaggaacgtctgcgcaaagaaattgcagaattacgtgccaaaattgaacgcgtcccttttattgacaccttcgatttacgttacaagaactacgagaagcggcccgatccctccagccaggcagtgatgttttgcctgatggacgtttccggttcaatggatcaatccactaaagatatggctaagcgtttttatattctgctgtatctgttcctcagcagaacaaaatga

SEQ ID NO: 132297 - DNA, 454 bp, Homo sapiens; identical to SEQ ID NO: 131292
  misc_feature (1)...(454): n = a,t,c or g

SEQ ID NO: 132298 - DNA, 813 bp, Homo sapiens; identical to SEQ ID NO: 131294

SEQ ID NO: 132299 - DNA, 890 bp, Homo sapiens; identical to SEQ ID NO: 131295

SEQ ID NO: 132300 - DNA, 603 bp, Homo sapiens
atgcgtgccctgctgattctctatctcaccaatcaactaaaatacagcgatactcacgcctacgagttatttagcgcctactgttcgctggtgtatgtcacgccaatcctcggtggctttttggcgcataaagttctcggcaatcgcatggcggtgatgctgggggcgttgttgatggcgatcggtcatgtggtgctgggtgccagtgagatccatccgtcattcctctgtctgttccgacggttaatcagtggttacggcagcgggcataacatcggtcatatatttccaccaacgttggcaaacatcagtgctggcaaccgcattccagcgttcttcagattcaatctctaccatggcaaacagcagattacgcgctttgtcgagatagatggcgtagttatgcgcaccgtgagatttcagcactgcttccagttctggccagatgggattatgccgacgctgatactcttcgtgggcgtcggggtttacctgcatgacaaaggctttgcggatcatgtttgctccttacagcgccagcgcactggcgagtgcgtaacgccgaaacgcttgccgagcgctatcaactcttcacggctgatg

SEQ ID NO: 132301 - DNA, 636 bp, Homo sapiens
atgaaagcaggccagcgtttaacgcttaaacgcccgcagcacgggatgcgcagttatctggcggtcgcgggtggtattgatgttccgccgagatccccggaccggctcgttcatcccttgttgcttaccgaaaaacttctttaccgcccatcgaaacgggcacatacaggcagagtggccctgaaagaaagcaatcagcgatgtcctcctgacgggttcaagttctcttgtgataacggagagagactgcgtgtcacgttcgcgctggactgctgtgatcgtgagccactgcactgggcggtcactaccggcggcttcaacagtgaaacagtacaggacgtcatgctgggagcggtggaacgccgcttcggcaacgatcttccgtcgtctccagtggagtggctgacggataatggttcatgctaccgggctaatgaaacacgccagttcgcccggatgttgggacttgaaccgaagaacacggcggtgcggagtccggagagtaacggaatagcagagagcttcgtgaaaacgataaagcgtgactacatcagtatcatgcccaaaccagacgggttaacggcagcaaagaaccttgcagaggcgttcgagcattataacgaatgcatccgcata

SEQ ID NO: 132302 - DNA, 1898 bp, Homo sapiens
atgaacatcgatgcaaaaatcctcaataaaatactggcaaaccgaatccagcagcacatcaaaaagcttatccaccacaatcaagttagcttcatccctgggatgcaaggctggttcaacatacacaaatcaatgaaagtaatccagcatataaacagaaccaaagacaaaaactacatgattatctcaatagatgcagaaaaggcctttgacaaaattcaacagcccttcatgctaaaaactctcaaaaaactagtggctggcatgatggcagtggctgctcctgacgacccgccaccgccatcggtatcatcttccaagccatcaacagtggcacctccgggccgcatctccccgtcggggcgcgccctctgcaccagcttacccagtgccttgagcagctcgtcgaaattctcgctgctgcgcatcttccaggtgccggcgaagttgggcatggtggcggtggcggcggcggcaggtgtgaacgccatgctgaggaaagtggccgtagcggctgcgtccaagccgcacgtggagatccgccaggacggggatcagttctacatcaagacatccaccacggtgcgcaccactgagatcaacttcaaggtcggagaaggctttgaggaggagaccgtggacggacgcaagtgcagggtgaggccccagagccactacagcgtccccgtgtccccgctcggtgcccatggcccactgctgctggaggaacctgtgtctccctttgcagcctgtggcgcgccttccttgcaggtgcctcaaggcgcgcagcgctgggcgcatagcgccagtctccgccttgcgagctcagagtgtgcccgctgcacctacgctgtcggtccctcacgcaacagcctctgcccccatgcccaatttcgtcggcacttgaataatgctcagcgagctgaaaatttctcctatctgctcaaggcactggggtacgaactggcaagaattcttccgcttcttaatgagcgcttttaccctgtgctttccattagaacccatactggggttagcttcgttttcattcagtgcctggcctctgtcctcgatatcagtttagccacttgggagaatgagaacaagatccgctgcacgcaaactcttcttgaaggggacggccccaaaacatactggacccgtgagctggccaacgatgaacttatcctgctgattgaatttggtgtggtcgccgcacctgagggccagcagtccacagctgtctaccactggtgcaataccgcggtgctggacccactggcatgtatgttactaattttgatgaatcttgccaaattgctttccacagagcttgggtaccgagctcgaagctttccctcaacccaaaaaaacctttttaaaaatacaagtcgacactgcatgttcactcagtgcggcagcgaaaatgacgtatacttcagcgggtagcctcactcacggcacgcaggtgaataaactgctgcagaacatccgggagcgcgttaagacgaccattttcagccataacccgaatcaggttctgaccgttttcgtccagttgctcaccacaaactgcgataaacgactcggcgagcgtttctggcgcaagcgcgccagagagaagctctgccatttgttcgtttttggttacctcggcggcaaacgccagcatgtcctgccagcgttctacactttggtgttcgacggcaaagtcaaaagctgctttggcttcagcgacaagtttatccacgatgtcgctgttagcagcttcatccacggaacgttcgatgatcttctcggcgccagcaacagccaggatagcaacttgcttacgcagctcttcacgggcacgtttacgctcggcttcaatttccgcctgcgcctgggccacgatttta

SEQ ID NO: 132303 - DNA, 942 bp, Homo sapiens
ttactgagctggagcgacttcagcgtcagatacccactccacacccgcgtaatggtcgtcatccagcaacccacaccgaagatgcacgggtcccacgcataccatggagggaatatagatgctagttggacgtgagtgcaggatgcctgaggtcctgtattgataccgcgcgattactttgcgagctaagctgccagggcgaaccacggatgcatccggcggaacatcaataccacccgcgaccgccagataactgcgcatcccgtgctgcgggcgtttaagcgttaaacgctggcctgctttcatcggcaatcgccagccggtccagacggcattatcatccagccgcgcttcgcaaccggcacccgtcagagcaaaccacccatcagtttcgaactcaacagttaactgaccgagcgtgatctccagcgcgggggcattggcgtcattacccaccagtaggttagcaatgcgtaacgcgggcatatccagtgcgccgcagtggctgatacccgactggcgaaaaccgtgacgaccgccatcccggcgttgccagcggataaacaccagtctgcggcccgccgatcccgacagaacctgccggaacgagtaagcgcggttcagcgcgccgtggcgtgtgtagttgttccggcaaactcccgagatacgggaagcccggttgaaaacccgcgccatataatatgcatcgacatattcaccagttagcaatgcgtacttcttaccagtcccttcaatttcaaagccgtattttttatagaccttaattgccggggcgttatcgacaaacacggttagttcaatgcgatctacccgcaaccagttgtcgcacatttcaatcatctctcgcatcagggcgctggcacggctgggacggaagtcgctgtcgtcctcaaaatcggtggagctgcatgacaaagtcat

SEQ ID NO: 132304 - DNA, 642 bp, Homo sapiens
tggcgactggcgcagcgtctggtggatatgccgaatgtggttgaagccattcccggcatgaacaatatcacggtgattttgcgtaatcctgagtcgctggcgctggatgccatagagcgtttgcaacgctggtgggaagagaaccaagcctttgaaaccgaattctcgctttattgaaattccggtggtttacggtggtgcaggcggaccggatttggcggtggtcgcggcgcattgcgggttgagcgaaaaacaggttgttgaattgcactcctccgtggaatacgtggtctggtttttaggttttcaaccgggcttcccgtatctcgggagtttgccggaacaactacacacgccacggcgcgctgaaccgcgcttactcgttccggcaggttctgtcgggatcggcgggccgcagactggtgtttatccgctggcaacgccgggtggctggcagttgattggtcatacctcactcagcctgtttgatccggcgcgtgacgaacccatcttattacgtccgggagacagtgtgcgctttgtaccgcagaaagagggagtatgctgaagattattcgtgcggtcatgtataccactgtgcaggaaggcggccgcacggttttcgcccgtcgggttcaacct

SEQ ID NO: 132305 - DNA, 3359 bp, Homo sapiens
atgacgtttaaaccaggaaacaagctaaatcccgccaaaagacgagttttaacgggcgtattaaaagtgataatcataagatatctggtgcgggagacgctcaaaagccagctggcgatactcttcatctggcttttgatcttcttctgtcaaaagttagtgaggatcctcggcgcagcggttgacggcgatattccggcgaatctggtgctctcccttctcgggttgggcgtgccggaaatggcgcagcttatcctgccattaagcctgttcctcgggctgctgatgacgctgggcaaactgtataccgaaagtgaaattacggtaatgcatgcctgcggcctgagcaaagcggttctggtgaaagcggcaatgatccttgcggtattcacggcaatcgtagcggcggttaacgtgatgtgggcgggaccgtggtcatcgcgtcatcaggatgaagtgttagcagaagcgaaagcgaaccctggcatggcggcgctggcgcaagggcaattccagcaagcgactaatggcagctcggtgctgttcatcgaaagcgttgacggcagcgatttcaaagatgtgttcctcgcgcaaattcgaccaaaaggtaatgcacgtccttctgtggtggtggccgattccggacatttaacccagctgcgcgacggctcccaggttttcaaccgggcttcccgtatctcgggagtttgccggaacaactacacacgccacggcgcgctgaaccgcgcttactcgttccggcaggttctgtcgggatcggcgggccgcagactggtgtttatccgctggcaacgccggcgtgcgctttgtaccgcagaaggagggagtatgctgaagattattcgtgcgggcatgtaataccactgtgcaggatgggggtcgtcacggttttcgccagtcgggtatcaagccactgcggcgcactggatatgcccgcgttacgcattgctaacctactggtgggtaatgacgccaatgcccccgcgctggagatcacgctcggtcagttaactgttgagttcgaaactgatgggtggtttgctctgacgggtgccggttgcgaagcgcggctggatgataatgccgtctggaccggctggcgattgccgatgaaagcaggccagcgtttaacgcttaaacgcccgcagcacgggatgcgcagttatctggcggtcgcgggtggtattgatgttccgccggtaatgggctcatgcagcaccgatctcaaagtggggattggcgggctggaaggccgtttactgaaggctggtgaccgactcccgattggcaaatcgaagcgtgattctatggaagcgcagggcgttaaacagctgctaaaacacaagcacgccgcgcaactattacgtgacgttgccgtcaattgtggaattattatgaataaacacgcatcacagccgcgcgctatttactatgtcgttgcgctgcaaatctgggaatattttagcttttacggcatgcgtgccctgctgattctctatctcaccaatcaactaaaatacaacgatactcacgcctacgagttatttagcgcctactgttcgctggtgtatgtcacgccaatcctcggtggctttttggcggataaagttctcggcaatcgcatggcggtgatgctgggggcgttgttgatggcgatcggtcatgtggtgctgggtgccagtgagatccatccgtcattcctctatctgtccctggcgattatcgtctgcggctatggcctgtttaaatctaacgtaagctgtctgctcggcgagctgtatgagccaaccgatccgcgtcgtgatggcggtttctcgctgatgtatgcggcggcggctcgagatattgcttatctgatgtatctggagaacgccttgcgagctgaaggcgctggcgggaatccgaatctatcgcggatggcgatgccgcctatcaacctctaccagaatcagagaggaggagtggcttgcaaccccctcacccccatcttatacattttcccgaggactccttggattgcttcgcgtcagcgtacgacccataacaaccgcacctacagagtcgcgctcgaggttcagtgcgatagcgtaacggttacccggcagggagatcatttcaccctgcatacaatcggccaggccgtgaatgcggataacaccgtcacttacagaaacaatagtaccttcgttgtgagcttcactcacaacattgaactgagcaatgcgctgcttgatcagttcgctgatttcggtggaattcagttgcatgctccagtccccttaagactgcaagacgtctgcaaggcgctcaagacgacccgcacgtttttccatcgcagcagaaattttcgcgagctgttgttcactcagtgcggcagcggaaatgacgtctacctcagcggtagcctcactcacggcacgcaggtgaataaactgctccagaacatccgggagcgcgttaagacgaccattttcagccataacccgaatcaggttctgaccgttttcgtccagttgctcaccacaaactgcgataaacgactcggcgagcgctgtgtcgagcgcgccagagagaagctctgccatttgttcgtttttggttacctcggcggaccatggaagcttgcttctccgggtgaagacgcggccaccttgttggaaaatattctcaaacttcgcgataccgccagcggtattgaaacgctcaactttatggagccacagagcgccgccgatctgattcgcgatgagcatccgcaaattatcgccaccattctggtgcatctgaagcgcgcccaagccgccgatattctggcgttgttcgatgaacgtctgcgccacgacgtgatgttgcgtatcgccacctttggcggcgtgcagccagccgcgctggcggagctgaccgaagtactgaatggcttgctcgacggtcagaatctcaagcgcagcaaaatgggcggcgtgagaacggcagccgaaattatcaacctgatgaaaactcagcaggaagaagccgttattaccgccgtgcgtgaattcgacggcgagctggcgcagaaaatcatcgacgagatgttcctgttcgagaatctggtggatgtcgacgatcgcagcattcagcgtctgttgcaggaagtggattccgaatcgctgttgatcgcgctgaaaggagccgagcagccactgcgcgagaaattcttgcgcaatatgtcgcagcgtgccgccgatattctgcgcgacgatctcgccaaccgtggtccggtgcgtctgtcgcaggtggaaaacgaacagaaagcgattctgctgattgtgcgccgccttgccgaaactggcgagatg

SEQ ID NO: 132306 - DNA, 462 bp, Homo sapiens
atgcattttgccatccagcgtatcggcagatggcgcgatcgttcccgcattggtaacccacattggcgaagcggaactgacgttggaaagccagtgcggtgcctggcgtgcaactttttccagtacgtgttcatcgctaccagtgaatcccaactgacgcagcaccggaataaacggacgttcgtgcggcgggatcacggcctgggggaatcccgcatcggcaagggctttcattttcacagcatgaaaagcgacggttttcacgaagagttaatcatgtcgtcgcttctcggcgtctccttcgtgggcgcatttctggtggtcggatcttcatttatgttgccctatttacgtcgggttattacgcctaccgtcagcggtattgtggtactgatgatcggcttaagcctgattaaagtcggcattatcgattttggtggaggatttgcagccaaattcttg

SEQ ID NO: 132307 - DNA, 1284 bp, Homo sapiens
ttaacgacggatcggaatcagcagttcacagcgtagattaattgggcgatctcccgctttggcatcttctgccgggtagtatcgctcaatatcctgacctttacggcgcgtcaggttgagcattggcatgcacgttccgtataccgtcaggataaactcctgcacgccggttcccagaccttcataggtaaacatcacatattcgccgccctgcagcatcaccggatgccccgtcagtacatagccatctgcctgatcctgggctaacgcggtggtatagaatacctcttgctcgtcgtctttatcctgactcggacgcgtttcattcaggccgtagagcaccggcggaatggtcggcgcgttgccgagaaaatcgtgccagaactgataacgcatttcatggcggaaatcagagatttgctccagcgaacaggagtagctctgggtaacaccaatcagcggcgtatcttccagggtgacaaatttgtgctctggcatagtgaattcacccaggcgtagcggcgggcgaataccaaaggcgctccattcaggagaacggcggtaaagtgcaggagtctgggcaaactgcttcttgaatgcgcgggtaaatgtctgttgagagtcgaagcggtattgcagcgcgatgtccagaatcggacgcgcagtcaggcgtagttcacaggtcaagatggaatcagtctctgcctgcacgatttggagcaggaagagattatagagaagcaagctaaggaaaaatggctggttatcctttaaatcaagttctgcctgtctgcgaagcagcgcccatacccgacgataaccatacgttggcagctctccgataacatggtgtatacggagaagcacatccgtatcatcagtgtgacgactgcggcggccatccatccagtcatcggttcgttccccatccccgggcaataagggcgcgtgcgctatccacttttttgcccgtccatattcaacggcttctttgaggagttcattttccatcgttttcttgccgagcaggcgctggagttctttaatctgcttcatggcggcagcaagttcagaggcaggaacaacctgttctccggcggcgacagcagtaagacttccttcctggtattgcttacgccagagaaataactggctggctgctacaccatgttgccgggcaacgagggagaccgtcatccccggttcaaagctctgctgaacaattgcgatcttttcctgtgtggtacgccgtctgcgtttctccggccctaagacatcaatcat

SEQ ID NO: 132308 - DNA, 2193 bp, Homo sapiens
tcagcagttcacagcgtagattaattgggcgatctcccgcttggcatcttctgccgggtagtatcgctcaatatcctgacctttacggcgcgtcaggttgagcattggcatgcacgttccgtataccgtcaggataaactcctgcacgccggttcccagaccttcataggtaaacatcacatattcgccgccctgcagcatcaccggatgccccgtcagtacatagccatctgcctgatcctgggctaacgcggtggtatagaatacctcttgctcgtcgtctttatcctgactcggacgcgtttcattcaggccgtagagcaccggcggaatggtcggcgcgttgccgagaaaatcgtgccagaactgataacgcatttcatggcggaaatcagagatttgctccagcgaacaggagtagctctgggtaacaccaatcagcggcgtatcttccagggtgacaaatttgtgctctggcatagtgaattcacccaggcgtagcggcgggcgaataccaaaggcgctccattcaggagaacggcggtaaagtgcaggagtctgggcaaactgcttcttgaatgcgcgggtaaatgtctgttgagagtcgaagcggtattgcagcgcgatgtccagaatcggacgcgcagtcaggcgtagtgcgaccgccgatttcgacaaacgacgagcacgaatatacgcgccaatagcatggccagtgacatctttaaacattctctgtaagtgccacttggaataacctgctttcgccgctacattgtcgagcgacaggggctgatccagatgactgtcgaaccgtttatccagtggttgttggaagataacttcgtcgctgggcgtcctgcctgggaagtcgcaggtgtacaaatggtgaatgatgtcgtcagcggcgttgatgatgccggaaatgccattgatgttcgcgatccgcttagcgataaaattcgcgaacttgttgcgggcagcagcagtgaacaacgcgtaaccgccctgctttccctgcgtgaagttttcggtgatgatctgccagataacccgcattttgtgcaggccatcgaacaagcctggcaacaaatcgtacaattcggcgcacatcaggcgcttcgtccgctgatcccccggccccttaaaatgttcccgggacccccggcccgtcttgttcggtgaataacgcggcgtgttgagtgcaacgcagtcggcattaatctcctggcgagtcgccatattgtcggtacagttcgagcactcatattcgggtcccccgttggcatatcgcggcaattccttgttaacgccctcacccgttaaccgttgttgtaatgctgtcagttgaatgtcgggattcaactgtgtcagtcgctgttggctgacctgcgatttcgggcgatcgatatcttcagtggtaaagaggatttgtcgttgcagattgcttaaatgcacatcgtcgtcatctgccagtaccagcgtcccgacgccagcgcccgccaggtacagcgcagcaggtgtacccagcccgcccagaccgataatcagcacctggctgtcgagcagtttttgctgcccgtccagagcgatatcgtcgagcaggatttggcggctataacgcataaagtcacggtcattcatcgccactcctgcaatttccagcaactgtgccgttgcccaaacgccagtctgcggcttgagtaatggcgctgcggaccagctatttatcagcaaatcggggcccatctggtcaaaccgaacctcccgccagtgtgaacctggaaaatgaacccagcggattccggcggcccaaaaacaaggatcccgctgcatcgtcgacagttctgccgaagcgttaagtgcagcactggcaattggtaacatcgagttggttaagcccagccggacgatgtccgcaaagccgcgcaggaaatcgttaatagcggcaaggccaaacgggttgtcgtttccctgggtccacaaggagcgctgggtgttgatagtgaaaactgtattcaggtggtgccaccaccggtgaaaagccagagtaccgttggcgctggtgacagcatggtcggcgcgatgacactgaaactggcagaaaatgcctctcttgaagagatggttcgttttggcgtagctgcggggagtgcagccacactcaatcagggaacacgtctgtgctcccat

SEQ ID NO: 132309 - DNA, 1557 bp, Homo sapiens
atgggcattgtggcatctgcatctgtacaggctgcagaaatatataataaagacggtaataaactggatgtctatggcaaagttaaagccatgcattatatgagtgataacgccagtaaagatggcgaccagagttatatccgttttggtttcaaaggcgaaacacaaattaacgatcaactgactggttatggtcgttgggaagcagagtttgccggtaataaagcagagagtgatactgcacagcaaaaaacgcgtctcgcttttgccgggttgaaatataaagatttgggttctttcgattatggtcgtaacctgggggcgttgtatgacgtggaagcctggaccgatatgttcccggaatttgaccgacaactaatgaccgatggtcacaccccccctcggagggagaatttctgtccacacgaaacggcgcgggacacgcccttgcgcgttattcgacgcccaccgcgggtcaggagcaccatgagaagggggcgaaccccgcggccccgcgttttaaaagcgagaactcgttcgacccgcgggacccatgaaaaaacgggtctcgcggcaacacaaaaaaagaggtttcggacccttattgcgcttcggccctatgaaactgtgcagaagccgattcgatgggcgaataacactcgcttcggactctcttgcggtctggtttcccccgagcgggaaaagttcgatcaactgttgctggaggcgcggccggggattgttaactggaacaaaccgcttaccggtgctgccagtaccgcgccattcggcggcattggtgcttccggtaaccatcgccccagcgcctggtatgccgcagattactgcgcatggccgatggcgagcctggagtcggactcgttaacattgcccgccacgcttaaccccgggctggatttttccgatgaggtggtgtctaacccgcgactggcggcgaagcagggcttactgaaaatgaaagcccttgccgatgcgggattcccccaggccgtgatcccgccgcacgagcgtccgtttattccggtgctgcgtcagttgggattcagtggtagcgatgagcaggtactggaaaaagttgcacgccaggcaccgcactggctttccagcgtcagttccgcttcgccaatgtgggtagccaatgcggcaacgatcgcgccatctgccgatacgctggatggcaaagtgcatctcaccgttgccaacctgaacaataaatttcaccgttcgctggaagcgcccgtcactgaatcgctgttaaaagcgatttttaacgacgaagagaaatttagcgtccattcggcgtgccacagacagtcgtctgaaaaacgcacggatctcggtgatataatgccagaaatggagcagacagactggtcagcggaacagaaatccagacgaaatattgttcaactgcagcccgtagcgtcggtgcggcattcgacggacaaaacggacagtatcgttacatgggaaataatggccccatgcaactggaagtcccccgtgatcagtatgccggcgctgttgaaaccatga

SEQ ID NO: 132310 - DNA, 1344 bp, Homo sapiens
atggaagaaattgtggcccttagtgtaaagcataacgtctcggatctacacctgtgcagcgcctggcccgcacgatggcgcattcgcggcagaatggaagctgcgccgtttgatacgccggacgtcgaagagctactgcgggagtggctggatgacgatcagcgggcaatattgctggagaatggtcagctggattttgccgtgtcgctggcggaaaaccagcgattgcgtggcagcgcattcgcgcaacggcatggcatttcgctggcgttacggctgttaccttcgcactgcccgcagctcgaacagcttggcgcaccaacggtattgccggaattactcaagagcgagaatggcctgattctggtgacgggggcgacggggagtggcaaatctaccacgctggcggcgatggttggctatctcaatcaacatgccgatgcgcatattctgacgctggaagatcctgttgaatatctctatgccagccagcgatgtttgatccagcagcgggaaattggtttgcactgtatgacgttcgcatcgggattgcgggccgcattgcgggaagatcctgatgtgattttgctcggagagctgcgtgacagcgagacaatccgtctggcactgacggcggcagaaaccgggcatttggtgctggcaacatacatacgcgtggtgccgcgcaggcagttgagcgactggtggattcatttccggcgcaggaaaaagaccccggcgaatcaactggcaggaccgactcattgccttcttctcgcccacaaaaagttgcatacccggttcaccgtaatgaccgccgagacgattgtggtttgccgccccctcatcaccgagcaacgctacctgtggcaacgccgaatggacgctaaatttctcttcgtccgattcagtgacgggcgcttccagcgaacggtgaaatttattgttcaggttggcaacggtgagatgcactttgccatccagcgtatcggcagatggcgcgatcgttgccgcattggctacccacattggcgaagcggaactgacgctggaaagccagtgcggtgcctggcgtgcaactttttccagtacctgctcatcgctaccactgaatcccaactgacgcagcaccggaataaacggacgctcgtgcggcgggatcacggcctgggggaatcccgcatcggcaagggctttcattttcaacacctgaaaacggtgacgggtagaggcttcattaccaaacgacaggcccgcgtaatgatgcgtcagccctaccagcccgtcgatacttcccaggcgttcatcgcaccacctcatcggaaaaatccagcccggggttaa

SEQ ID NO: 132311 - DNA, 1970 bp, Homo sapiens
atgaaggctttcaataagctgttttccctcgttgttgcatctgttctggttttctctcttgctggctgcggtgacaaagaagaatcgaagaaattcagcgccaatctgaacggcactgaaattgccattacctatgtctacaaaggtgacaaggtgcttaagcaatcttctgaaaccaaaattcaatttgcctccattggtgcaaccaccaaagaagatgctgccaagacacttgagccgttaagcgccaaatacaaaaacatcgcgggtgttgaagaaaaattaacctataccgatacctacgcgcaggaaaacgtgactatcgatatggaaaaagtggattttaaagccctgcagggtatttcaggaatcaacacattccgccgactgtggccaaccattgcgcctttcaaagcgggtctgatcgtggcgggcgtagcgttaatcctcaacgcagccagcgataccttcatgttatcgctccttaagccacttcttgatgatggctttggtaaaacagatcgctccgtgctggtgtggatgccgctggtggtgatcgggctgatgattttacgtggtatcaccagctatgtctccagctactgtatctcctgggtatcaggaaaggtggtaatgaccatgcgtcgccgcctgtttggtcacatgatgggaatgccagtttcattctttgacaaacagtcaacgggtacgctgttgtcacgtattacctacgattccgaacaggttgcttcttcttcttccggcgcactgattactgttgtgcgtgaaggtgcgtcgatcatcggcctgttcatcatgatgttccattacagttgggcactgtcgatccatttgattgtgctggcccgattgtttcgattgcgattccgttgtatcgaagcgtttcgaacatcagtaaaaacatgcagaacacctggggcagcgacgcacgcgcatccgtttgatctgactaaatttaacgacggtgatttcttgcgtgccgaacagcagggcatcaatgcggaaaaactgaccaaagttctctatccaaacgacaaccatactgccggtaaaaagctgcgcctgatgcagcaatacttccagtgtgcctgttcggtagcggatattttgcgtcgccatcatctggcggggcgtaaactgcacgaactggcggattacgaagttattcagctgaacgatacccacccaactatcgcgattccagaactgctgcgcgtgctgatcgatgagcaccagatgagctgggatgacgcctgggccattaccagcaaaactttcgcttacaccaaccataccctgatgccagaagcgctggaacgctgggatgtgaaactggtgaaaggcttactgccgcgccacatgcagattattaacgaaattaatactcgctttaaaacgctggtagagaaaacctggccgggcgatgaaaaagtgtgggccaaactggcggtggtgcacgacaaacaagtgcatatggcgaacctgtgtgtggttggcggtttcgcggtgaacggtgttgcggcgctgcactcggatctggtggtgaaagatctgttcccggaatatcaccagctatggccgaacaaattccataacgtcaccaacggtattaccccacgtcgctgggatcaaacagtgcaacccggcactggcggctctgttggataaactcccagcaaaaagagtgggctaacgatctcgatcagctgatcaatctggaaaaattcgctgatgatgcgaaattccgtcagcaatatcgcgagatcaagcaggcgaataaagtccgtctggcggagtttgtgaaagttcgtaccggtattgagatcaatccacaggcgattttcgatattcagatcaaacgtttgcatgagtacaaacgccggttttttgtggtccagttctttcacccacttagcaacgacaatggtcgctacgccgttaccgaccag

SEQ ID NO: 132312 - DNA, 3064 bp, Homo sapiens
cacccgcaccgcgctcgccatcgtcaataaaccacccagcagcgcaatcccgcccaccagcgggctggcaagcagaaaacgaaatcctgccagtaatgatttcaacggatgctcacgcggctgcggtggcggtggcaacgccggaaggcttaacaacggtagcaaggctacgccaccggtcgccagcaataaaccgccaatcatgggcgaaatcaccgaccccagacgcacggtcaacatggtgatcgccccggcctgcattaagttttcacgccctaccagtgctggtgtcgccgccaatagcgccgtaacgccaagcgatgcgaaaaaaccatcccataaaccaaacacaacaccggaaggcttaaccacggcaacacggttactaacatgcacgacgccgacaccgcacagttacaagctacgccacctgatcgtcaccattaaaccgccaatagacggccatatcaccgaccccatacgctccgtcaacatagagaccggccatgacggcacttattacctacgccctaccaaagctgttaacactgccccccaaattcccatcacgaatatccataagcccaccggaatagcgcaggcgttgttatcaacccggcaacatggaggagcccagtgcaccaacggtattaccccacgtcgctggatcaaacagtgcaacccggcactggcggctctgttggataaatcactgcaaaaagagtgggctaacgatctcgatcagctgatcaatctggaaaaattcgctgatgatgcgaaattccgtcagcaatatcgcgagatcaagcaggcgaataaagtccgtctggcggagtttgtgaaagttcgtaccggtattgagatcaatccacaggcgattttcgatattcagatcaaacgtttgcatgagtacaaacgccagcacctgaatctgctgcatattctggcgttgtacaaagaaattcgtgaaaacccgcaggctgatcgcgtaccgcgcgtcttcctcttcggcgcgaaagcggcaccgggctactacctggcgaagaatattatctttgcgatcaacaaagtggctgacgtgatcaacaacgatccgctggttggcgataagttgaaggtggtgttcctgccggattattgcgggcgattcagtgacgggcgcttccagcgaacggtgaaatttattgttcaggttggcaacggtgagatgcactttgccatccagcgtatcggcagatggcgcgatcgttgccgcattggctacccacattggcgaagcggaactgacgctggaaagccagtgcggtgcctggcgtgcaactttttccagtacctgctcatcgctaccactgaatcccaactgacgcagcaccggaataaacggacgctcgtgcggcgggatcacggcctgggggaatcccgcatcggcaagggctttcattttcaatgggagctctcttgtagagcatggatccacaaggcaggatacgcagtagtcactctaaatgacgtcattaaaagtgtgtctcttcctccaggcacaagcgctcaattagctgagctaatagctcttacaagagcaattgaattaagcaaaggaaaggtagctaatatttacactgactcccagtatgctttcctagttctccatgctcatgcagccatttggaaggaaaggcattttcttaccaccaatggatctcctataaaacatcaccaggaaattaaaaggttactttcctcagttttccttccacgagaaatcacagaaatgcattgtaggggacatcagaagggaacagatgaggtagccgaaggaaatagattagccagtcaggtagctaggtcagcggcaagaaagcctcaagacatcaacacacttcaaacccctctaatctgggaaggctccataagagaaattaaacctcaatactccactacaaaaggagaatgggccacttctcgagggtgtacatttcaacccttaggcggtacgctgacagtcaacgataatggcaaagcgacagatatcgtccagaacagcggtgccgctctccagacgagcacggctaacggtattgaaatcagcggtactcatcagtacggtactttttccatttccggcaatttagcgaccaatatgttgctggaaaatggcggtaatttattggtattagcaggtaccgaagctcgcgactccacggttggcaagggtggggcaatgcaaaacctgggtcaggactccgccacaaaggttaactctggcgggcaatatacccttgggcggtcaaaagatgagtttcaggctctggcccgggcagaagatctccaggtcgctggcggtacggcaatcgtctacgcaggtacgctggcggatgcatcggtcagtggcgcgacaggaagcctgtcgttaatgacgccacgggataatgttacgccagttaaactcgaaggggcggtccggattaccgatagcgcgacattgactctgggaaatggcgtcgataccacgcttgccgacctgacggctgccagccggggcagtgtctggcttaacagcaataattcctgtgcagatcccctcgtcaccctggaagatacgccgctgattggtgttacccagagctactcctgttcgctggagcaaatctctgatttccgccatgaaatgcgttatcagttctggcacgattttctcggcaacgcgccgaccattccgccggtgctctacggcctgaatgaaacgcgtccgagtcaggataaagacgacgagcaagaggtattctataccaccgcgttagcccaggatcaggcagatggctatgtactgacggggcatccggtgatgctgcagggcggcgaatatgtgatgtttacctatgaatgtctgggaaccggcgtgcaggagtttatcctgacggtatacggaacgtgcatgccaatgctcaacctgacgcgccgtaaaggtcaggatattgagcgatactacccggcagaagatgccaaagcgggagatcgcccaattaatctacgctgtgaactgctgattccgatccgtcgttaa

SEQ ID NO: 132313 - DNA, 5962 bp, Homo sapiens
gtctacattacagataacaagagaagctttacttaaaatacatactttgctgagcataaacaaaaactgtgagaaacatatagtccacttcagagtttcagaagttgttgcaatactggtgtttttaggcttagtaaccagactaagtttggcacgatgtgaggattaaagaaaacctaacatacagccgatatgccccttaacaccaatatcccagttgtctttctgtgataccaggtgaaggccaaattcagacattcctggctccagagcctttagtgcatgaacagatcaggtatattactgaagaaataggtaaaggccattttgacatcaaacagaaaaaaaattggagaatatcatattctatctattttgattggcagagggaatcagaaagtattcccctggactgctttggaaatgaccccagcatttagaaagtctctgctgtgtcctaatctctttgctggaaccttatcagtggtatcttggactctcccttctgtcactacatttcttttcccacctcccctttgatctcttaaggtatcttgaaagacaactaagcagtttttggtgaaaacctgaactctgatttggtgagatttgtctatttgccaatataggtaaaatcactgaaaaactgtttctgaagcctatgtataatacttaaggccatgtttcaagaaaataatggaataaacagtcaggagagctgtagggtaatattgcaattatagtcttctaacctaagcgcgtttatctggcaaggcggggcccttttctggctgggtgatggtaactgtcaaacctgcagtgaacagagatactagtcaggatgctgagatgctggcagggcagacagcatggggactgtgctttctggcctattccatgcgggcttcccaaacaacttcctacactctttttatgcgtgcctatttcctaatttttcagtttataaactaaacctatttagtgcttgtaaaaatgagttgaggccgccagtggctcacgcctgtaatcccagcattttgggaggctgaggtgggccgatcacttgaggtcaggagttcgagaccagcctgaccaacacggtgaaaccccacctctactaaaagatacaaaaattagctgggcgtggtggcgcatgcgtgtggtcccagctacttgggaggctgaggtgggagaatcacttgaacctgggaggcggaggttgcagtgagcagagttcccaccactgcactccagcctgggcaacagagtgaaactccacctaaaaaaaaaaaaaatgagtttagcataagaaggcagataagatgaagctattttcattactgtcttctacaatgctggagagtggagagcagactagtcccaatcctttattttgtgcacggggaaagtgagaactagagatgttcaacgacttacagtctccacagcaagatctgggtccctgtaccgcttagtggtgaaggtcaggctaggacccatctatcgcgtctccaaggtctgtactctggtgtgagatgattcaggcagcaggactgaatgtgagttgggtgccttaaaacccaatacctgggatagaatgtggtacatacagaattcacagtttgaagcagttgtttgtttttccctactgagaagattctgtgataataatgggacttgggagcattctggattgattccaaagagcaacagggaaattttagttagaaaaggtggtaaaaatataggagcaagtggactatttcctaggttttcatttttgtacaaattttcattttccttctactgtaggcgaaatgagatgccagttgcgtgtttaggtgccagtggcctgctacactgatacaactgagagtttctgtttaatatcctggctgtttcttaatctccagctaaatctggagcaagctatacaggccacaccacatgctttggaaatgatttgagctctcttagaaaatcaaggtgatgaacagtctcaaggaggcagggaggagtgcacaaaaggtgggagaggtggtgaccaagaaggtttgtgaccacagactgtccaggagatgagaaaagatccctcttaggccaccaaggatgcttggattaggtaacaagtaggccaagaacggtccttctgcaggggacacggatggcaggtctcatgaagtaaggttttgctggtttatcctatgctgacccaacccagtgttcaaataaaattctgaataactgtgctctgcagcttgggagatgttttatgcatttagaccccagagcagacattagagatattttgaaaagtaaaggtagtctagttagcaaagtgaactatcacagaggactagagacagcgatgcccatgtacatttctatttttcttttgatgggttgatggagatgcactcctggcttttgcagttatttctgcacatgctgcattcaactaaaagacctgctcaggtccccaaatgtctttttaaagaagacaaatcagggagagataggtgggaaaatgggtacatgtggaagaagaaaaacatacagggtactttcttgggttgtttgactgctgtctttgttctccaataaaatgataggaggcagaagtgagagaaagttgtttctttccctgtgcggttggtatctttcaaatgcatcttgtctagccttcagtgatttttcttcttcctgccacctttgcagtttttggttcgggttttcctgatgttctagccctgatcacagacccccagggaaccaccctcttcccactgcccccaacaccagtcttcccccctctgcagacctgaattacttcaaggggaagtcgattaatggcttatgttaatgaaagaagcttttcacttagtctgagctctgcgagggatcattaggaaggggagggggaggcaggggggcctcaggggagttaggacatctctgaaaataatgatcagtggaaacaaaagctttcccttcctggaggccccaagctatggcttgcttgaaaatgcctataataagtaacaagaataaacctctatcgaggcagttaaaaaatgaatattgtttaaatatgggatttattcctggcttctggtcattggctgcaagtctacaaggaaggttcagatttcaaagaagaggtgtaaaaaggacgagcctgggggaaggggagcctgagaggcgagaaggtcatgtagctgacagcgggcccgtgggaatgtcctggctgacctctttcttccaagcccaggcagattccagaggtaaaatgagcagtcaaacaaccacagggagatggtctgtctgtgagaggggccctcaggagtgcaggcgggctgtgattttacagggagccaggagcgcattgagcagtgggccagccctggggaagctagagggacaaaccctctttgctgatgccagctgggaagctgaatgtcaactgcgggccaggtggggtgggggtcctggcgggccagtcccacagcaaagaggtactggaaagaggtaccattttgtatttccaaatggctctgggtgtgaatttcttcctaatttgcaatttacaatttagctatccactggcaatctctagactagagacagtgtgggtaagtggcagaatcaggtaggcagacagtttttaagaagcagctttctttccctgaatctgctgtctggcaagaccaagggcagctgaaggagtgggagtggtaaatggaggcagaagctctctctcggatctctgattttcaaacattctgaaccacatgccacagtcacagatactgttacagttctttttcctcacacttttcagaggtttaattgggctttctgacagaaatcttgcttatgcagcacactcagatttttgctgctaattgcagagcttttatttttcttgtcagcggtcaccttaattgtcttgccccaaagagccccacccagccctgtttggtgccacatggttttctttgaaaggctctgctataacagtgagaattactgggtgtccttttctaagtaaacaggaaatatcactctgttagaaaaaaaaaaaaaaagaatccctcttctcagcacaaatgcaataatgtgccgacttatatttcctgttaatgttaaattaggagcaggatctatttcttacaccagcccagtcttcttagcttctaaactttcaatgagcagaaccccagggaagcctggctgcctagggcattttagaaatgcttccactgatttgcgggaggcagtagcatcacagtttggaaagataacaatgcattcaaacaaaacaaaacaaacaaacaacctgtgcaaaatcacaaaggggcaagatgatatgcttctaaattttaagtcacagcacgtgtttatgttctgatacttgatcacctttctatataggaaaactctgaagccttgagtcaggaaggagaattgacccagggcaggaggaagaaacgcaggaaggatggctttttttcccattacatcagaacctgggttcgtgtgtcaggcaggcacagcccaacgagtcctccacacacgagcacagtagaagccagcaggatggggattgatttggtgatgctgaccagagagccaaatattaagtttcccaggacggctgctgccttgcatagcgcatttaagaagccaaagcctgttgccctccggtctgtggggtacagttccacagtgaccacgtcaagagagttccaggctgagatggtcaatccattgtacagacacagcatgcctatcatcatggattcactggtgccgaaccaaaggaagaaacagctgatccccgaaagcaccatagagccacctagcattgttaagcgcccaattctgtccatcagcagagcagacacaatgttccctggcaatactgccaatgtccccagaaagttgacaaaataaatccagtaggcactatagtcatcatcaaaggtaatctgacatcccgtcttgttgtgaaaaaacgagcagtttttaaattcactgtcaatgaatttatatggctcaaaatctgtgttgtcaaaaacagtgtcaataaatgtgcagttcttgaagtaggtgttcactgaagttacatcctcaaaggtgcaggacttaaaaacagagtctttgaaagttacagatttgaacttgacccctatgaatctgccattgtcgtattccattccagtatgaatctgattttccattgtaaagttaatagtgaaatttgcatatttatctctctccacatttctggttagcaatgcatattcatcggactgcagaggtttaatgacatcagggaaccaaacggataatccatagtacccaaaggacagggtgaaccaaacaattgtaagctttattgtattatccctgactgggtagttgaaacatctcataaaagtcaaccaaattccgtacagctcggtgcggatccgaacaaaacacctcctataccatgttcctgtgtcactctcaatttcaatcagctcatctatttgtttaggagtttttattttgtttaccgtgaagaccttctcaggctgaccccgggctctcatgttggtgtcatgaattaacttcagaatcatccaagcttcatcatgttttccaacctccaacaagaatcgtgggctttcaggcatgaatgtgagggccaccacggaggagacacaggggagtgcacagacgatgacaaacacacgccaactgtgaaactggtaggccgatcccatgctgaagctccacccgtagtgcgggatgatggcccaggccatggcagaggcgtagatgccaccgatcatccagaacatgcagagccagctcaagtgttcgccccgcttttcccgggccaggacttcagcaaagtacgagaacacagtgggtatggctcctccaatcccgaatccagaaagtaagcgac

SEQ ID NO: 132314 - DNA, 1962 bp, Homo sapiens
atgttgcagacgtttttcgatacgttcaggcagttgtgctgcaatttgcggcgtcgaatcgacaagaatgatgaccaaatagcatgcccccatgcccccccacgttgcatgcctgcatgcgtggtgcgtaacggcaaaagcactgccggacatcagcgctatctctgctctccttgccgtaaaacatggcaactacagttcacttacaccgcctctcaacccggtaagcaccagaaaatcattgatatggccatgaatggcgtcggatgtcgcgccaacagcccgcattatgggcgttggcctcaacacggttttacgtcacttaaaaaactcaggccgcagtcggtaacctcgcgcatacaaccgggcagtgatgtgattgtctgcgctgaaatggacgaacagtggggctacgtcggtgctaaatcacgtcagcgctggctgttttacgcgtatgacaggatacggaggacggttgtggcgcacgtcttcggtgaacgcactctggccacactggagcgtcttctgagcccgctgtcggcctttaagggtgaattttcgctgttgattgtcgatgaatgtcaccgtattggtgacgatgaagagagccagtatcagcaaatcctcactcacctgacaaaagtgaatccccacttacgcctgctggggctgactgccacgccttttcgattgggcaaaggctggatctaccagtttcattatcacggcatggtacgcggcgatgagaaagcccttttccgtgactgcatttatgagctgccgctgcgttatatgattaaacacggctatctgacgccgccagaacgactggatatgccagtagtgcaatacgatttcagccgcttgcaggcacagagtaacgggctgttcagcgaacgcgatctcaaccgtgagctgaaaaaacaacaacgtattaccccgcacatcatcagccagattatggagtttgctgcaacgcggcaaagggcccagcgttttcgctatctggtcaacgtcgcggtactgaccaccggatttgacggcccgcacgtcgatctaatcgccatcggggggggggggaagggggcaatgcttgtatgcctgctgatcctgggggcgcatcgctacatcacgcgcgatgccagcgccggaagtgaaaaccatatcgccctgagcgagcaggagttttttacccgcgcggggcaaaatctgttggccttaagctggcacgctaacggtctgtattatggcgtcggcgtcgagattgatctctggctgcacgccggattcgacgtgctggtcaacggctcacgcgcccatctgccgcaggcgcgggcgcgctatcaatcggcgctgctgcccgtctgtttacaggtttcgccggagatcctccgccagcgcctggaaaaccgtggccgtgaaaacgccagtgaaattaacgcccgcctggcgcgcgccgcccgctatactccacaggattgccatacgctcaacaatgacggcagcctgcgccaaaggagaaacaccatgcctgcttgtgagcttcgcccggccacgcagtacgacaccgacgcggtttacgcgctgatttgtgagctaaaacaggcggagtttgaccaccacgcgtttcgcgtgggttttaacgccaatctgcgcgacccaaacatgcgctaccatctggcgctgcttgatggcgaagttgtcggcatgatcggcctgcatttgcagtttcatctgcatcatgtcaactggatcggcgaaattcaggagttggtggtaatgccgcaggcgcgcggtctgaacgtcggcagtaagttactggcgtgggcagaagaagaagcccgccaggccggggccgaaatgaccgaactttcgaccaacgtgaagcgccacgacgcgcaccgtttctatctgcgcgaaggctacgagcagagccacttccgcttcaccaaggcgctgtaa

SEQ ID NO: 132315 - DNA, 715 bp, Homo sapiens
atggcatactattagtatattaatctacctacgcgagaccatgatttttacacttcgcccatatccgcacgaacccgtggatgccacgctcaaccattttcgcccccataaaacccctgccgttatcgcgctgcccaccggcgcaggtaacagcctggcgatagcggaactggcacggctggctcgcggtcgcgtgctggtgctggcacacgttaaagaactgttggcgcaaaaccatgcaaagcatcaggcgctggggctggaagccgatatttttgccgccgggctaaagcgcaaagagagccacggtaaagtggtatttggcagcgtgcagtctgtcgcccgtaatcttgatgcctttcagggcgaattttcgctgttgattgtcgatgaatgtcaccgtattggtgacgatgaagagagccagtatcagcaaatcctcactcacctgacaaaagtgaatccccacttacgcctgctggggctgactgccacgccttttcgattgggcaaaggctggatctaccagtttcattatcacggcatggtacgcggcgatgagaaagcccttttccgtgactgcatttatgagctgccgctgcgttatatgattaaacacggctatctgacgccgccagaacgactggatatgccagtagtgcaatacgatttcagccgcttgcaggcacagagtaacgggctgttcagcgaagcc

SEQ ID NO: 132316 - DNA, 756 bp, Homo sapiens
atgataagacgcgtaagcgtcgcatcaggcaatgaatacccaatgcgaccagcttcttatatcagaacagccccaacggtttatccgagtagctcaccagcaggcacttggtttgctggtaatgctccagcatcatcttgtgggtttcgcgaccgatacctgattgtttgtagccaccaaacgccgcatgtgccgggtaagcgtgaagaggttaattatgaaactgggatttattggcttaggcattatgggtacaccgattattcgcgcaacgctaaacagcgattgcagcgcaataatctggccccaatattatttacaacaactgtcccactgggaggcaggcaatacaataattcccaacatttgccgcaacgacaatccctggaacggattaggcatcatacccaagccttcacggccttaattccccacggggctgcaggccagggctgcggttccggggaccttcattacctatccctggaagatgttgctgtatccagcaaagcaacaccagacggttccggggttacccggaaggcttccgcaaatttacgggttacaattcaaattggggggttccaattaaggacctgtggctttggaccttcctgccgtggctgccatccggcgctccagatttccagggccttggctgtagccgcgcatcagcaggcggctgacaataatatggaattcgccaattacggtccgtttgagttgcttcagtgctcgccagctcatcgaaagtaa

SEQ ID NO: 132317 - DNA, 799 bp, Homo sapiens
atggcgcaggcacagccttacgtcacgttccaagcccattctagcgtaaccacaattaccgaaaccactcaacagaaggaagacacttgcaggccaccgttcaaaaccactaaaacaacggtaaacggtttaaccgggatgtccgcatggctggcaagtacgctgtttgcgctggttgtcggtgcactggctgacaccatcggcttcagcccgctgttcgcagttctggcagtgttcgacctgttagagcgcatcgaacagggcgtctatctggtgggtgataaactgcctgcagaacgctttattgccgatgaaaagaacgtcagccgtacggtagttcgtgaagccatcatcatgctggaagttgaaggctatgtcgaagtgcgtaaaggttcaggtattcatgtggtttccaaccagccgcgccatcagcaggcggctgacaataatatggaattcgccaattacggtccgtttgagttgcttcaggctcgccagctcatcgaaagtaatattgccgaattcgcggcaactcaggtaacgaaacaggacatcatgaaactgatggccattcaggaacaggcgcgcggcgaacaatgcttccgtgattccgagtgggatttgcagttccacattcaggtcgctctggcgacgcagaactccgccctggcggctatcgtggaaaaaatgtggacccagcgtagtcataacccgtactggaaaaaactgcacgaacacattgattcccgtaccgtcgataactggtgtgatgaccacgatcaaatcctcaaggcgctga

SEQ ID NO: 132318 - DNA, 498 bp, Homo sapiens; identical to SEQ ID NO: 127948

SEQ ID NO: 132319 - DNA, 418 bp, Homo sapiens
tcttggtttctttttccagagaccgcttggcttcgggcaggaactgtccaaactctgagagcaggtcctcctggccccggaagaggttggccacctcggtgaacacctcctcttcagacatgcctcggaatggccggcccctcgtgttcagctgctccttctggtacgtgtgcaggatctccaggaatgacctgtagatttctgggtggtctaggaagcgggttttaatcttattcacatagctgatggcgttgttgaattccacggaatcggactccaggggcacctggggtttgtcctctttatacggcacctgctgcttgaagtcctctgcaccgtccccgtggttgtgcgaattctcctggcttgtcagaggcgactgtatgtttaacttgccattcttgggaatgtcacgaaa

SEQ ID NO: 132320 - DNA, 4290 bp, Homo sapiens
ttaaccagcttgtatggtggtaggaggctgatgatctaagtaagaggcaatcaccggtgccggtaagcccatcgtttttgccagtaaagcgatgctttgctcgcgctggctgcgggttaacgcatcggcctcactaaaggttgccagtacgccctgaataaaagcgccgtttttttctgcatagggacgagctgccagataaaacgatccagtttgattgagatcggtgccgtctttcagcacccgcacgccgccctgtaataatgcagcagagtagtagggatcccagatagcccaggcgtcaacgttaccttgctggaacgcggcgcgggcatcagcgggcgtcaggtaagtgggttggatatcggtaaacttaagtccggcctgacgcagtgcacgcagtaaaaggttgtgtgaactggaacctttctgaaaggcaactttgtgacctttaagatcggctacggttttgatcgggctgttttctgccaccagaatcacttcggctttgggcttcggtggctcgacgcccacgtacaccaaatcagccccggcagcctgggcaaagattggcggaatatccccggtactgccgagatcaatactgccaacgtttaacgcttccaacatttgcggacccgcggggaactccacccaggagatttttgattccggatagcgtttttccagtaactggtggctttttgccagcaccataccaatactgcctttctgatggcggttcggccgccgtgaggggctttcgttttgtttgggttgtccgtctcctgtcctgccgggggtgtgtcctttctgttgcgggggccgtgtttttgtcgcttggccttgcagaacatttttcagtgcctgcgctttacccgcgccgctgacaattatcagcaagtttttcgccgccatgatgcttttcggccccatcgtcacgtagctgtcaggcactaacgaaaagtcgccgcccaactcgccatgcgccacaatatcaaccatctctcccaccaaatccagtccgcaatcacgcgccagtttctgatcatgctcgcggtagttatcaatagtgagcttctggatattctcttctttgatccccgcaggggtgaaaaacagattacgcagattggtaatcgttacgccttctccctctttgccgcgtaaatggaatttcatctttaaccagggtggtgaggtattaacccgcagggtaccggaaactgatatccatctctgcatcaggccgatatcttctttataacgatgataaaaatccgtcgcctcatggctgggataaaactcgtcatctcgcaactgaaaacgtttttccagccccagtttcaccgccattcgatgctcgccgtgtgggatcatatcgacagtggtcagacctttgtcaccttcacggaacgcaccttcagattctttggcgacggtcggttgtacgctctgatactttcgcgcctgggcagccgcttcctcaacaggaatatcctcaaagccgagcaacagtgtgaggataaacgacagcaccaccgccagcgccatgaccgcgaacacccagacgatgctcattggattcgccggatcgaagaactgcacgctggtaaatagccccggcgctgccattgagtggctggcaagccccgccataccggcaaccgcgccgcaaataaaaccgctgataagactggcgataagcggacgtttcaggcggatcgccacgccatataacgccggttcggaaatccccgccataatggctgatgccgccgcagccagcgccgtctgacgcagttccgggtttttcgttttccacgccactgccagtgatgaaccgcccagcgacaggttagcgccgatctctgacggcattgacatcgcttctttgccggtttcggcactggtctggatgtgtatcgtacctaaaatttcgattttcgctgctctggctttgactttacgtgaccagatagaggtaagaattggcaccagaatcgaagtcacaatgaccgccgtcgctaccagcgaagttgctgccggagccatcggtttaaacgcaggcaccatttctgcaatcagcacaggtgtcgctaccgcggcccctgcggaactggaagcggcaattccggcagtgccatcgccaccgccaatcaatttatcggcgataatcaacggaataccggtcacgataattactgccacacccaacaggatccccagcaaaccagtctgggcaatcacagtcaaatcaatggtattgcccagcgcgaaggcaaagaatggaatcagcgtttgcaccgctttgctgaaaaattctcgcaattcagggtcaaggttccccagggcaaagcccaccaggaacggtaatactgcgccgacgaaaacatgcggttcaaacgaggcaatcccggcagtgcccagaataatcatcgtcatgagcggcccggactccaacgacatcaacacaaatgccccagcttcttcttttgtgccgtactgctgcatgatggaagcgtaaagtccgccattggtcatatccatcgccgccaccagcgccagcgttgaaagtccggcaaagaatccaacttcaacaccatgttccggaataatacgcgaggcaattgccgcaaccacccacgcgacggcaattttagttaccaccagcgtaccggatttacgcagtaccgttcccgtcgcgcttaattttattgacgcccccatgcaaaaaaaccacaccgccagaatgggcaccgtaccggtaatcatcccgttggtgaatgatccaaaatatttccccgccatgatgatctcctgctttggcgatcccatcgcaacggtgacgatttgcgcaccgctggcatgaatgcgttcaaacagcgcctgacgctgctcgggtttaaaataaccatcctgactgccaacgattatctgtttgctgacgggcaggttcagtacgtaaaaagtacccgcaggcgcaggtttcccgcgttgccggtgccgatctctgggaagagctgatggcgcgcgcaggcaaagaaggacgccggtatttcttgtgggcggtgaacctgaagtgctggcgcaaactgaagctaaactggtacgcagctcttctgccaccagcgcgattgcctggccgctgctcatcccttgtgccatcagttcctggatccgctcgacagctttttgctgctgttcatgggtgagtgaaggtaaaccagcagaccgatcgccagcaccatcgcgaacatggttaaggtgttgacgctgtaaccgaaggcgtaaagtacggagaaggttcccatcaacaccaccggcacggcgatagtgggtatcagcgtggcgcggaagttttgcaggaacaatttgcagtggcttcacgaccaataatttatccaccgtcataattgccagaacggtgaaggtgaggttgataactccgacaataatggtctttggtaattgcgacagtgggttaatttccccgacgatttcgcttgcttcgtttggcgccacgaacgcggccggcaattgcatggagatttccgccaacacgtgcgcccgcctccaatgttcatggcttttatcacggcccatgccatagactttcagtttgtcatgaccatagtcgcggatacgctggttattagcaccacgaatcacttccaccacataacccatcccaaaccgctgattcacacgaccaatggtggaaagggcaatctgagcatcggttgaaccgtcgtactgtttcggcggatcgaggcagatatcgcagttcccgcacggctcctgacgcccttcgccaaaatagttcagcaataccagacgacggcaagtttgcgcttcggcaaacgcgcccatcgcattgagtttgtggcgctcgatatcctgcaactgcccctgcggcttctcttccagacaacggcgcagccacgccatatcagccggatcgtaaaacagcatcgcttccgcgggcaggccatcacgcccggcgcgtccggtttcctgataataggattcgatattgcgcggaatatcaaagtggaccacgaagcgaacgtttggtttattgatgcccatgccgaacgccaccgtcgccaccacaatttgcaggtcatcgcgctggaatttttcctgcacatcggcgcgaacattattttccagcccggcatgataggccgccgcgctaattcccttgctttgcaggcgcgcagcggtgtcttctactttcgcgcggctgttgcagtatgaacttcgcatctcgctgcctgcagtcat

SEQ ID NO: 132321 - DNA, 627 bp, Homo sapiens
tcattccttctcctttcttcgtcgctcgtatttgatttctttcctttcttttgttatctttgggagtgctgcatgctctgcaggtccacctgctttcctcctcgccagctgcaccacctcgtgagcgatgacgtctgcctgaaggtggtggagctctaccagagaccgcttggcttcgggcaggaactgtccaaactctgagagcaggtcctcctggccccggaagaggttggccacctcggtgaacacctcctcttcagacatgcctcggaatggccggcccctcgtgttcagctgctccttcttctgcccgcccaaatagggactttgtgttttgtccccaattttggggaagtagacgtagcttctattgtgggacacaacgtttcccgcgttgccggtgccgatctctgggaagagctgatggcgcgcgcaggcaaagaagggacgccggtatttcttgtgggcggtaaacctgaagtgctggcgcaaactgaagctaaactgcgcaaccagtggaatgtgaatatcgttggcagtcaggatggttattttaaacccgagcagcgtcaggcgctgtttgaacgcattcatgccagcggtgcgcaaatcgtcaccgttgcgatg

SEQ ID NO: 132322 - DNA, 2390 bp, Homo sapiens
atggcgatccatcaggttagcccctttcgtgaagagccagtggattgcgttctgtgggttaaaaacagccaacttatgcctaatgattacaacccaaacaacgtggcaccacccgaaaaaaaactgctgcaaaaatccattgaaatagatggttttacccaacccattgtggtcacacatacggataaaaatgccatggaaatcgtggatggttttcaccgccatgaaattggtaaaggctcatcatcattaaaattacgcttaaaaggttatttgccggtgacctgtctggaaggtacgcgtaatcaacgcatcgccgcgactattcgtcataatcgcgctcgtggacgccatcaaatcaccgccatgtcggaaatcgtccgtgaacttagccagttgggatgggacgataataaaattggcaaagagctgggaatggacagcgacgaagtgctgcgcctgaagcaaattaacggcctgcaagagttgtttgccgaccgtcaatattcccgcgcctggacgctaaagctggcgcagcgttcagctgctgccagcaacgtcgattccttcttggcaaacagagacgaatcagtttatgggaagggatcggccaacaccgacagcggaatcgccgtacgccgtgctcctgcgtcagccactggcaaaactcaacatcatccaggaccagtgatgaacatggttgagaatatgctcgatcaggcattcaaaaagcttaatcctcacgagcatcctgttctgcactctgaccagggatggcagtatcgtatgagaagatatcaaaatatccttaaagaacatggctgcggcgtcacgccgattatgtcgatgcgtcgctggcttgcgaagaaccgtccacaggccgatgtgcgggtgatctacaacgtgcgtacgccgcaggatgttattttcgccgatgagtggcgtaactatccggtaacgctggtggcagaaaataacgttaccgaaggctttatcgctggtcgtctcactcgcgaactgctggcaggtgtacctgacttagcttcacgtaccgtgatgacctgcggcccggctccgtatatggattgggtagagcaggaagtgaaagcgctcggcgtgacgcgtttctttaaagagaaattcttcaccccagtagcagaagcggcgaccagcggtctgaaattcaccaaactgcaaccggcacgagaattttacgccccggttggcaccacgctactggaggcgctggaaagcaataacgttccggttgtcgctgcctgccgtgcgggtgtttgcggctgctgtaagacaaaagtggtttccggtgaatatacggtgagcagcacaatgacgctgaccgacgccgaaatcgctgaaggttacgcagtggtcgccctgataaagccaggcgcgcagattggtcgatccccagtcaattgcgatgtagcgagctgtcatgtgatttcctttaaccttcgtgtcgagctggcgatcatgcgccgcctgctctgccgcatcgccgtcctgatgtcgtatcgcatcgaacagcgccttatgttcctggagcgtttgcggcatgttggcctcatcgcccatccagccaaaaaagcgatcaaaaaaacaaggaagcctgggatgaaagtgacatttgagcagttaaaagcagcctttaatcgggtcttaatttcacgcggcgttgacagcgaaacggctgacgcctgtgcagagatgttcgcccgcaccaccgaatccggcgtttattctcacggcgttaatcgtttccctcgtttcattcaacaactggaaaacggcgatatcattcctgatgcccaacccaaacgtataaccagcctcggcgcaattgaacagtgggacgcccagcgttcgatcggtaacctgacagcgaaaaagatgatggatcgcgccattgaactggctgccgatcacggtattggtctgctacggctggcaggcggcggaaaaaggctatattggcatttgctggaccaactccatcgccgtaacgacaacatctctctggatctgggcaacaacgctgaagccgtgatcctgcgcgaagatatgctgccgcgtgaaaacttccgccctggcgaccgcgttcgtggcgtgctctattccgttcgcccggaagcgcgtggcgcgcaactgttcgtcactcgttccaagccggaaatgctgatcgaactgttccgtattgaagtgccagaaatcggcgaagaagtgattgaaattaaagcagcggctcgcgatccgggttctcgtgcgaaaatcgcggtgaaaaccaacgataaacgtatcgatccgcctactcaacatgaagatgaagaggatgaaggcctttatgatgatccatttccacttaatgaatg

SEQ ID NO: 132323 - DNA, 1968 bp, Homo sapiens
ctactgcagcagcccgggaaaggggggggatcccacgtgccctgcgcaggggggggtccgccatgatacaattcgagctcggtaccgtttttcacctgtaccgtacagagtaattccacccggagcggcagggacatataccgttccctgatactcaccaggcatcacggcaatatactggcgcttgttggtacgcttgataattgccgcatctaccgccgcctgaatcgtggtatgcgttacaccttgagtgcccgccgggccgacaacaaagtcaggttgcgcaggcagggtaatcggggaaggattccacgctgcagcacctggtgtcagggatgcaaaatagtgttgagcatcgaaattctgcgcttcttttgccgacagaatcgggcgagaagaggtaccaggcgcggtttgatcagaaggacgttgatcgggcggggttgagctacaggcggtcagcgtcacgccaaaagccaatgccagcgccagacgggaaactgaaaatgtgttcacaggttgctccgggcatcgcgccgctggcctatacatgattacgaatcgagctcggtcccgcctgagcaggcttctggaagccttgctgcagcgaagaacctttacgttttccgcctttaccgccacgtactgctgcgcgtgcttcttcacgatcagcttttgattcagcgtgtttgttgcctttcttcggacgcgctgctttcgcgttacgaccacggccacggccgccttcgacttcacgatcgctttcgtcttctgcctggcgagcatgttgagaagtagtgacgtgataatcgctggaatcttcagtcggttccgcgttatcagtccatttgttttcttccgccatacgacgtgcttcttcagcaacgcgacgtgcttcttcttcgagtttacgacgcgcttcttcttcagctttacgcttgagctctgcagcttcctgctcacggcgggctttttcagctttgtctttttccgcagcttcacgtttcgcttgttcagcagcttcacgcttagcttgttctgcggcctcacgttcagctttttgttgcgcctcgcgtttagccgattcttctgcctcacgacgggcttgctcttccgcttcacgctgcgcttgctcttccgctgcaaggcgttcagcctcttcgcgttcgtggcgtgctctattccgttcgcccggaagcgcgtggcgcgcaactgttcgtcactcgttccaagccggaaatgctgatcgaactgttccgtattgaagtgccagaaatcggcgaagaagtgattgaaattaaagcagcggctcgcgatccgggttctcgtgcgaaaatcgcggtgaaaaccaacgataaacgtatcgatccggtaggtgcttgcgtaggtatgcgtggcgcgcgtgttcaggcggtgtctactgaactgggtggcgagcgtatcgatatcgtcctgtgggatgataacccggcgcagttcgtgattaacgcaatggcaccggcagacgttgcttctatcgtggtggatgaagataaacacaccatggatatcgccgttgaagccggtaacctggcgcaggcgattggccgtaacggtcagaacgtgcgtctggcttcgcagctgagcggttgggaactcaacgtgatgaccgttgacgacctgcaggctaagcatcaggcggaagcgcacgcagcgatcgacaccttcaccaaatatctcgacatcgacgaagacttcgcgactgttctggtagaagaaggcttctcgacgctggaagaattggcctatgtgccgatgaaagagctgttggaaatcgaaggccttgatgagccgaccgttgaagcacggggcctgttgtcgggtggggggggggggaggatacctttgaagaatgcctatcctaaggacaggtaagggggcagccaccacatgggtatgtttctttttaccaaaccgccatgggcccat

SEQ ID NO: 132324 - DNA, 272 bp, Homo sapiens
ttaaactacagcggttgtcgcggcgacaaaagtggctgcgcaaccggctgatgacccgaaacgggcattcgccggtacgccgtagccgccagagacgccatcggaaggagtgagcatgtctgtacagcaaatcgactgggatctggccctgatccagaaatataactattccgggccacgatacacctcgtacccgaccgcgctggagttttcagaagacttcggcgaacaggcgtttttacaagccgtggcgcgctatcctgagcgtccat

SEQ ID NO: 132325 - DNA, 2811 bp, Homo sapiens
atggcgtggctggatctgcgtttcctgttctggctggcaccgattgtcttctcgttgatcctgtcaccgtttgtttcggtgatttccagccgtgccaccgttggtctgcgcaccaaacgctggaaactgttcctgatcccggaagagtattcgccgccgcaggtgctggttgataccgatcggttccttgagatgaatcgtcaacgctcccttgatgatggctttatgcacgcagtgtttaacccgtcatttaacgctctggcaaccgcaatggcgaccgcgcgtcaccgcgccagtaaggtgctggaaatcgcccgtgaccgccacgttgaacaggcgctgaacgagacgccagagaagctgaatcgcgatcgtcgcctggtgctgctaagcgatccggtgacgatggcccgtctgcatttccgtgtctggaattccccggagagatattcttcatgggcctacatcgttcggtaccggtgtttctctgtgttctacgacggctgtgtggatggagataagaagataaagaaggcaaacaatacacctctgcgacctcagctaaaaggccttggcccttcgaaaactgggcaccacccgggcgggaacggctctggggcacaggattttaccgccaaacccaaggtcacacgtgaaagtccgttgaccgtaattcatcctaaagctccggacgagacggcggtgacgtcaccgattaatcagaccatgggaactctttcagacggcccgcaatgcggaagtgatgaaagctctgtgcgtcatctgtggctggaagtgaagggcgtggatctggggcgatttcccgaacgccgttatggttctgataaaccggatctgcgtaacccgatggaactgactgacgttgctgatctgctgaaatctgttgagtttgctgtatttgcaggtccggcgaacgatccgaaaggtcgcgtagcggctctgcgcgttccgggcggcgcatcgctgacccgtaagcagatcgacgaatacggtaacttcgttaaaatctacggcgcgaaaggtctggcttacatcaaagttaacgaacgcgcgaaaggtctggaaggtatcaacagcccggtagcgaagttccttaatgcagaaatcatcgaagacatcctggatcgtactgccgcgcaagatggcgatatgattttcttcggtgccgacaacaagaaaattgttgccgacgcgatgggtgcactgcgcctgaaagtgggtaaagaccttggtctgaccgacgaaagcaaatgggcaccgctgtgggttatcgacttcccgatgtttgaagacgacggtgaaggcggcctgacggcaatgcaccatccgttcacctcaccgaaagatatgacggctgcagaactgaaagctgcaccggaaaatgcggtggcaacgcttggggatcctctagagtcacctgatgatggactacacaatcgaatctcaactcatgggtgcttttacgtgttatgtgggatctcgaccaatatcggtgttgaatccaccgcccgcaatgcctgggaacttggctttaatctggtgattgccgaagacgcctgtagtgccgccagcgccgagcagcacaataacagtatcaaccatatctacccgcgcatcgcccgtcgtggaagagatcctcaacgcgttatgatttacatcggtctaccgcaatggtcgcatcctaaatgggtgcggttggggatcaccagccttgaagagtatgcccgccactttaactgcgtggagggcaacaccacgctttacgccctgccgaaacccgaggttgtcctgcgctggcgtgagcagaccacagatgacttccgcttctgttttaagtttccggcgaccatttcgcatcaggcagcattacggcattgcgatgatttagtgactgaatttttgacccgcatgtcaccgttggctccgcgcattgggcaatactggctgcaactgcctgccacattcggcccacgggagctgcctgcgctttggcattttctcgattctcttcctggcgaatttaattatggcgtggaagtccgccatccacagtttttcgccaaaggagaagaggaacaaacgcttaatcgcggtttacatcagcgcggcgttaatcgggtgattttagacagccacccggttcatgcagcacgtccacacagaaagctaggcggtacagcggtgtgggagtgggaacccgaaggggcccactgggtgggagacgaaccaggctggtttagctccggcgatttgagcaaagccgaatattgggcacagaaagccgccgacagcggtgatgctgatgcctgcgcgctgctggcgcagatcaaaatcaccaatccggtcagtctggactatccacaagcaaaagttcttgcagagaaagcggcgcaagcgggcagtaaagaaggtgaagtaacgctggcgcatattctggtaaatactcaagcgggtaaaccggattatccaaaggcaatttcgctgttagaaaacgcctcggaagatctggagaacgactctgccgtcgatgcccaaatgctgcttggtttgatttacgccaacggcgtgggcattaaggccgacgatgacaaggcaacctggtatttcaaacgcagctctgcaatttcccgaaccggttattccgagtactgggcgggaatgatgttcttaaacggtgaagaaggttttatcgagaagaacaagcaaaaggcgctgcactggttgaacctgagctgtatggaagggtttgataccgggtgtgaagagtttgaaaaattaaccaacggttaa

SEQ ID NO: 132326 - DNA, 2106 bp, Homo sapiens
  misc_feature (1)...(2106): n = a,t,c or g
atggagacctctctcctctgccatctgtcacgtggaagagcagatcggtttttggaagtctttggggcagtgggaaatcaagcttgtctgcaggcagcaggagatactacagttcctggttccggagagaagggccactttctgagagagactcttgctttgttgcccatgctgcagtgcagtgtgcgccctccaagtggagaatcatcttcaggtgcaaacaccggggataaacgggggttggagacaactcgcgcgagggacagtcagggagagaggcgatccacagcaagaaaggaggagatcatcgacacgttcgtgtttgttctggttgtggtgttgcgcccacagcaactgcgcgagagacgcagcagcgcagcagcgatgagagagagcaccagcgacagcggcagatcgttgacaccgcagcccagtttcgtctgccagagtgacagccagaataatcgcagagtaagcatcgttacagtgacctgcattaaccagagtgtacacatgatcatctacagtnagcatatctcgttgtcggtgatacgaggacgagtgcgtgtcgcgtggccttcttgcgtctattacgaccagcgtggtgcaaagggtggagtgtgcatgcagagggcggactatagatgcttgcctacaagacacgccgcagcacccactccgcgtcccaccacatcagcgccacactcaccggcacacgccgaacacctgcccccctcccccccgacgtccccccacacgccgccgcacaccaacgccgccggccaccctcccaccacatcgaaaccgccgtgcgcctatcgggaacaatggctgattcacccggagaacgactctcgcccgtcccccactgtcacgaaaaaagcagatccgcggcacaccccaccgggcacacgcccccaaccaccgcatgccgtaaaccccctcaagacgtcttctgacaccccctcggctttgccacccacaccaacccccatcagccggcctgtatttttcgatccggatcgtgcgacggcgttaaagctggcctctgaactgcgtaatgagttctgcattcaggtcacgggcaccgtacgtgcgcgtgacgaaaaaaatattaaccgcgatatggcgaccggcgaaatcgaagtgctggcgtcctcgctgactatcatcaaccgcgcagatgttctgccgcttgactctaaccacgtcaacaccgaagaagcgcgtctgaaataccgctacctcgacctgcgtcgtccggaaatggctcagcgcctgaaaacccgcgctaaaatcaccagcctggtgcgccgttttatggatgaccacggcttcctcgacatcgaaactccgatgctgaccaaagccacgccggaaggcgcgcgtgactacctggtgccttctcgtgtgcacaaaggtaaattctacgcactgccgcaatccccgcagttgttcaaacagctgctgatgatgtccggttttgaccgttactatcagatcgttaaatgcttccgtgacgaagacctgcgtgctgaccgtcagcctgaatttactcagatcgatgtggaaacttctttcatgaccgcgccgcaagtgcgtgaagtgatggaagcgctggtgcgtcatctgtggctggaagtgaagggtgtggatctgggcgatttcccggtaatgacctttgcggaagcagaacgccgttatggttctgataaaccggatctgcgtaacccgatggaactgactgacgttgctgatctgctgaaatctgttgagtttgctgtatttgcaggtccggcgaacgatccgaaaggtcgcgtagcggctctgcgcgttccgggcggcgcatcgctgacccgtaagcagatcgacgaatacggtaacttcgttaaaatctacggcgcgaaaggtctggcttacatcaaagttaacgaacgcgcgaaaggtctggaaggtatcaacagcccggtagcgaagttccttaatgcagaaatcatcgaagacatcctggatcgtactgccgcgcaagatggcgatatgattttcttcggggccgacaacaagaaaattgttgccgacgcttcttatttagtctcgtggctttaa

SEQ ID NO: 132327 - DNA, 4401 bp, Homo sapiens
atgtgtattcccgtaccgccaatcgccacaggtgatcgacacttcatcgccgttgctcatatccaccagaactctcggcgctcgcccgttgatagcgacgagagttcgacgcgttcagcagtcgcagcgcacccagccacgcgagacttcaacgtacgggctttgtacaccgttaccagcagcgtatcaccaacaaagccgccgcttcccgccacattccggcaaggccgttatagacctgctgagccgtgcgttgggagtattggcgtgataccacagagtagctgcgttctggcgaatggcagtacgggtgcccagtcagcgtttggcgacatcatccgtgccggaccgccatcagcgggcctggtacctgtagcccaggccaccgtcattgagacatttctgcgatatcagacaattaacgaaagggacttttgggcggcaaggaaccggttgttaaaacaaccttatgggtcccggattctgcgattcaccgaggcctacgccatagccgaacgagcagctcagagcgtcttgagaataagcctggccgatgcttttaacgtcgatggcccgcgcccagcggaagattccatattcaggttgctgcgcatgcctggtagcgccgtgcaaaggccggaccggcggcacaatcgccgctgtcagtaccgcccagcgatggcgtttccagctggaagtaaagccaacaaacagcgccagtacaatggcggtcgccagttttaccggaagcgaatatgttggttagcaatggagaaaatacccatcgtgattaaccatagctcacgcaggcgatgggccattttacgtgaaggaacgaatcctggcttcgtcgcgatctgtttgccagtgaccaccactgtagcagtggtgcccgaggccagatgttctcttgctggttgtcgagacgatatacgcgttattgataaggacatctgcaaaggcatgatgccggtcgtcacgtactggaaacagagtgccatctgccggtgcgcagtgagcaaggaccatggcgatgacccttttggcgattgccctgatgcccagtcgccgtgtgcatatggaagtcgcccgcgccagtcgcgtggcgaagaatctattctcatcggtcacgccgggcacccggaagtggagggacaatgggccagtacagtaacccggaagggggaatgtatctggtcaatcgccggacgatgtgtggaaactgacggtcaaaaacgaagagaagcttcctttatgacccagatcacgctgtcggtggatgacacgtctgatgtgacgacgcgctgcgtaagcgcttcccaaaattggcggtccgcgcaagatgatctgcgccgacttagtttcacaccaaccgtccagccagtcggggccaaaatcacgcccgttcctgactgcttcatcccaccaaacggtttaccaccggaccaaacacctcttcacgagttaagcgcaatttacatcgggatttaccaccagcgttggcgcaacataatacccctctccggcggtccattcgacccgcgaatcagctctgcttgctgtgcctgcgcatcgtggaggaatgaacacactttgtcgcagtgcgcacgagaaaccaaagggttatctgtgcaacagcacctgcccggtgacgacattgaaaacgccatcagggataccagcctcgctgggcgttccgccacgcgcaacatcgtccgagcagcagctcatgcgtcagtgactctagaggatccctgcctgattggctgcgcttatcaggcctactgggttactactccgacagcaaaacgggccacttactctcccagccatcaacagctcgacccccgttctctattacgacaaagacgccttcaagaagcaggattagacccggaacagcccgccgtaaacgctggcaggatctggcgactatgccgcgaaactgaaagcctccggcatgaagtgcggctacgcacgcggactggcagggctggatccaactggcaaactttagcgcctggaacctccaccgattttgagaacgacagcgacttccgtcccgccgtgccaggtgctgcctcagattcaggttataccgctcaattcgctggtatatcgcttgctgattacgtgcagctttcccttcaggcgggattcatcagcggccagccatccgtcatccatatcaccacgtcaaaggtgcgttcaccgaatacgtggcaacaaccgtcttccggagcctgtcatacgcgtaaaacagccagcgctgcgcgatttagccccgacgtatccccactgttcgtccatttccgcgcagcgatgacgtcactgcccggctgtatgcgcgaggctcgtggagataccgtggtcgtagcgcagtctgcattctatgtgaagatctgggacaagcgacgacgtggacgcaggtctggtgtttgccgctacttttgggtcgtcgtcttgccgcattccctcgtctactatcctgaccatctgcatgtcgtcttccggacggctggcgctgtcgcgatcaacattgacatagccaccagccctttgtcctgccagtcgctggagacatcagaaagctgtgcagttgctggagtttttccatcaactgtggcacccagcgggaaatttttcgatcaccacgatggcgtcatcgaccacgaatccggtggcgatagtaacgccatcagtgtcaggttattgattgaaaaatcgagaaacaccataccgctaaagttttgtattaaacccgcaggtaaccgcctgcccgacccggagctgcacccggacagcaccctcagatgtggccggataaccgtatcgcccgctgacggagaaaaccgacctcatcccggaagggttatccgcacggatgatgagcgcacccaccggtaccattacgacagtcacaccggctggtgcactacacgcggacacaatatgcagagccgctggtcgaagccgctatctttacgacccgctgggccgcagggtggcaaaacgggtgggcgacgtgaacgggacctgacgggctggatgtcgctgtcacggaaacccaatgacctggtacggctgggacggcgaccgcctgaccacgatacagacgacagaacccgcatccagacgatttatcagccggggagcttcacgccatcatcagggttgaaaccgccaccggtgagctggcgaaaacgcagcgccgagcctggcgcatacccttcagcagtccggcggcgaagacggtggcagtgggtgttcccgccggtgctggtgcagatgctcgaccggctggaaagtgaatcctggctgaccggcccagctccagccacacttcgtaaccctggtccttatattcgcaaagcagtccagcaccgcatccggcacgcagtccgggcggttgctcggcaatggacgatgctgctgcgcttcatcggcaaacgaggcaacattacagaatgtgagccaccacgcccgatggtaccgtcacggttagggcagctaaaaccgcctgcagcgtcagcttatgcaccttttgcccataacgacgggcctggagcacttggagagagtggctcgtgtgccctccatggaccctctctctccgttgggcacatcagtctccagcgctacttgagatcatcggttgtctcattccttcgaccatttcggcctatgctcgtccggtattgtgcaacatctacagttctacccactatatgttccacggcgctaggtggcttcgacgcatatgtgggatgctactgcgacgttaaacttgccgcaggaaccgtcactggtggatgcgagctggactggcaggaaaatagcgggcaattgatcgtgctggcacgggtaacggcgatccgttgctcgatttgccgtggcaaattactcgtcaacaatgaccgtaagcgatggtcgctggagctggcctggcgctactggggaaagggagttttacacgcgtatgcaatgccacctggcgatgtcgcaggacaagacgcgcgccgctgtcactggtacccgggtgcaaacgctgttcactggcggcagtgtgttaccgccatcaacctaaaatttagcgtcgatgggcgcgatcctacctatttcctctttaaagggatttacatgctggtgagattggcccggttcgggattcccgcgggaggacacggcgtgttgaaaggcggtagtgcctggatgccagatatcaggttaacggtgtcgattttgtcctgcctttccgttttgccgatgggcctggcatctggggactcgcggtcccgttacgttgcgaattgccgaaggattaatctggtgacagcgaaaaatattacggctgatttgcaagggcgtatccgtggactgaagaagaacccttgctgttga

SEQ ID NO: 132328 - DNA, 903 bp, Homo sapiens
tcagtctcgttggagcaggggatccacccattttccgcgagaaactgcctgtgtcgcaatgatccctaaggtaccaagttctttcgccagttcagccagcgttacattcgggttatttgccaggggatgatcgtgcgggatcatcgccataagcggttcatggacgatgactgcgtgttcaagcgactccggtaacgctgtgttagggtcgactctacaggatcttgattgtctgatgaaaatgagcagtaaaacctctacaggcttgtagctcaggtggttagagcgcacccctgctcctcctttgccttctgccttgattgtaagtttcctgagtcttgaggatcctggccagttcctcgatccgatcgccgacaagatcatgatcgccgcggtcatcctgtccgaggtgactctagcggatcccaacatattcgctttgcggtaaaactggcgaccgccattgtactggcgctgtttgttggctttcacttccagctggaaacgccacgctgggcggtacttaaaaagtttgccatccagcgtatcggcagatggcgcgatcgttgccgcattggctacccacattggcgaagcggaactgacgctggaaagccagtgcggtgcctggcgtgcaactttttccagtacctgctcatcgctaccactgaatcccaactgacgcagcaccggaataaacggacgctcgtgcggcgggatcacggcctgggggaatcccgcatcggcaagggctttcattttcagtaagccctgcttcgccgccagtcgcgggttagacacctgaaaacggtgacgggtagaggcttcattaccaaacgacaggcccgcgtaatgatgcgtcagccctaccagcccgtcgaaattgacttcccaggcgttcat

SEQ ID NO: 132329 - DNA, 709 bp, Homo sapiens
tcagcccacatccatgtggctgccccggccttcagggaacgcctcggcaattttgacgccaccaaacaccgtgcggccggaatattcagccgctggcgaatatcgccatcgcctgccagtcaatatgctccgcgcggtaaccatctctattcgtccgttctgcaccaccagctccgcagtgccagcatttttaacaaacgtgtcctttaaacagaagtatcgcgtcccgtcttgaagcacgacaacctgatggcttatgtttattcgtaagggcgccttgaatgggtgcgtcttgcgcaacgtgttccggttcgtattcgtctcgacaaccagcaagagaacatctggcctgcgggcaccactgctacagtggtggtcactggcaaacaagatcgcgacgaaagccaggattcgttcttccgtaaaatggcccatcgcctgcgtgagtttggttaatcacgatgggtattttctccattgctaaccaacatattcgctttgcggtaaaactggcgaccgccattgtactggcgctgtttgttggctttcacttccagctggaaacgccacgctgggcggtactgacagcggcgattgttgccgccggtccggcctttgctgcgggaggtgaaccgtattctggcgctattcgctatcgtggctttttgcgcatcatcggcacatttattggctgtattgccggactggt

SEQ ID NO: 132330 - DNA, 1707 bp, Homo sapiens
atgatcgaagtaaaacacctgaaaacgctacaagcgttgcggaactgcggctcgctcgcagccgctgcggcgacgttgcatcagacgcaatccgccctgtctcaccagtttagcgatctggaacaacgccttggcttccggctatttgtgcgtaagagccagccgctacgctttacaccgcagggagaaatcctgttgcaactggcaaaccaggtactgccgcaaattagccaggccctgcaagcctgcaatgaaccgcagcagacgcgtctgcgcattgccattgagtgccatagctgtattcagtggctgacacccgcgttagaaaatttccataagaactggccgcagtattcagtcatttttaaatcgggcgtgacatttgacccgcatttcttctttcaacagggagagctggatccggagcgtgcctttgacgattttggaatcaagccgatggcttctgcttctatcgcccaggttcatagcgcgcgattcaactcgaatggtcacgaggtggtgattaaagtcatccgcgcggagactttgccggttattaaagcggatctgaaacttatctaccggctggctcgctgggatgccgcgtttgctgccggatggtcgccgcctgctgcgaacctgagttgcgcaggcagtacgaagatacaccgattgatgaaccgaacttgctgccgcaatctgccaacgccattcagcttcggcgcaaagccgggactgtacctcgtcgaggcgatggttggtgggtatcgggcgacgacggtggtgtttgtttccgataccgtggcgcttagcaaagtgtcaggcatagagcttctggtgtggggcgcgggtaaaaaacagggtgaagcgaacgccggctcagagatcttgtggactgacggtcttggcgtgatgacccgcggtgtgaccgatgacagcggtaccttgcagttacaacatatatcgccagaacgttcatacattctggggacgttagcgatggtgcaattacgggaagacatggccaagcggcaagctgcaggtattatagcaccacgatcgggtcgcaggatgcacaggacacagcataagcctccaatgaccaccgagatgggaccgcgtgccgtactgcgtgaagataccattccgtttcttgaggcactgaaagccagcggtaagcagcgaattttgctcaccaatgcgcatccgcacaacctggcggtaaaacttgagcataccggtctggacgcacaccttgatttattactttccacccacacatttggttatccgaaagaggatcagcggttatggcatgcggtggccgaagctacgggtctgaaagctgaaagaacgctgtttattgatgacagcgaaggagacgccatgaaagagaaacctgctgttgaggttcgactggataaatggctatgggctgcccgtttttataaaacccgcgcgctggcccgtgaaatgattgaaggcggtaaggtgcattacaacgggcagcgcacgaagccgagcaaaatcgtcgagctgaatgccacgctcactctgcgccagggaaatgacgaacgcacggtgattgtaaaggcgattactgaacagcgtcgccccgccagcgaggcagccttgctgtatgaagagactgcggaaagtgtagagaacgcgaaaaaatggcgctggcacgtaaacttaatgccttaa

SEQ ID NO: 132331 - DNA, 2562 bp, Homo sapiens
ttatccgttctgcttttgcatccactccaccacaaaatcagccagcccctcaacatcattaatatccagtaatgcgacatgtggagaaatcgtgcacgggattgagattgaggagaaagtccagatcccatccatgcccttcatatccccgtggagcagaaggtatttttctggcttctgctctctcaaattctcaactgtgcaatacccacaacggcaggcacacttcacgggtttttcctggcaaaactttgacgggtgcgtttcaacggaaggggagaagccacccttctccatggctgtgtgtgtgcctatggtctgctcaggtcccgggtgtagcaccgcaggtgattcatcgccgtgggtcgttatcgccgtggtcagtgaggtattgtcggcgataatctgacagccaggcagttgaaatgcgatgcgatcgcctgattcaatacccttcgctaacatccagtttgccagacagctcgcggcgggatcgagcgcgctataggtgtacgatgcaccatgattatcgaccacggcaattttgtctggcatcgcacgacggtctgctgccagtaatcggccagcgaagcatcgccccataacccgtgccagactcagcacgtcggcgtgttcatatcccaggcgttcatacattccgagcaccatgtcgttatcttccggcacattgactccgcgatgcccgtcataaccgcccatcaccgttccgaccacgtcaccgtttacctcagcgaccaaaaacaaactgacgtcatggttcatcttacgctcgatgtccatttccggatcgttccacgacgcagcaagtcgcacgctcccaagggtgatgacctttcgagggatatagctgtcgtcgaggcctgacccagaggattccagggcgcacgacaacgctacttcggtcgcccggaagacggcacggttacggcgaactgcgatcgtatcgaaaaccgttacaacggtacggtaaaccactacttcctctgcgaccgtggtcgtttcggttacggttacgtcaacctgaaggatcgtccgcgtcagccagtacagcgtcgtggcgatgatttcattaccaggcaatgcagggccgcggcagatattctgcgtcagtcgaagaaagtgatcggtattggttctccgcgtgccagcgtggaaagcaactttgcgctgcgtgaactggtgggcgaagaaaacttctacaccggtatcgctcacggtgagcaggaacgtctgcaactggcgctgaaagtgctgcgtgaaggcggcatttatactccggctctgcgcgaaatcgaatcttacgatgcggtactggtgctgggcgaagacgttacccagaccggcgcgcgcgtcgcgctggcagtgcgtcaggctgtgaaaggtaaagcgcgcgaaatggcggcagcacagaaagtggctgactggcagattgcggcaatcctcaacatcggtcaacgtgcgaagcatccgctgtttgttaccaacgttgatgacacccgtctgcaagcctggcaaaaagcacaaatcgacgtcatcgtgcaggcactggcagtgcaagaactcctgcaggttgactctagaggtatcccccagacgcacttcatagtcgaacatcggcgaataatgcaggccactgcgcggcagaatatcggacgtcattaccagatccagctctccctgttgcaaggcgggctgttcatcaaatgtcacgcccgatttaaaatccatgtctacctgcggccagttcttatggaaattttctaacgcgggtgtcagccactgaatacagctatggcactcaatggcaatgcgcagacgcgtctgctgcggttcattgcaggcttgcagggcctggctaatttgcggcagtacctggtttgccagttgcaacaggatttctccctgcggtgtaaagcgtaacggctggctcttacgcacaaatagccggaagccaaggcgttgttccacatcgctaaactggtgagacagggcggattgcgtctgatgcaacgtcgccgcaacggctgcgagcgagccgcagttccgcaacgcttgtagcgctttcaggtggtttacttcgatcatgaaaagccttcacttcggcatgaataatttgcgcttgaggaatatacaggaactcgcaattaaggatgtgtaaaccttctggaccggtaaaagcctttcccctttaaatttatggagcgatggctggcgttctcccccccgggccttactttagaaagctcccggggatgaatgaactttggcgcctccctaaattccccaacccctaggagttacctttcattggggggagaaaaaaaggcccctgtttgggagcacacccttggggtcccctcccgtaggcctgcggccgggaagctgaaaaaagcgccagaaaggtattggggcggggaacatccccccgtgaaaaaatggctgggcgggtaggcccggaaatgccggcctcgtccctgggaaaccctctagaagtcccacctgcggcgccggccaagcttggggccttgggccggcggttta

SEQ ID NO: 132332 - DNA, 3126 bp, Homo sapiens
atggaactccggggtcggcccgcggtgatcgtgttgtgggcgtgtgtgcgggggccgtgggctgtaggtcgaagacgctgtcctagtctgaggaacgggtcgtcatcgggtggagtgatgtgtcggcggctcgcggatgttggtggctgccctttcggcttctcaggcgagacgcgcgttgtattgccggccaatgaaggggtagggagaaccacttcaccggtgcgaatggatgattgcccgttaaccgttgtcactgcgcgcattgctgcgctcactttcggcgcacacctgaccgacggttatgttctcggcgtcattggttacgccattattcagcttacgcccgccatgcaactgacgccgtttatggcgggaatgatcggcggctcggcgctccttgagcatcttattggactgcgcattttgattggcattggtctgggaggcgattattcagtaggtcacaccttgctggctgaattttccccgcgccgccatcgcggtattttgctgggcgcattcagcgtggtgtggaccgtaggctatgtgctggcaagtattgccggacatcactttatttccgaaaacccggaggcctggcgctggctactggcatcggcagctctgcccgcgttgttgattacgttattacgctggggaacgccagaatcaccacgctggctactgcgccaggggcgttttgcagaagctcacgctatcgtgcatcgctattttggtccccatgttttactgggcgatgaagtggtaacggcgacccataaacacatcaaaaccttgttctcttcgcgtactggccggcgcacggcgttaacagcgtcttctagtctgcgtcgtagtaccgagctgattatagaagcgacggaagcattgagcgggtatgcccttggtttgtatggtcggactcaggccgtttgtcagattccgtttggcgtgctttccgaccgcattggtcgcataccattagttgtcggtgggctggcggtgtttgccgccggtagcgttatcgctgcgctttccgactccatctggggaattattctgggccgggcgctagcaaggctctggagcaattgccgccgccgttatggcgctgctttccgatgtcacgcgcgaacgaaaccgcaccaaagcgatggcgtttatcggcttgcgatggtgcttggcccgatcatcactcacaaacttgggctgcacgcgctgttctggatgatcgctattctggcaacgaccggcattgcgttgaccatttgggttgtgcccaacagtagcactcacgtacttaatcgtgagtccggaatggtgaaaggcagtttcagtaaagtgctggcggaaccgcggctgctgaaactcaactttggcattatgtgtctgcatattttgctgatgtcgacgtttgttgccctgcccggacaactggctgatgcagggttcccggcggctgaacactggaaggtctatctggcgacaatgctaatcgcctttggctcggtcgtgcctttcattatctacgctgaagttaagcgcaaaatgaagcaagtcttgtcttctgcaacgcgggagaaacgtccgcgcttcaatggctttcgccgccacagtggtgttcgccaggcagataggttcgcggcaactatcgcagcggtacaatgctttgcaggccgtggaaccaaattcactgataagtgtggtatggacgctggcgcagcgcgggcaacgtacttctggcggcaaatgggcatggcaactgtgtccggcgggcgggctaatgccatactctcgcagacgctcacgggcatcgggggtcatccagtcggtggtccatgccgggtcgagttgcagcacaacctgaacggggtgacgagcacgcaattcacgccctaccgccagcagttcttcacgcgtggagttccccgcccaataactttcttgcgcttttttcagctcgcgacgcaggccaacgcgagggaaaccgaggcgatctggaacaacgccttggcttccggctatttgtgcgtaagagccagccgctacgctttacaccgcagggagaaatcctgttgcaactggcaaaccaggtactgccgcaaattagccaggccctgcaagcctgcaatgaaccgcagcagacgcgtctgcgcattgccattgagtgccatagctgtattcagttggctgacacccgcgttagaaaatttccataagaactggccgcaggtagagatggattttaaatcgggcgtgacatttgacccgcagcccgccttgcaacagggagagctggatctggtaatgacgtccgatattctgccgcgcagtggcctgcattattcgccgatgttcgactatgaagtgcgtctggtgttagcacctgaccatccactggcggcgaaaacgcgaattacaccggaagatctcgccagcgagacgctattaatttatccggtgcagcgtagtcgactggatgtctggcggcattttcttcagccggcaggcgtcagcccgtcactgaaaagcgtcgataacaccttattgttgattcagatggttgccgcgcggatgggtattgccgcgctaccgcattgggtagtagagagttttgagcgccagggtctggtggtgaccaaaaccctgggcgaaggcttgtggagccgactgtacgccgccgtgcgcgatggcgagcagcgtcagccagttacggaagcgtttattcgctcagcgcgcaatcacgcctgcgatcatctgccgtttgtgaagagcgcggagcgacccacttacgatgcacccacacatcgccgggagtttcagcggcgtgttattgccgagaagattttttgccagcaccatcgcgctaagttgaatcggctggaggaacggcaatacctgaccgttaatttccgcgcaatcgcccagcgcgtaaatatcggtattactggtttgcagataactatcgacgcaaacgccgcgattaatcgtcagcccggcgcgtcgtgccagggcggtttccgggcgcagtccggtggcggcaattaccgcatccacttcgatattgcgctggcggtccagcgttgcctgaatgccagaatccgttttttccagcccctgtaa

SEQ ID NO: 132333 - DNA, 1755 bp, Homo sapiens; identical to SEQ ID NO: 118278

SEQ ID NO: 132334 - DNA, 2118 bp, Homo sapiens
tcagcccatcatgaatgttgctgtcgatgacaggttgttacaaagggagaagggcatggcgagcgtacagctgcaaaatgtaacgaaagcctggggcgaggtcgtggtatcgaaagatatcaatctcgatatccatgaaggtgaattcgtggtgtttgtcggaccgtctggctgcggtaaatcgactttactgcgcatgattgccgggcttgagacgatcaccagcggcgacctgttcatcggtgagaaacggatgaatgacactccgccagcagtctctgttgtgctgatgtctgcgctctcgttgttgttctcgtctctgctcgtcatggcttcttgcttggtgtctctgtgtctctctgttgcgttcgtctcgtggtggggttgcgtcgcttctcggctcagtcgccgtctgcttttccgtaaacaccgttcacgacgcgccagaaaattgtttcgttctggctgggagtggctttcacggaatgccgccatccacaccgttgcagcacgacggtataagcccctggactccagttcttccgcctggcgggtcaggcacaaaatcacccgcgggtcgttagtgccgacatagaaattgcgcacaggtcccctgaatcctgccgggatctggctgtagtccacattgtcgtaactggctttgaagtacgggtcttcgcgtttttctgtgtacgtgctgacggacggcgataagcgcagggaaagctcatcccatttttcccgcagcttcgacgggctgagcacgttacggcaccagaacggatcgcggctgacgcggctgtacatctcgcagatttgtttgtgagtacgaccatcctgcacacacatcaggcgaatttcgtttgcccaggctgtccagttcggttctttgggacgaaccacctcgccgtcacattcggcggcctgctcgtacagggcgatgatttttttccagagccacttgctttgttgtgtcgtgccctccttgggggccctctcccctccgctcctcgggttatttgcgccctgattccttctctcgcagtgtttgtgcgctctgccacgcggctggcccgtcttccccaactcggattttgcccctccggtatttcccgttccgcttaaccggattgggttttcctcccggtttcggcccagcctttttcccttccccctcagtttttcacgcgtcccgtaattcaccgcgcccgccgggcacacttctacgcagccaggtagaccgcctttatcgagacgttccacacctttctggttgcacagctcgcacttatgcagcgcaccaaacgggttgttgtagtcgtacttcggcacgttgtacggacaggcgaccatgcagtaacggcagccggtgcacacatctttgtcgtaatggacaatgccggttttcggatcttttttcagtgcagagaccgggcacacagagacacagttcggatcgacgcagtgcatacactgtttcttaatgtacgcgtagccgttctcctcctggtctttgttgacccctgtgccgctggtccacacctgaatgatgttattggtatacggcgacagtttgtcgttgttcgaccaggtctgttccccttgcgggttacgttcagggaaattgatatcctgacacttggtgacgcaagcctggcagcctacgcacaaggtcgagtcgtacaacatccccagcgatcccggaattggcgggcggttttcagcagccgcatgactgacagacggcagcgcgcccgtcagcaatgccccgcaggaggccaaccacaccgccgagcaaccatagcggttatcgcaggtgactctagaggatcccctttcttcactgcgctgagcaccgttgtagaagcgatcgaccgtctgcgtgacacctcttcttctcaccagcgtatttccgtggtggaagtgatgggccgttattgtggagatctgacgttggctgcggccattgccggtggctgtgaattcgttgtggttccggaagttgaattcagccgtgaagacctggtaaacgaaatcaaagcgggtatcgcgaaaggtaaaaaacacgcgatcgtggcgattaccgaacatatgtgtgatgttgacgaactggcgcat

SEQ ID NO: 132335 - DNA, 1405 bp, Homo sapiens
atggccctaaagggcccctgggtgatataccctggaaacccccgggtaaaggcccccgccctaaaggcccgggaaagtgtttcccaaagagttggtaaaggccccggaagaggggtaataaaggccaggggtaaaaaggctctggttgttgcgggggatgcccttccattgatgtccagatctcttgacacggctacctggtctatgtcctttggagtaggtcacacagccgtgaccgcatggcgttttggtcgagtttgccgtacgctgctaattagtgtcaagcacagtgtcacggttcctggagcgcgtggtaagggtttgtatgcgtccagccacgcctgtggtagttccggtaccagcgcggttcatcaatctgtacccactcgatgccgcgtgtcgccagttcggccagacttgctgataaaccggcagaatgtcgttcagcaggctcagtcggtcaattgttcacctttcactttccccagccacagccagcgccagcgcctcgtccacttcgtcagcagctgcgtccaggttcgccagtcggcgcacgtccacgaccaatacggaacagggttcgatatctaccgaaccatctttgttctgatgacgcgccggaacgttaccagcagcagactggtgtttagcgatctggaacaacgcctggcttccggctatttgtgcgtaagagccagccgctacgctttacaccgagggagaaatcctgttgcaactggcaaaccagaatgtcgaactacaaacaattgcgaggattacaaccgcgtcagccgggatccgttcgggtgccgtaagtgttcagcccgtcgaagctgcgggaaaaatgggatgagctttccctgccttatcgccgtccgtcagcacgtacacagaaatacgcgaagacccgtactcaaagccagttacgacaatgtggactacagccagatcccggcaggattaggggaccggcacgcctgccaccgatctggatgatgactactttgacatgttgcaggaggagctttgcagcgttgtggaggcctccggtgccagcctggagaaggggcggcatgaccagctgcttaccgcgcttcgtgcgctgctgttaagccgcaagaatccgtttggcgatatcaaattggacggcacggtgcaaaaggctctcgaaaaccttggtttgggagaagcggctccaagaaatgtagggacaggggcgaatcagatacctgatatgggtagttttatgctttctgcttcagtcctgatatccgggatctctagatcgaccacagcagcacttggctggacttcccagtctgggcccgagcaggaaaatgagaagcatttcagcaagccagacagggcaagccgttttcctggattcagagacttctccagttga

SEQ ID NO: 132336 - DNA, 1431 bp, Homo sapiens
tcatccacattcgaatgccgtcgaggaacatctgggtgccatcatcaccagaatcaatcccatcaggcgttcaagtgcgttcacccttttctcgcccagcagacgtaaaaatagcgaagactgtagcaggatgacaaaggtgccgccccaggccagcagcagagcaatcaccagatgccccatctgattcgggtactgatgagacaacaacatcagcgtggcgagaatagtcggcccggcgactaacggaattgccaacggcacgataaatggctcttcacctgccggaagcccgctgctatttcctgaagcgctggggaaaatcattttaatggcgatcagaaacagaatgatgccgccagaaatggagacggtttctgctcgtaggctaagaaatgccagaattttctcacccgcaaacaggaacaccagcatcaccaggagagcaataagcaactctcgcaccatgattgcccgccgtcttttcggttcagtatgtttcagtacggacatgaaaataggtaggtttccgagcggatccataatcaggatcaataaaactggcggggaatatgcccctgatgcacggcacggtcgcttttctcgtcgagatattggcggtttgccaactggataaccaccgccctgagactcaagggcgtgaatcagcggtaacagacgtttatcttcacggccttttaaaataaagacttcctgaaaacgttcaggggcgcgctccagcagggcgcttcgctttggtcgctgcacatcgtagcgaactaccggcggctcgtcggagtcagtgaccgcacgtttgattttcttcactaccgatttcggatcttccagcaggccgataacgttattgcgattatcgtcagacttggacatcttcttggtgcggcttccagacaggggtctgacgattttgatcatcgcaaaccagaactccatctcaccgacatttttcacggtggcgagattgagcgtcagcagcagcactatcaccgccagggaggcgacccagtcggagagatcggggaaccagaactgagcataagccgtgatcgccaccacgtctgccataccggttacaacccagcagaaccagtaagtccagccggtgaaatatcctgcccacggcccgagtaaatcggaagcgaagtcactaaaagatttgtattccagattcgaaagcagcaattcccccattgcccgcatcacgaaaaagagcataaaaccaatgatcatataaacgaaaatgatcgacggcccggcaaggctaatcgttttgccagaccccataaacaaccccgtaccaatggcaccgccaatggcaataagctgaatatgtcggtttgtgagattgcgccgtagcgactgttcagccggagcctgatcatcggcaacgacttttacatgatctaccat

SEQ ID NO: 132337 - DNA, 834 bp, Homo sapiens
ttacggcttcgccacaaaaccaatcgcttcgtacaccgcttttagcgtacgggaagcgtgcgcgctggctttttccgcgccatctttcatcacctgttgcaggaaggcttcatcgttgcggaaacggtgatagcgttctggtaattcttcgtacccttgattgctcccctggcgtagctgtatactgcgatctgatccgcttgcggcacatcccgttatacggtaccgtaagcttgcatatttatagcccgaaattgttatcctcgtccgtcgtgcgacagcgcgtgcaaattgcggcgggagagttgcgggtagttcggttgaacgcgaatggtgtcggcccaggcgacgttctcgatccagataacttccgcgccccattctgcgaacatttgcccggcaaacggtccggcgatttcgataccggagaagacaacgcgctatccggccaacggcccgaatttcggcatgggtagatgatccattatttgctcctgaaaaatttatgtagcgcatgactgccggatgcggcgtaaacgctttatccggcctacattcgtgctcccgtaggcgacccagcgtcaggatctgcatttcgtcagatcccccggagacgcggtctacacgcagatcacgccagaagcggctgatgcggtggttgcccgcaatcccgacaccgcccagcacctgcattgcgctatccacaacttcaaatgccgcattggcgcagaagtatttgcacatcgctgcatcgccagaggtgatggtgccgttgtctgctttccacgctgcttcatacagcatgtatttcatggagtttaatttgatcgccat

SEQ ID NO: 132338 - DNA, 1452 bp, Homo sapiens
atgctatcggaaccagccctgcgggaactggcaaccgcaatagcgggggttcgcaaaggtgaaaacgacattgctgtcgaaaatatcattggcgcaaacatttttaatattgtcatcgtgttgggtttacccgcgctgataacgccaggagagattgatccactggcgtacagtcgtgactacagcgtgatgttgctgcaagcaggtaaagaagtcctggcgattgaacgtgaatgcctggcggagcttgatcaatacatcaatcagaatttcacgcttgcctgtgaaaagatgttctggtgtaaagggaaagttgtcgtcatggggatgggaaaatcggggccatattgggcgaaaaatggccgcgcaacgtttgccagcaccgaatcgccaaccatgaaaacagagactccatccgtaaaatttgttgctatcaccgctgacgaagcggggcaacgtatcgataactttttgcgtacccaattgaaaggcgtaccaaaaagtatgatttaccgtattttgcgtaaaggcgaagtgcgggtgaacaaaaaacgtattaagcctgaatataaactcgaagcgggtgatgaggtgcgtattccaccggttcgcgttgctgagcgggaagaagaggcggtttcgccacatctgcaaaaggtggcggcgctggcggacgtcatcttatatgaagatgatcacatcctggtgctgaataaaccttccggtacggcggtacatggcggcagtggtttaagcttcggcgttattgaagggagtaaagaggcagagagaggcaaagtcaccaaaggagggtggcagcttacagatgggagcagttttcccaggacaagccactggggcatctcagtcaagcccgcactgcaggatgcacagaagctgcgtaaagcgacgctggatacgctggccttgtatctggcttgtggtatcgatcctgagaaaagcaccatttttgttcagtcccacgtgccggaacatgcacagttaggctgggcactgaactgctatacctacttcggcgaactgagtcgcatgacgcagtttaaagataaatctgcgcgttatgccgagaacatcaacgctggtctgtttgactatccggtgctgatggcagcggacatcctgctgtatcaaactaatctggtaccgatgccaaaatttgccgcattgtgggggcaactgattgtttttatgggttcttttatcgctgtcactaatcccccggtgtatgattttgctgattttcttaacgataatctggcaaaaatcgttggcgtcgcgttggcgtggttagcgttcgccattctgcgtccaggatcggatgctcgtaaaagccgccgccatattcgcgcgctgcgccgggattttgtcgatcagctaagccgccatccaacactgagtgaaagcgaatttgaatcgctcacttatcatcac

SEQ ID NO: 132339 - DNA, 551 bp, Homo sapiens
acagagaatcatacaattccatactcgcgaggaatctggatattcctatttcatactcaataaacgggacctgttcacctcagatgaatgtgaaatctggatcttcaaattacctgcgtatggaattctatgatacttgggtgaagacgggcgcatacatcatcctggaaagtgtgctggctcccgggataaatgagggcaacttagtgaagcatgtagtctgctcggtaacgggccagagcatcccagaactggaaaaacagttcgaaggcaagatgtatggtcatctgaaaggtgaagtggctgatgccgtttccggtatgctgactgaattgcaggaacgctatcaccgtttccgcaacgatgaagccttcctgcaacaggtgatgaaagatggcgcggaaaaagccagcgcgcacgcttccctggacgccagcagcaccggaaccgcagtcactcgcctgaagatacctctgtatcgcacagagcacttgctacacgaggctcttgcgcacgctctaacgcaagcttttaacgaacgcttgctttga

SEQ ID NO: 132340 - DNA, 3132 bp, Homo sapiens; identical to SEQ ID NO: 124853

SEQ ID NO: 132341 - DNA, 624 bp, Homo sapiens
atgaatcacttcgatggcgcaaaacaaaatgtcgtgggtgccgacgctcaccacctggctgatacggcagtcaaacgaaaccagagcctcttccagttgcgggcatccggtcacccccgtctgccagcgggcggcggcaaagcggtgttccatgggcgttttgccgccaaaaagcccgcaggcttcttcaaaggacagacgtggcaggcgcgcataaagcttgctgctatcgccatagccgatattaatcagcagattgctcttcagcgtgctgcccgtaaaaaaggcgtcgtccacgtgttgacggtcaaagcccgacatcgggccggtatccagtcccagcgcccggcaggcgacgatcagataggccgcctgcatggaactgttgcgaaacgctgtttcttcggcaagttgtgggctggaggcagtagcgcacagcgactggcaaacaacagcgatagcattacgtatcgtgtgcgcaaaggcgattcgctttcaagcattgctaaacgccacggcgtgaacatcaaagatgtgatgcgctggaacagcgacactgcgaatctgcaaccaggcgataagctgacgttgtttgtgaaaaacaacaacatgccagattcctga

SEQ ID NO: 132342 - DNA, 1623 bp, Homo sapiens
tcattttttcgcctcctgtacctgatcgcgaccttcatcatccagccagttaacgttcttcatcttgcggatcatgatgaactcatcgcggttcgatccgacggtgccgtagtagttaaagccccaggccagctgcgcgtaaccgccaatcatatgcgttggtttcgggcaaacgcgggtaaccgagttatgaatgccgccgcgcatgccagttacttccgaaccaggaatattcataatgcgttcctgggcgtgatacatcatggtcatgcccggcggtacacgttggctgaccaccgcgcgggcagtcagcgcgccgttggcgttgaatacttccacccagtcgttatcgacaatggtcagttctcgggcatctgtttcgctgatccagacaatcggtccaccgcgagagagcgtcagcattagcaggttttcactgtaggttgagtgaatgccccatttctggtgcggcgtcaggaagttaagctgcatgtttctcgggaagcccgtcttggacggtatactggcgcatctcatgacgctacgggtgtcgataggcgggcgataagccaccaggctttcaccaaaagcacgcatccacggatgatcctgatagagctgctggcgtcccgacagcgtgcgccacggaattaactcatgaacgttggtgtatcccgcgttataggagacgtgatcgctttccagaccggaccaggtggggctggagataattttacgcggctgcgcctgaatatcgcgaaagcgaatcttctcgtcctctttgtgcagcgccagatgggtatgttcgcgcccggtgatctcgcccagcgcctgccacgctttgactgcaacatgaccgttggtttccggtgccagtgccagaatcacttctgaagcgtcaatggcggtgtcaatcagcggacgcccctgtgccgggccatcacgcttggtgtaattgagtttgccgaggaaatcgatttcatcctgggtattccacgaaatccctttaccgccattgccaagtttgtccatcaatggcccgagcgaggtaaagcgttcatacgtagcagggtagtcgcgctccaccgccacaatattcggcgcggttttgcctggaatcagatcgcattcgcctttgcgccagtcgagcacttcacacggctgtgagagctctgccggagagtcatgcagtaggggttgtaataccacgtcggtttctttgccaagatgacccacgcacacttgcgaaatgcatgcatgacggtcgggtttggcgggcagcccggaagggggagccagttgcctggcggtccgtgctctgggaaggggtcctggtggtacgctggtgtactcgacctgtaccccgacgcagtagagtttgtaccacttggcgatctcttccctggtgcaaacaaagcgctgaccgaagaaggctttttgcatgttttcccacaaatttacgactgcgaaggcttcttcgttgctcgtctgcgcctctggcagcgtgacaaagaactgtggttgttcccggtgggcattgaagccctgatcggtaaagtccgattttctcggttggggattaaacttgccgagacgcacaacaaaggttatcgctggcagcat

SEQ ID NO: 132343 - DNA, 1551 bp, Homo sapiens
atgcataatggcgttctgggcgttaatatctgccactggcaactgcataatggcaaacagtttcgctgctgccgggtttttctcggcccaggctttgttggcaacgatatgcatggtgctgaccgggaagccataattcgcaccattcggcagtttggtatcggcgtttttatcgcccggcagtgcggagaacggcacctgcaaccagacgacatctttgcccggcttcagttcgttactcacccagtacggcgtccaggtgtaataaaacaccggtttgccctctttgtagcgactgatggtgtcggccatcatcgctgcgtagttcccctgattatgcgtcacggtgttggtcagttcatacgcggcaagctggtggttgatcgcaccttcgcagacccagacaggttggggaatcttcggatcttcagtgtgccaggtggcgaattggacggtcggggaacatatcgccaggtaccgttccggcgtacaatccttcgttattttttcccgcgtttcattttcacaggcccaccacggaggtccgaaagaggtccggacatcggatcactcagctggtaccggctgctggaagatccgaaatcggtagtgaagaaaatcaaacgtgcggtcactgactccgacgagccgccggtagttcgctacgatgtgcagaacaaagcgggcgtttccaacctgttggatatcctttcagcggtaacgggccagagcatcccagaactggaaaaacagttcgaaggcaagatgtatggtcatctgaaaggtgaagtggctgatgccgtttccggtatgctgactgaattgcaggaacgctatcaccgtttccgcaacgatgaagccttcctgcaacaggtgatgaaagatggcgcggaaaaagccagcgcgcacgcttcccgtctaccgactgcaaccaatatgatcgccaccgactggcggcaaatgggccatacgctctccctgcaatccgttgatatcccgctggcggatccgcatttctggacaatgcaaggttcggtacgtgtggcgcaaatgtgccatgaatttggcctgacctggggttcacactctaacaaccacttcgatatttccctggcgatgtttacccatgttgccgccgctgcaccgggtaaaattactgctattgatacgcactggatttggcaggaaggcaatcagcgcctgaccaaagaaccgtttgagatcaaaggcgggctggtacaggtgccagaaaaaccggggctgggtgtagaaatcgatatggatcaagtgatgaaagcccatgagctgtatcagaaacacgggcttggcgcgcgtgacgatgcgatgggaatgcagtatctgattcctggctggacgttcgataacaagcgcccgtgcatgtccagcgtccggtccaacttctttttgtgcgtatacgtgtcacacgcggaaactctcctcacggacacccgtttaacaacagacgctaaaataaagccggtccaccagtctcccttggaacgggacagaaaagtacagcaaaatgcgtga

SEQ ID NO: 132344 - DNA, 2760 bp, Homo sapiens
  misc_feature (1)...(2760): n = a,t,c or g
atgacgcagtttaaagataaatctgcgcgttatgccgagaacatcaacgctggtctgtttgactatccggtgctgatggcagcggacatcctgctgtatcaaactaatctggtaccggtgggtgaagaccagaaacagcacctcgaactgagccgcgatattgcccagcgtttcaacgcgctgtatggcgagatctttaaggtgccggagccgtttattccgaaatctggcgcgcgcgtaatgtcgctgctggagccgaccaagaagatgtccaagtctgacgataatcgcaataacgttatcggcctgctggaagatccgaaatcggtagtgaagaaaatcaaacgtgcggtcactgactccgacgagccgccggtagttcgctacgatgtgcagaacaaagcgggcgtttccaacctgttggatatcctttcagcggtaacgggccagagcatcccagaactggaaaaacagttcgaaggcaagatgtatggtcatctgaaaggtgaagtggctgatgccgtttccggtatgctgactgaattgcaggaacgctatcaccgtttccgcaacgatgaagccttcctgcaacaggtgatgaaagatggcgcggaaaaagccagcgcgcacgcttcccgtacgctaaaagcggtgtacgaagcgattggttttgtggcgaagccaacgacaaaagccacgcacacaagagacgagaaacagaacaaaaaggcgacacaagaaagaaaaaaaacaacacagcaagagaagcaaaagagaaaaacaagaagtaaaaacgacaatgagccggtgtcacggcaacttgaccccattgatccagaagtaattctctttccacgcctattttccctaggttgccaatattgtcgtggaaaaattcctggtgaattgcctccatctgtcgtagaagtggtgcagactaagcttcacagtttaagtgtgcggtttgctgcatacacatggcgccggacttgtctcagatccagggacaacgctgatacgatgccgagcgtgcagttgaactggaattccgggcccaaacggcggccgggggcagaagggcggcgtttggcggtaattggaggcggcctctttccggcatatccgtgcgtcatcgatcgtgaactcagcgtggcgactgcggatcagngagccgctttcaaacctttttggcggcaaaacgcccatggaacaccgctttgccgccgcccgctggcagacgggggtgaccggatgcccgcaactggaagcctggaccaccatagcgcctttcatgcattacgtcctggtgttacgctgtttaactcgacctgtaccttaaaccaggaagaaaacgaagccgtttgcctgtggctgaaagagacttaccccgacgcagtagagtttttaccacttggcgatctcttccctggtgcaaacaaagcgctgaccgaagaaggctttttgcatgttttcccacaaatttacgactgcgaaggcttcttcgttgctcgtctgcgtaaaactcaggcgattcccgccttacccgcccccaaatacaaagtcggtaattttccgttcagcccggtgaaagatcgcgaagctggacaaattcgtcaggcggctacaggtgttggcttaaactgggatgaaaacctgcgcctctggcagcgtgacaaagaactgtggttgttcccggtgggcattgaagccctgatcggtaaagtccgattttctcggttggggattaaacttgccgagacgcacaacaaaggttatcgctggcagcatgaagcggttattgctcttgcctcacccgataatatgaatgcattcgagctgacaccgcaggaagcggaggagtggaggcagaagttggagtttagtgtaaaaagcggtagcccggagaaacagcggagtgcctgcatcgtcgtgggcgtcttcgaaccacgtcgcctttctccgattgcagaacagctcgataaaatcagcgatgggtacatcagcgccctgctacgtcggggcgaactggaaggaaaaccggggcagacattgttgttgcaccatgttccgaatgtactttccgagcgaattctccttattggttgcggcaaagaacgtgagctggatgagcgtcagtacaagcaggttattcagaaaaccattaatacgctgaatgatactggctcaatggaagcggtctgctttctgactgagctgcacgttaaaggccgtaacaactactggaaagtgcgtcaggctgtcgagacggcaaaagagacgctctacagtttcgatcagctgaaaacgaacaagagcgaaccgcgtcgtccgctgcgtaagatggtgttcaacgtgccgacccgccgtgaactgaccagcggtgagcgcgcgatccagcacggtctggcgattgccgccgggattaaagcagcaaaagatctcggcaatatgccgccgaatatctgtaacgccgcttacctcgcttcacaagcgcgccagctggctgacagctacagcaagaatgtcatcacccgcgttatcggcgaacagcagatgaaagagctggggatgcattcctatctggcggtcggtcagggttcgcaaaacgaatcgctgatgtcggtgattgagtacaaaggcaacgcgtcggaagatgcacgcccaatcgtgctggtgggtaaaggtttaaccttcgactccgggggtatctcgaacaagccttcagaaaacatggatgagatgaaatccatcacagtttga

SEQ ID NO: 132345 - DNA, 690 bp, Homo sapiens
ccggaatgtcagcgcagcagttcgttaatgccgttgagcgtgaagaagtgggggcactggtgaaactgccgggtattggcaaaaaaaccgccgaacgcttgattgttgaaatgaaagaccgatttaaaggtttgcatggcgatctctttacgccagccgccgacctggtactcacgtctcctgccagcccggggaccgacgatgctgaacaagaagcggttgccgcgctggtggcgctgggctataaaccacaagaagcaagccgcatggtgagcaaaatcgctcgccctgacgccagcagtgaaactttaattcgcgaagccctacgcgccgcgttatgaggtaaaggatgattgaagcagaccgtctgatttctgccggtaccactttgccggaagatgtagcagatcgcgccattcgccccaaattactggaagagtatgttggtcagccgcaggttcgttcacagatggagattttcatcaaagcagcgaaactgcgcggcgatgccctcgatcatttgttgatttttggtcctccggggttgggtaaaactacgcttgccaacattgtcgccaatgaaatgggcggtaatttacgcacgacttctggtccggtgctggaaaaggccggcgatttggctgcgatgctcactaaccttgaaccgcatgacgtgctgtttattgatga

SEQ ID NO: 132346 - DNA, 528 bp, Homo sapiens
atggcgcggcgctgccggtggctatcgaacctttacaggtcattgttattgcgctggtggcgatggctatcgcgctgctgtctacgctttacccttcatggcgcgctgccgccactcaacccgctgaggctttacgttatgaataagatcctgttgcaatgcgacaacctgtgcaaacgctatcaggaaggcagtgtgcaaaccgatgtgctgcacaatgtcagtttcagcgtcggcgaagtgcggaaaagagcaccaccagcgatgccagaatacagccagtgcggcggccaaacagcgaaagaagacgtagtaaaaagaaggtcaccaacgttcctgagtgcgggtttcatcttctacctgcaagttgagaaagagctggccagcggtgaactgattgacttaacgcctgggctatttcaacgacggatgctctactggcaccgctttgctcctgaaagccgcatgatgcgtaaagtcactgatgcgttactcgattatggtcacaaagtccttcgtcaggattaa

SEQ ID NO: 132347 - DNA, 1417 bp, Homo sapiens
atggggctcgtggagggagcgccgacctccagcagggttctgtggctgcttaccctgattgaaggacaaggagaagatgtcggtgaaaccgtacttgcagataccgtaggggggattcgccacctgccgcacgagcgggtggcggcatttaaagccacgttacaagagacgcggcaagccacattactgctgcacgtcattgatgcggcggatgtgcgtgtacaagaaaacatcgaagcggtgaatacggttcttgaagagatcgacgctcacgagatcccaaccctgctggtgatgaacaagatcgatatgctggaagatttcgaaccgcgtattgatcgggacgaagagaacaaaccgaaccgtgtctggctttccgcacagaccggagcggggataccacagctttttcaggctttgacggagcggctttccggcgaggtggcgcaacatacattgcgtctgccaccgcaagaagggcgtctgagaagtcgtttttatcagcttcaggcaatacaaaaagagtggatggaggaagaccgcaacgtcatggaggttgttaacctgtatccgttcgcccagaccgtggcccgtgaaggttgctcgctggaagatgcggttgagaacatcgatatcagcggcccggcgatggtgcgctccgccgccaagaaccataaagatgtcgcaatcgtggtgaagagcagcgactatgacgccattattaaagagatggatgacaacgaaggatcgctgacgcttgcaacccgtttcgacctcgccatcaaagccttcgaacacactgccgcctacgacagcatgattgccaactacttcggcagcatggttccggcttaccacggtgaaagcaaagaagccgccggtcgcttcccacgcacgctgaacctgaacttcattaagaagctggatatgcgttacggcgagaacagccaccagcaggctgccttctatatagaagagaatgtgaaagaagcctccgttgctaccgcaacccaggttcagggtaaagccctctcttataacaacatcgccgataccgatgcggcgctggagtgcgtgaaagagttcgccgagccggcatgtgtgattgtgaagcacgccaacccttgcggcgtggctatcggcaattccattcttgatgcttacgatcgcgcgtacaaaaccgacccaacctccgcattcggcggcatcattgcctttaaccgcgagctggatgcggaaaccgcacaggccatcatttctcgtcagtttgtcgaagtgattattgcgccgtccgccagcgaagaagccctgaaaatcaccgccgccaaacagaacgtacgcgttctgacctgcggtcagtggggcgagcgtgttccgggcctcgatttcaaacgcgtgaacggcggtctgctggttc

SEQ ID NO: 132348 - DNA, 702 bp, Homo sapiens
atggctatttttgggtttatttttcgttatgggtatggtggatatggcctggtcaagggttcgtccgaaccaaagggggcgattttccatggccttaccaagtggtggatgggtggcctggtaacgagctgggttcccggaaactttaagccccgattccgaaaacgccggaagtacaaatattgcgccgtcgggttcgagccgatcgccgatcagcgcccccccaaccagtcgttgattgacgagtacagcaagttaaaaactcgcctgcgcgaagcggcactggcgtaataccgtcctttctacagcctcctttcggaggctgtttttttatccattcgaactctttatactggttactccctacccaatcgtattatcaaaatgaaaaaaattatcgcattgatgttgtttttgacattctttgcccacgccaacgactccgagcctggcagccagtatttaaaggcagcagaggccggggaccgacgcgcacaatattttcttgccgacagctggtttagctccggcgatttgagcaaagccgaatattgggcacagaaagccgccgacagcggtgatgctgatgcctgcgcgctgctggcgcagatcaaaatcaccaatccggtcagtctggactatccacaagcaaaagttcttgcagagaaagcggcgcaagcggagaaagagcagccgtggtag

SEQ ID NO: 132349 - DNA, 2187 bp, Homo sapiens
tcaacgcagtgaaacggcgccagaagttcgaatcgcaatacgctgcgcgtcaagagtgacctgtaattcgcagccctgccagaacagagggaaagacaactgttgccactgctcaggtaacgccggattgagatgcaattcaccgtcacgcacgctcaccccggcaaaaccctgaatcgcccccagccagatagcgccagttgcggcagcatggataccatcatcacaactatgcggatcagcaccaagatcgatttcagtcccctcgcgccagaactgataactttgggtcagcaggccacagcgtgcggcaacaatgccgtggattgctttacttaatgacgagtcgtgaatagtgcgcggttcataaaattgcagattggcaagacacgatgccgctgagaactgctccggcagcatgtaattgagcatcaccacatcagcttgtttgaggatctgcatctcgttcacttctgcgcgtgaataatccagcagtatggtttgcttccccgccgccgctttgtatttcgccagattaatcgccggcttagccataaacgaatcatcctgcggcaaaacgccgtcgggctgaatttctggcatccatagctctttgaggaacatttcggcgcgatggataaacgcatcgtcgctacagccgaactggcgggcaatattcagcgcctgtggatgcgcatcgtccacggcgacgcttaaacccactttttccattaccggccagtcgatgagatcatcgccgacataagccacattttccggggcaatcgccagtttttccagcagatcgcagtttagcctttcgcccggtaatgatagcgacttcaatatcagaggtgagcgcacacgaatgccataaccgtcacgaacattgaacgctttcagctcttcgccattattgcccatataaatcaggccatgtgttgtgcgctgttggtcagcagcatttctctttcgtatgctgcagaagttccgagcggcacagtactggcagagaagcaggagctggtgcgccacattaaagatgagcctgcgtcgctggatcccgctaaagccgtgggcctgccagagattcaggtcattcgcgatctgtttgaaggtcgtatctggacttttaccctgcgcgataacgcaaaatgggcggatggcacaccggtaacggcgcaagattttgtctacagctggcaacgtctggtggacccaaaaacattgtcgccatttgcatggtttgccgcgctggcgggaatcaacaacgcacaggcgattattgatggtaaagctacgcctgaccagcttggcgtcaccgcagttgatgcccatactttgaaaattcagcttgataaaccgttgccgtgtttgtgatttaccggaccccaccatcagttcggaaacagtgctgatccccggaatcagaggaatagtcccttcggtagcagctttcagcagcgcctcggtcagacccgggctaattgcgaactgtgcacccgcttcagtgacttctgccagctgctgtggattcagcaccgtaccggcacccacaatcgcttcaggcacttctttggcgatagcacggatagcgtcaactgcacactcggtacgcagagtcacttccagaacgcgcaccccaccagcaaccaacgcttttgccatcggcaccgcgtgttccagtttttttaccacgataaccggtacaaccgggccggtggtcaggattgattctgcacttgttttccagtttttcatcagagttttctctcgcctgattacaaatttgtcgtcggacagtttttcacgcaaggcgctgaataattcacgtcctgttcccacgcgtgacgcgctcaggtcaggaatgtgcggttcgcgagcagccagttccgcttcgtctaccagcagcgtcagttcgcctgtctgtccattcacacgaatgatgtccccgtcgcgcacttttgccagcagcccgccatcgtaggcttctggtgttacgtggatagctgacggcactttaccggcgtccagatcggcaatcagatcgtcgacatcttccagaccaatatgcaggcgaatcaaggtcccgctaaaatcgatctcgccttgtgggcgaatggcggcgatatgttctggttgatttgccaggatcaacgattcatacccgccccacgagtaggccat

SEQ ID NO: 132350 - DNA, 3039 bp, Homo sapiens
atgagttctttaagtcaggctgcgagcagtgtggaaaaacgcacaaatgctcgttactggatagtggtgatgttgtttatcgtcacatccttcaactacggcgaccgcgctacgctctctatcgccggttcggaaatggccaaagatatcggccttgatcccgtgggaatgggctatgtgttctctgctttctcatgggcttatgttatcgggcagatccctggtggctggttgctggaccgttttggttcaaaacgcgtctacttctggtcgatctttatctggtcgatgtttaccttgctgcaaggcttcgtcgatatctttagtggattcggcattatcgttgccctgtttacgctgcgcttcctggtcgggcttgctgaagcgccatctttccccggcaacagtcgcattgttgcggcctggtttccggcgcaggaaaggggaacggcggtgtcgatttttaactccgctcaatacttcgcaacggtgatcttcgcgccgattatgggctggctgacgcatgaagtgggctggtcacacgtcttcttctttatgggcggtctggggattgtcatcagctttatctggttgaaagtcatccacgagccaaatcaacatccgggggtaaataagaaagagctggagtacatcgccgcgggtggtgcgctgatcaatatggatcagcaaaacaccaaagttaaagttgctcatcgaggcgatggaaagtcgctcgagtcgcccatgtcagtacccgttcaacatcctatgtatatcgatggacagtttgttacctggcgtggagacgcatggattgatgtggtaaaccctgctacagaggctgtcatttcccgcatacccgatggtcaggccgaggatgcccgtaaggcaatcgatgcagcagaacgtgcacaaccagaatgggaagcgttgcctgctattgaacgcgccagttggttgcgcaaaatctccgccgggatccgcgaacgcgccagtgaaatcagtgcgctgattgttgaagaagggggcaagatccagcagctggctgaagtcgaagtggcttttactgccgactatatcgattacatggcggagccaaacaacctggcgggcattgcgctggttaattcaacaaagcgttccggtgttatacgtcccgtcatcacgccactggaaaacagtaactgcatgcggttttccacaccggcactgctggcggcgctgtttgtttgcctgaaggcggcgaacgtgacgtccatacgtactgaaccgacctacacgctttatgcgacgttcgataacattggcggcctgaaagcgcgctctccggtcagtattggtggcgttgttgtgggtcgggtggcggatattacgctggacccgaaaacctatctgccgcgcgtaacgctggaaattgaacaacgttataaccacattccagataccagttcgctgagcattcgtacttccggcctgctgggggaacaatatctggcattaaacgtcggttttgaagacccggaactggggactgctatcctgaaggatggcgatacaattcaggacactaagtctgcgatggtgctggaagatctcattggtcagttcctttacggtagtaaaggcgatgacaataagaatagtggcgatgcgccagctgctgcgccagcaaaagcagagaacattcgtctgctgatcctcgatgtcgatggcgtactgtcagatggcctgatttatatgggcaataatggcgaagagctgaaagcgttcaatgttcgtgacggttatggcattcgttgtgcgctcacctctgatattgaagtcgctatcattaccgggcgaaaggctaaactggtagaagatcgttgtgccacattggggatcactcacttgtatcaggggcagtcaaacaaactgatcgcctttagcgatctgctggaaaaactggcgattgccccggaaaatgtggcttatgtcggcgatgatctcatcgactggccggtaatggaaaaagtgggtttaagcgtcgccgtggacgatgcgcatccactgttgggtaccgagatcgatgcgtatatcgaaaatgctgactatcagtataataaaaagcgtctgcgtgaaatcgaccgtcgcgtgcgctatctcactaaatgcctggaaaatctcaaaatcgtcgattactcccctcagcaggaaggcaaagtcttttttggcgcgtgggtggagattgaaaacgacgatggcgtgactcaccgtttccgtattgtcggctacgatgaaatttttggccgtaaagattacatctctatcgattccccgatggcccgcgcattgctgaaaaaagaagtcggcgatctggcggtggtgaatacccctgccggggaagcgagctggtatgttaatgctatcgagtacgtgaaacctcgcctgaatcaaacggttcgtctgctgcttgagcatgagatgggacaggtttggatcagcggcgaaatttctaatttcacgcaaccagcttccggtcactggtactttacactcaaagacgacaccgcccaggtacgctgcgcgatgttccgcaacagcaaccgccgggtgaccttccgcccacagcatgggcaacaagttttagttcgcgccaatattacgctctacgagccgcgcggcgactaccagataatcgttgagagtatgcagccggccggtgaagggctgctgcaacagaagtacgaacagctcaaagcgaagttgcaggctgaaggtttgttcgatcagcaatacaaaaaaccacttccctcccctgcgcattgcgttggtgtgatcacctcaaaaaccggtgctgcgctacatgatattttgcatgtgttaaaacgtcgcgatccttctctgccggtgatcatctaccctgccgccgttcagggcgatgacgcgccggggcaaattgttcgcgccattgaactggcgaatcagcgcaatgagtgcgacgtattgagaccatgcgtctggtgccgccgcgtacggtgccgaaggcgctgtcggtga

SEQ ID NO: 132351 - DNA, 945 bp, Homo sapiens
atggaatacatgaaaacccattatggagagcccattggcgtacgccatgccgctgaccatgtcggcattcaccggactcatttctctaagctattcaccgagcatgttgggatgaatccatctgactatttgcggaagcaacgaatggaacaggcattgcacttgctctgcagcacttctcgtcctatcgtcgaaattggcctgagcctcagctttgcggactccgcctccttcactcgcgctttcggtcaatattacggtgtatcgccgaagcaagctcgtctggctggcagagaaaaaaacagcgatctgctggaaaaactggcgattgccccggaaaatgtggcttatgtcggcgatgatctcatcgactggccggtaatggaaaaagtgggtttaagcgtcgccgtggccgatgcgcatccactgttgatcccgcgcgccgattacgtgacgcgcattgttggcgccagacgttgggttatcattgtgctatcactggcggttctggtgatgatcggcattaatatggccgaaaaagacgataccgcccaggtggtcgtcaacaacaatgatcccacctataaaagcgagcatacggacacgctcgtctataacccagaaggggcactaagctatcgattgattgctcaacacgttgaatattattccgatcaggccgtttcgtggtttacgcagccggtacttaccacgtttgataaggataaaatcccgacatggtccgtaaaagcagataaagccaagctgaccaatgaccggatgctctatttatatggacacgttgaagtcaacgcacttgtgccagactctcaacttcgcagaatcacgacggataacgcgcagatcaatctggtgacgcaggatgttgacctgcaggcatgccagttgacacaatcaggctcggaccggcgatctctagagtag

SEQ ID NO: 132352 - DNA, 2127 bp, Homo sapiens
atggtgatccccaaggcactgcagattcgccctgcggcattctacgcgacatgctgcagtgacagctcgcggttatcgacggcgagcgacatgagtatcgggagtgaatcagcagccggatacctcgcgtgtagtttacgccgtcagggcattaaccttggtgaacccgcgctggtacaactgggtaacgtcgctgaattgtatattacctttttcgcgctgctgaaactgggcgttgcgccggtgctggcgttgttcagccatcagcgtagtgaactgaacgcctatgccagccagattgaacccgcattgctgattgccgatcgccaacatgcgctgtttagcggggatgatttcctcaatactttcgtcacagaacattcctccattcgcgtggtgcaactgctcaacgacagcggtgagcataacttgcaggatgcgattaaccatccggctgaggattttactgccacgccatcacctgctgatgaagtggcctatttccagctttccggtggcaccaccggcacaccgaaactgatcccgcgcactcataacgactactactacagcgtgcgtcgtagcgtcgagatttgtcagttcacacaacagacacgctacctgtgcgcgatcccggcggctcataactacgccatgagttcgccaggatcgctgggcgtctttcttgcgaaggaacggtgtctggcggctatccatagacctccacacacacaaaaaaccacaacacaaaggcacgctaccagttacctgccaatgaataagacaactgagtacattgacgcaatgcccatcgccgcaagcgagaaagcggcattgccgaagactgatatccgcgccgttcatcaggcgctggatgccgaacaccgcacctgggcgcgggaggatgattccccgcaaggctcggtaaaggcgcgtctggaacaagcctggccagattcacttgctgatggacagttaattaaagacgacgaagggcgcgatcagctgaaggcgatgccagaagcaaaacgctcctcgatgtttcccgacccgtggcgtaccaacccggtaggccgtttctgggatcgcctgcgtggacgcgatgtcacgccgcgctatctggctcgtttgaccaaagaagagcaggagagcgagcaaaagtggcgtaccgtcggtaccatccgccgttacattctgttgatcctgacgctcgcgcaaactgtcgtcgcgacctggtatatgaagaccattcttccttatcagggttgggcgctgattaatcctatggatatggttgcttctgcgttgtcgccgaagtcgcttcaggcacgtattcagtatcaacaatctttagaagattataaccgtcgagtgccgttagcgaagcagggggttatttcaaaagaaacgctggagcataccaaagatacgttaataagtagcaaagcggcattgaatgccgctatccaggcttataaagcgaataaagctttagtaatgaacacaccattaaaccgtcagccacaagtcgttgaagcggcggatgcaactaaagaagcctggttggcgcttaaacgtacggatattaagagtccggttaccggctatattgcccagagaagtgttcaggtcggcgaaacagtgagccccggacaatcgttaatggctgtcgtaccggcacgtcaaatgtgggttaatgccaactttaaagaaacacaactcacggatgtacggattggtcaatcggtcaatattatcagcgatctttatggtgaaaatgttgtgtttcatggtcgggtgacagggatcaatatgggaaccggcaatgcgttctccttattacctgcacaaaatgcgacagggaactggatcaaaatcgttcagcgtgtaccggttgaagtttctcttgatccaaaagaactcatggaacaccccttgcgtattggtttatcgatgacagcaactattgatacgaagaacgaagacattgccgagatgcctgagctggcttcaaccgtgacctccatgccggcttataccagtaaggctttagttatctttatacaggcgataagtgttcccattgggcgcgagcggcatcgtcggtttcatcggcaatcaccataa

SEQ ID NO: 132353 - DNA, 2798 bp, Homo sapiens
tgaacaccggtaacaccacctacaaagcggtacagcgttctgccgacctgatctccatcgggccgatgctgcagggtatgcgcaagccggttaacgacctgtcccgtggcgcactggttgacgatatcgtctacaccatcgcgctgactgcgattcagtctgcacagcagcagtaatctcgtcatcatccgcagctttgcgctgcggatatctgaaccggaaataatcactatttccggttttttattctcttaatttgcattaatcctttctgattatcttgcttaactgcgctgcatcaatgaattgcgccatcccactttgcatacttaccactttgttttgtgcaagggaatatttgcgctatgtccgcaatcactgaatccaaaccaacaagaagatgggcaatgcccgatacgttggtgattatcttttttgttgctattttaaccagccttgccacctgggtagttccggtggggatgtttgacagtcaggaagtgcagtatcaggttgatggtcaaacaaaaacacgcaaagtcgtagatccacactcatttcgcattctgactaacgaagcaggcgaacctgagtatcaccgcgtacagctgttcacgacgggcgatgaacgcccgggcctgatgaacttcccgtttgaaggattaacctcaggatcgaaatacgggacagccgttggcatcatcatgtttatgctggtgattggcggcgcgtttggcattgtgatgcgtacaggaaccattgataacggtatcctggcgcttattcgccatacccgcgggaatgaaattctctttattcctgcgctgtttattctgttttcacttggcggcgcggtatttggtattgctatgtcaactccacttcaaggaataaaagttctcgatttcaccggtgtgcaatctggcccatcttgtactcaaatgctggcctggtttggcgctgacgttattaaaattgaacgtcccggcgttggtgacgtaacgcgtcaccagctgcgagatattcctgatatcgatgcgctttacttcaccatgcttaacagtaacaaacgttctattgagttaaataccaaaacagcggaaggcaaagaggtaatggaaaagctgatccgcgaagctgatatcttagtcgagaactttcatccaggggccattgatcacatgggcttcacctgggagcatattcaagaaatcaatccacgtctgatttttggttcgatcaaagggtttgatgagtgttcgccttatgtgaatgtaaaagcctatgaaaacgttgctcaggcagcgggtggcgcggcatccactacgggtttttgggatggtccgccgctggtaagcgctgcagcgttgggtgacagcaacaccggaatgcatttgctgatcggtttacttgctgctttgctgcatcgcgagctcaatatgacggtcgcggagatcgtcgaaagggaagagtgggcgggatttcgcgccagagaaacggcggcgctggaagcggtaactgcgccatccaccgttatcgctacaggcggcggcattattctgacggaatttaatcgtcacttcatgcaaaataacgggatcgtggtttatttgtgtgcgccagtatcagtcctggaagatttccgccaacggacaatggaagtgctacggctggcgtttttatcctccggcattctcgaattttttacctcgctgtcaattgctctggtggcggtctactttggtttttcctatctcggcgagctggattttggtcactacgataccggtgtgacgctggctgcgggttttctggccctgatccttgcgccagagtttttccagccattacgcgatctcggtacgttttatcatgctaaagcccaggctgttggcgcagctgacagtctgaaaacgtttatggaaaccccgctcgcccatccgcaacgtggtgaggcggaattagcatcgaccgatccggtgaccattgaggccgaggagctgtttatcacgtcgccggaaggtaaaacgctggccggaccgctgaactttactttgccagcaggccaacgtgcggtgttggttggtcgcagcggttcagggagccgctactgcccgtatatcaaccatcgaaatgtccgtctgggcccaattgtaacagatgtgccgtgggaaaattcgggcgacaaatcattgccggaagccactgcgcaggtcatctcgagcgggtcaggggcgacaaaagttgaagacggtttgggcgacctcaacaagccggtgagtaatcagaacttagttactggaatagatacgccggtctataacgcgccgagtgcgggaagtgcgccatttggggtactggcggacaatatgcgctacccgattttgcataaactgaaagacaggttaaatcaaacctggtatcagatccgtattggcgatcgactggcctatatcagcgcactggatgcccaacccgataatggcctgtcggtgctaacctatcaccatattctgcgcgacgaagaaaacacccgttttcgccatacttcgacgaccacatcggtacgcgctttcaataaccagatggcctggctgcgtgacaggggatacgcgacactgagcatggtgcagctggaaggctacgtgaagaataagatcaatctccctgcgcgagcggtggtgattacctttgatgatggcctcaagtcggtgagccgctatgcgtatcctgtgttgaaacaatatggcatgaaggcgacggcgtttattgttaccacgcgcatcaaacgtgtttag

SEQ ID NO: 132354 - DNA, 1194 bp, Homo sapiens
atgtacccgctgaccaaagcgcagtacacctccatggcgaagatgcgtatgttgcagccgaagattcaggcaatgcgtgagcgtctgggcgatgacaaacagcgtatcagccaggaaatgatggcgctgtacaaagctgagaaggttaacccgctgggcggctgcttcccgctgctgatccagatgccaatcttcctggcgttgtactacatgctgatgggttccgttgaactgcgtcaggcaccgtttgcactgtggatccacgacctgtcggcacaggacccgtactacatcctgccgatcctgatgggcgtaacgatgttcttcattcagaagatgtcgccgaccacagtgaccgacccgatgcagcagaagatcatgacctttatgccggtcatcttcaccgtgttcttcctgtggttcccgtcaggtctggtgctgtactatatcgtcagcaacctgccgcgagaagaaaaaatcctgattcgggcggataagcaccgcgcatccgccacacaaagcaacaggaacatcatgagcgataatgacactatcgtagcccaggccacgcctccgggacgtggcggcgttggcatcctgcgcatctccggcttcaaagcccgtgaagttgccgaaaccgtgctgggtaaactgcctaagccgcgctacgccgattatcttccgtttaaagacgccgacggcagcgtgctcgatcaggggattgcgctatggttccctggcccgaactcgttcaccggcgaagatgtgctggaactgcaagccggacctgcgcgcatttttgtggcggaactctctgaagcattcaacggcatttcccagcgcctgatcccaggtgcggttctggcgattgactgtgcagctatctatagcttcgcgccgaacgccgtggtctggggctttatgtggggcaccatcggtcagctgattgcggttggcatcctggtcgcctgcggctcctcgatcctgattattcctggctttatcccgatgttcttctctaacgccaccatcggcgtgttcgctaaccacttcggcggctggcgtgcggcgctgaagatttgtctggtgatggggatgatcgaaatctttggttgcgtctgggcggtgaaactcaccggtatgagtgcctggatgggcatgcgcggactggtcgattctggcaccgaccgatga

SEQ ID NO: 132355 - DNA, 1125 bp, Homo sapiens
atgccggtcgtcttcaccgtgttcttcctgtggttcccgtcaggtctggtgctgtactatatcgtcagcaacctgccgcgctacgccgagtatcttacggttaaagacgccgacggcagcgtgctcgatcaggggattgcgctatggttcccctggcccgaactcgttcaccggcgaagatgtgctggaactgcaaggtcatggcgggccggtgatcctcgacctgctgcttatacgcattctgaccgtttgcggcctgcggattgctcggcctgcttgcagccctcggtcgctctagagatcccctttgtgccccgcgtccttttgaattatttctcccagcctaacctggcgcagctgggtaaaggaatggtgatcccgagtttacctacttcggaagcggtcttcctggcagcaggcgtgttaggggcgacgattatgccgcatgtgatttatttgcactcctcgctcactcagcatttacatggcggttcgcgtcaacaacgttattccgccaccaaatgggatgtggctatcgccatgactattgccggttttgtcaatctggcgatgatggctacagctgcggcggcgttccacttttccggtcatactggtgttgccgatcttgatgaggcttatctgacgctgcaaccgctgttaagccacgctgcggcaacggtctttggattaagcctggttgctgcggggctgtcttcaacggtggtggggacactggcggggcaggtggtgatgcagggcttcattcgctttcatatcccgctgtgggtgcgtcgtacagtcaccatgttgccgtcatttattgtcattctgatgggattagatccgacacggattctggttatgagtcaggtactgttaagttttggtatcgctctggcgctggttccactgctgattttcaccagtgacagcaagttgatgggcgatctggtgaacagcaaacgcgtaaaacagacaggctgggtgattgtggtgctggtcgtggcgctgaatatctggttgttggtggggacggcgctgggatcgtactgcatgaccgtcgattggcactatggggatgcgggtaccgacccaattctatccggcctgctgttccggtaa

SEQ ID NO: 132356 - DNA, 1014 bp, Homo sapiens
atggggggcagacatacctttccccggcgctatcacgatcgagcattccaacgatggaagcattcggaccttgaccagaccaaccggaggatcagggaatacggaggcgatggacagggacggaaagaccggggggatgagagcaatgacctttggaccacctatcagcggattcgagaaaacctgattaagggcggactcagtgggcgtaatgctaaaggcggacgaactcatactcgtgccgtgcgtaaacgccttattgagccttttgtgggtggcggctcggtgttccttaactcagacaagcacgaacgcttccttctggctgacgtcagcgctgacctgattaacctgtatcagatgctggcggtggtccccgattcggtgatctatgaggcaatgaaggcattcaggcatcttaatgatgccgaaaactatacgttaattcgtgaagcattcaacgcgcagcggctggatgcggtcgagcgtgcagcagcattcctttacctcaatcggcactgcttcaacggcctgattcgttacaacctggacgaagctttcacagggatcctctattctgaacaggcggcccgttcggcacttaactcgctgcaaggcgcattctccgcacgggttaatcatctggtagaagccctcacccacttgcgcatttacgtcgaagcggcaattgatttccccgatgaagagatcgatttcctctccgacggaaaaattgaagcccagctcaatgacgttattgccgatcttgatgcattatcggctggcgatatcagccgtaagaaaaagctgctgcagaagcagaaagaaggtaagaaacgcatgaagccagatcgctatccttcggctccacgtagaacttccggcattgccggctacgagatcggttacgcgcttgcgtgcgaagcaggacgcgactgctttcgcgttacgaccacggccacggccgccttcgacttcacgatcgctttcgtcttctgcctggcgagcatgtga

SEQ ID NO: 132357 - DNA, 1848 bp, Homo sapiens
atgtttgacagtcaggaagtgcagtatcaggttgatggtcaaacaaaaacacgcaaagtcgtagatccacactcatttcgcattctgactaacgaagcaggcgaacctgagtatcaccgcgtacagctgttcacgacgggcgatgaacgcccgggcctgatgaacttcccgtttgaaggattaacctcaggatcgaaatacgggacagccgttggcatcatcatgtttatgctggtgattggcggcgcgtttggcattgtgatgcgtacaggaaccattgataacggtatcctggcgcttattcgccatacccgcgggaatgaaattctctttattcctgcgctgtttattctgttttcacttggcggcgcggtatttggtatgggagaagaggccgtcgcctttgccattatcatcgcaccgttagaatgtgtccgtgtcgatgagtcccaatgctatggtggcccgttggcttacccgaatttggtgatgtcaggcattattgcaccggcgtaccgcatcatggcggccagcgggcttgttacgtcgcaatacgtaatacggcgcaggcgaaagcaagaaaactgggagcgccaccacgcgtttgcgtccatcatttttcgcccgatacaaagcatcatcaacgcgtttaaacagttcatcgatgctttcatttcctcggtgatgcgccacaccaatgctgacggtaaagcgtgggcggataagcaccgcgcatccgccacacaaagcaacaggaacatcatgagcgataatgacactatcgtagcccaggccacgcctccgggacgtggcggcgttggcatcctgcgcatctccggcttcaaagcccgtgaagttgccgaaaccgtgctgggtaaactgcctaagccgccgtacgccgattatcttccgtttaaagacgccgacggcagcgtgctcgatcaggggattgcgctatggttccctggcccgaactcgttcaccggcgaagatgtgctggaactgcaaggtcatggcggtccggtgatcctcgacctgctgttaaaacgcattctgaccattcccggcctgcggattgctcgccctggtgagttttccgaacgcgcgtttcttaacgataaacttgacttagcccaggccgaggcgattgcaaatcttatcgacgccagttcggaacaggcggcccgttcggcacttaactcgctgcaaggcgcattctccgcacgggttaatcatctggtagaagccctcacccacttgcgcatttacgtcgaagcggcaattgatttccccgatgaagagatcgatttcctctccgacggaaaaattgaagcccagctcaatgacgttattgccgatcttgatgcaaattacctgccaatgaataagacaactgagtacattgacgcaatgcccatcgccgcaagcgagaaagctgcattgccgaagactgatatccgcgccgttcatcaggcgctggatgccgaacaccgcacctgggcgcgggaggatgattccccgcaaggctcggtaaaggcgcgtctggaacaagcctggccagattcacttgctgatggacagttaattaaagacgacgaagggcgcgatcagctgaaggcgatgccagaagcaaaacgctcctcgatgtttcccgacccgtggcgtaccaacccggtaggccgtttctgggatcgcctgcgtggacgcgatgtcacgccgcgctatctggctcgtttgaccaaagaagagcaggagagcgagcaaaagtggcgtaccgtcggtaccatccgccgttacattctgttgatcctgacgtcgcgcaaactgtcgtcgcgacctggtatatga

SEQ ID NO: 132358 - DNA, 903 bp, Homo sapiens
atgtcaccggtgatcgacaaaatgtatgtagatgcgtaccagccattcagcgaagagaaaatatcaatgcaggaggcgctggaaaaaggggcgcagccgctgcgtgagtttatgctgcgtcagacccgtgaggcagatttagggttgtttgccagactggcgaataccggcccgttgcagggacctgaagccgtgccgatgcgcattttgctcccggcctacgtgaccagcgagttgaaaaccgcatttcagataggcttcacgattttcatcccttttttgattatcgacctggtgatagccagcgtgttgatggcattggggatgatgatggttcccccagccaccattgctctgccctttaaactgatgctgtttgtactggtggatggctggcaattgctggtcgcgttggtcacgggccttatcatcagtattttgcaggccgccacgcagattaacgaaatgacgctgtcgtttattccgaaaatcatcgccgtatttatcgccattattattgccggaccgtggatgctcaatctgttgctggattacgtccgcaccttgttcactaacctgccgtatatcatcggccgtactatgttgcaggtgacaagcgaacaatggctatcctggttaaacctgtacttctggccgttactgcgcgtgctggcgctgatctccaccgcgccgattctgagcgaacgcagcgtaccaaaacgggtggcggcttttgtagatattgggctggataaagccgcgtttcttcatgcatccgacatcatgccgcacaccgaatgtgtggcgggtgaagaacaaaagcaattcacggtgcgcgacatctcggaactggttcgtcaggggcaagatctgatggtgcaggtcctctgcaacgctaagtag

SEQ ID NO: 132359 - DNA, 1980 bp, Homo sapiens; identical to SEQ ID NO: 130232

SEQ ID NO: 132360 - DNA, 630 bp, Homo sapiens
atgacaactctaagctacaggcattattgtcgccatggtgtagatgatgaaagtaaaggtatcggctacgccacggcgctggcgtttgttgaggcgggagcgaaagttacaggttttgatcaagcgttcactcaggagcaatatccctttgcgaccgaagtgatggatgttgccgacgctgcgcaggtcgcgcaagtgtgtcagcgactgttagctgaaacggagcgactggacgcgctggtcaatgcggcgggaattttacgcatgggcgcgaccgatcagctcagtaaagaggactggcagcagacttttgcggttaacgtcggcggtgcgtttaacctgttccagcaaaccatgaaccagtttcgccgtcagcggggcggggcgattgtcactgtggcgtccgacgccgcgcacacgccgcgtattggcatgagtgcttatggcgcatcgaaagcggcgctgaaaagcctggcgttgagcgtcgggctggaactggcgggtagcggcgtgcgctgtaatgtggtttcgcctggctccaccgacaccgatatgcaacgcacgctgtggatcattgtgcctcagtattactccaaatctgtttcaggcttgctaaatgcattttcagag

SEQ ID NO: 132361 - DNA, 2493 bp, Homo sapiens
atgctgaatgagttcgatcaatacctgcatgagcgctacctgagcgggaaagccagaaaagatcggtggtactggaataacagtatccaacggggccgaagtacggcggtcagagaaaactggcagtggaaacccgcggtggcgtactgccgctatgccgatgattttgtcctcatcgtcaaaggcaccaaagcacaggtggaagccatcagggaggagtgtcggggtgtgctcgaaggcagtctgaaactcaggctgaacatggataagactaaaatcccccatgttaatgacggctttatctttctggggcacaggctcattcgcaaacgcagtcgttatggcgagatgcgagtggtctcaacgatcccgcaggagaaagccagaaacttcgccgcatcgctgacagcactgttatggaaggtggcggaaatccgcgcaccggaagtggttgaagaacagcgttcatctgacggcaccattaaatgggcgatcgccgttggcgatcagcgcgtcgaaacggtgtatatcccggaagacgaccgtgccacgctctgcgtctcttcgcaggtggggtgtgcgctggagtgtaaattctgttccaccgcccagcagggctttaaccgcaacctgcgggtgtcggaaattatcggccaggtgtggcgtgcggcgaaaatcgtcggcgcagcaaaagtcaccggtcagcgtccgatcactaacgtagtgatgatgggcatgggcgagccgctgctcaacctgaacaacgtcgttccggcgatggaaatcatgcttgatgatttcggttttggcctgtctaaacgtcgcgtcacgctttccacttccggtgtagttccggcgctggataaactgggcgatatgatcgacgttgcactggcaatttccctgcacgcgccgaacgacgaaattcgtgacgaaattgtgccgatcaacaaaaagtacaatatcgaaacgttccttgctgcggtgcgccgttatctggagaaatccaacgccaatcagggccgagtcactattgaatacgtgatgcttgaccacgttaacgacggcactgaacacgcgcaccaactggcggaactgctgaaagatacgccgtgtaagatcaacctgatcccgtggaacccgttcccgggtgcgccgtatggacgcagctcgaacagccgtatcgaccgtttctcaaaaatggctggacatgatacaatcgtgctcggtaccgaatacctgaaaatgggcattatggatgaagaacgtcggacctcgctgaacttgcgtagctgtatcgctcaggcgcgcaaccgcgtggcgttcatcaataccggtttcctcgaccgtaccggcgatgaaatgcattcggtgatggaagctggcccgatgctgcgtaaaaatcagatgaaatcgacgccttggatcaaagcctacgagcgtaataacgtgctttccggtctgttctgtgggctgcgcggtaaagcgcaaattggtaaaggcatgtgggcaatgccggacctgatggcagacatgtacagccagaagggcgaccaactgcgtgccggggcaaacacagcctgggttccgtcaccaaccgctgctacgctccatgcgctgcactaccaccaaaccaacgtacagagcgtacaagccaacattgcccagaccgagttcaatgctgaatttgaaccgctgctggacgatctgctgactattccggttgctgaaaacgctaactggtcggcgcaagagatccaacaagagctggataacaacgtgcaggggattctggggtacgtggtgcgctgggtggagcaggccataggttgttcaaaagtgccggatatacacaatgtggcgttgatggcagcacgcgcaacgctgagtatctccagccacgctgaatgggctgatgctaattactatctcccgaaagaatccgcataccaggaagggcgctgggaaacactgccctttcagcgggccatcatgaatgcgatgggcagcgactacatccgtgaggtgaatgtggtgaagtctgcccgtgtcggttattccaaaatgctgctgggtgtttatgcctactttatagagcataagcagcgcaacacccttattccagctggcttcgtggctgttttcaacagtgatgagtcatcgtggcatctcgttgaagatcatcggggtaaaacggtttatgacgtagcgtcaggggacgcgttatttatttctgaactcggtccgttaccggaaaatgttacctggttatcgccggaaggggagtttcagaagtggaacggtacagcctgggtgaaagatgcagaagcagaaaaactgttccggattcgggaggcggaagaaacaaaaaacagcctgatgcaggtagccagtgagcatattgcgccactccaggatgctgtagatctggaaatcgcaacggaggaagaaacctcattgctggaagcctggaaaaaatatcgggtgccatga

SEQ ID NO: 132362 - DNA, 807 bp, Homo sapiens
tggaaattgcaacggaggaagaaatctcgtttctggaagcatggaaaaagtatcgggtattgctgaaccgtgttgatacctcaactgcacaggatattgaatggccagcactgccgtagggtaaaacatataacttctataattagatgtatctttccatttacggcaaggaagggggcttggaagacgtaaagcatctcacaccgagattattttttatatgtcaggtgtctgaagttttgctttggctcttaaaatggtttgccgcgaggttttgaattcccgggcaatggcacttatacttacacctgacttaattcgttcgaataccgcctgtttctgttcttcatttaacacaggtggtcgaccaaaacgtttccctgcgccgcgggctcttactatcccggaatgagtgcgttcaagtaaaaggtctcgttcaaattcagcgactgctgaaattacttgcatcatcatttttcctgttggactggtcaggtcaatgccacccaatgctaagcaatgcactctgatacctgtttcggtcagttgttccactgttttcctgatatccattgcattacaaccaaggcgatccagttttgtcacaatcaattgatcaccacatttcaggcgagcaagcaaccggttaaaaccaggacgctcactggttgctgctgagccgctaatgtgttcttcgattatttgctgaggtttgattttaaaacctgcactttcgatttcccggcgttgattttcggtggtctgatccagcgttgatatccgacagtaagcaaaaattcgagacat

SEQ ID NO: 132363 - DNA, 1572 bp, Homo sapiens
atgaccgatttgcaggaaagtttgcagcaagaaaaccaccagcttagcgagcagctcctttcgaatctgggcatcggtgacattatctatcaaagccaggcaatggaagacctgctccagcaggtagatattgtggcgaagagcgacagtacggtgttgatttgtggtgaaaccggaactggcaaagaggtgatcgccagagcgatccatcaacttagcccgcgacgcgacaagccgctggtcaaaatcaactgcgctgccatccccgccagtcttctggaaagaagtttcaatcacctgcacgattttttcactgatgaacaactttctcgcgcggtgtggatctacggcaaacgcgccattgctgcggcgcaaaccaaacttccgccagcgtttggactgccaggggcaaagcatattttgtttcgcggtcattgcagcgaaagcgatgtacaacaactggcggctgagtccggtgacgaccgcagcgtggtgattggcgtcggtggcggtgcactgctcgacaccgcgaaagccctcgcccgccgtctcggtctgccgtttgttgccgttccgacgatcgccgccacctgcgccgcctggacaccgctctccgtctggtataatgatgccggacaggcgctgcattatgagattttcgacgacgccaattttatggtgctggtggaaccggagattatcctcaatgcaccgcaacaatatctgctggcggggatcggtgacacgctggcgaaatggtatgaagcggtggtgctggctccgcaaccagaaacgttgccgctaaccgtgcgactggggatcaataatgcgcaagccattcgcgacgtcttgttaaacagtagcgaacaggcgctgagcgatcagcaaaatcaacagttaacgcaatcattttgcgatgtggtggatgctattattgctggtggtgggatggctggagataccatcgagttagtgatggatgttgccgacgctgcgcaggtcgcgcaagtgtgtcagcgactgttagctgaaacggagcgactggacgcgctggtcaatgcggcgggaattttacgcatgggcgcgaccgatcagctcagtaaagaggactggcagcagacttttgcggttaacgtcggcggtgcgtttaacctgttccagcaaaccatgaaccagtttcgccgtcagcggggcggggcgattgtcactgtggcgtccgacgccgcgcacacgccgcgtattggcatgagtgcttatggcgcatcgaaagcggcgctgaaaagcctggcgttgagcgtcgggctggaactggcgggtagcggcgtgcgctgtaatgtggtttcgcctggctccaccgacaccgatatgcaacgcacgctgtgggtgagcgatgacgccgaagaacagcgtattcgcggctttggcgagcagtttaaactcggcattccgctggggaaaatcgcccgtccacaagagatcgccaacacgattttgttcctcgcctctgacctcgccagccatattaccctacaggatattgtggtcgatggcggctcaacgctgggggcataa

SEQ ID NO: 132364 - DNA, 1560 bp, Homo sapiens
ttagagcgtgtagtcctggcctgtggaggaagtggagacagctccgtggccaaggagcagcaccagctgggccagagccatgtcagccaaagtgggcagcccagagatgacatctgccatttgtgccctcaggaataggtggcgttgtgtaggcagtgctcctggtttctgctggagaataactggtccattttgaccttctccaaccccacagtttttacctctcttggactggtgcaggggagcatgcttcacctgccaatggtaataagtgacaatcgcctcgccccgctgacggcgaaactggttcatggtttgctggaacaggttaaacgcaccgccgacgttaaccgcaaaagtctgctgccagtcctctttactgagctgatcggtcgcgcccatgcgtaaaattcccgccgcattgaccagcgcgtccagtcgctccgtttcagctttagtgccaagcggatctttcaccacctgcaccatcagatcttgcccctgacgaaccagttccgagatgtcgcgcaccgtgaattgcttttgttcttcacccgccacacattcggtgtgcggcatgatgtcggatgcatgtaatttcagcagtcgctgaatttgaacgagaccttttacttgaacgcactcattccgggatagtaagagcccgcggcgcagggaaacgttttggtcgaccaccgtaagcacagcggcattttctttcttgttctttaatctgtgcccaagactggcgcttagctgctcctcaagaatgtgttgaatgttgactgccgtttttttggatggagtgaaacgatggcgattgcaattggcctcgattttggcagtgattctgtgcgagctttggcggtggactgcgctaccggtgaagagatcgccaccagcgtagagtggtatccccgttggcagaaagggcaattttgtgatgccccgaataaccagttccgtcatcatccgcgtgacgtgcttgcagagcttagcgtcgaacagcgcgcagctgtggtcgggattggcgttgacagtaccggctcgacgcccgcaccgattgatgccgacggaaacgtgctggcgctgcgcccggagtttgccgaaaacccgaacgcgatgttcgtattgtggaaagacatataaaggtctaactccggtgaagcggaaaaatggtttgataagtggttcaaaaatccaattccgccgaaaaacctgaacatgaatttcgaaggttgatctttcgggcagatcaaatccagcattttcagcgtcacgccattggtccagccaaagccatcctgtaatggatattaggccaccgccgccccccgttccggtggtgctgacatcatatttttccaccagctttttctcccggtcataggtgtggtattcaatagtgactcggccctgattggcgttggatttctccagataacggcgcaccgcagcaaggaacgtttcgatattgtactttttgttgatcggcacaatttcgtcacgaatttcgtcgttcggcgcgtgcagggaaattgccagtgcaacgtcgatcat

SEQ ID NO: 132365 - DNA, 1301 bp, Homo sapiens
cctggctcttcctgtttctccagacaactgatagtcacggatggatatttaccttcattacagatatgaacttccgcattcttttcaaatcgtgatgccacggctttccaggtctcatccagctgaatagccagttgttgcacacctttacgtccatcgacaggatgtcccagtgcccgacagacaggaatacgctgagtctgccactcttcaccttgcaacaacttctcgcgaggatctccccagcgatcactgttttcaagccagatgtcccggcggcgcagtgcatcctgaaggcgttccagcaaacatagtgaataacctgcacgctgtatccgtccctccgcatcgtatacgaggcgtttccagcgaccggtgataatatgttcaggcgcatcatcaaggatgcgctttttcgaaccattcagttctgccagataatgaatcgcagccagtacatgttcacctgccggtgccgcacggaaatgcaggtcccgcaacaccgccggaagaaaacgtttaagccgaccgtactgctcaaccatttcgtcatggaaattattgttctgactgccggacgtattgatgccgcgttccaggatgaggtcgctgccagcgaaggtttcctcaaacaacctgtcggtaaagattacaaattcggtggcccgtctgttaaagatgaaaaactgtttggcgtagggaccggcatgggccatcataactaactctctgtctaaacctctatccagcatctcctgagcaatacgcagggcttcttcgtgtttgccctgcattgcgccttcttcacgtaatctgtcagcaatggtcatcagtttctccttttcttgtggtgcgcgttccgctatctcaccaataaatgcacgaaaacgctgggcatcccctgtttgtaatacgtaattaaacagggcttttagctgtctgtcattagtgttccctgtaactagcagcgaaacaatttggtcgactaatcccaacagatcgcgctgacgaatatgtttctgaattaactccaacagcgccattttgcggtgttgcataatctcgtcatccggcaccacggtaatatccaccaacggaaaagccgatgaatatattttgcgggctatagcaggctcgacaaattggggatcgattcgacttgcgagaaactgtagatccagctcttcttcgtctggtgtttccgtcatcaaggcccatcgttgctggctggcaacgatggtttgtgccgcgccagccttgcgcagctcatagctatctttgcctggcttatcaacatacat

SEQ ID NO: 132366 - DNA, 1746 bp, Homo sapiens
atgaatggtcagcgtgctttgcggcggcagaacgtacaattgcgccagaccatcttctccacgcgcggcttctgccgatggaatgttgataatcttgttgcctttgcccttcgacagctgcggcagatcacttaccgggaacatcaacatacggcctgcctgagtgattgccagcagcatatcggaagcatcttcaatcaccaccggcggcataacatgggcattttccgcgtaatcgggttaatcccgtccttaaaagcgaagaagattgacgccatcatgtcatcgctttccattacggaaaaacgtcagcaagaaatagccttcaccgacaaactgtacgctgccgattctcgtttggtggtggcgaaaaattctgacattcagccgacagtcgagtcgctgaaaggcaaacgggtaggcgtattgcagggcaccacccaggagacgttcggtaatgaacattgggcaccaaaaggcattgaaatcgtctcgtatcaggggcaggacaacatttattctgacctgactgccggacgtattgatgccgcgttccaggatgaggtcgctgccagcgaaggtttcctcaaacaacctgtcggtaaagattacaaattcggtggcccgtctgttaaagatgaaaaactgtttggcgtagggaccggcatgggcctgcgtaaagaagataacgaactgcgcgaagcactgaacaaagcctttgccgaaatgcgcgctgacggtacttacgagaaattagcgaaaaagtacttcgattttgatgtttatggtgttattttacagggtgcgctcgtcacgctggagctggctatcagctctgtagtgctcgctgtaatcatcggtttaattggcgctggcggtaagctctcgcaaaatcggctttcggggctgattttcgaagggtacaccacgctgattcgtggcgtgccggacttagtgttgatgctgctgattttctacggtttgcagattgcgctaaacacgcaaatggaacaggtgacagcgattctggctgtctgccatcgcctgcgtgtaccggtggtgacccgtggtgcaggcaccgggctttctggtggcgcgctgccgctggaaaaaggtgtgttgttggtgatggcgcgctttaaagagatcctcgacattaaccccgttggtcgccgcgcgcgcgtgcagccaggcgtgcgtaacctggcgatctcccaggccgttgcaccgcataatctctactacgcaccggacccttcctcacaaatcgcctgttccattggcggcaatgtggctgaaaatgccggcggcgtccactgcctgaaatatggtctgaccgtacataacctgctgaaaattgaagtgcaaacgctggacggcgaggcactgacgcttggatcggacgcgctggattcacctggttttgacctgctggcgctgttcaccggatcggaaggtatgctcggcgtgaccaccgaagtgacggtaaaactgctgccgaagccgcccgtggcgcgggttctgttagccagctttgactcggtagaaaaagccggacttgcggttggtgacatcatcgccaatggcattatccccggcgggctggagatgatggataacctgtcgatccgcgcggcggaagattttattcatgccggttatcccgtcgacgccgaagcgattttgttatgcgagctggacggcgtggagtctgacagtacagcgaagacctgcgagcgaggttaa

SEQ ID NO: 132367 - DNA, 1200 bp, Homo sapiens
atggccccccgtgcggcaaaaggtgccttctccctgcaggtccagtttttccggaaagtggtaagggccgtagttattcgagcagttggtgataagcgctggcagaccatagggctgctcggcgcatacggcgtggttttccggctgccggtggatcttccgttgcgcaggccgattttatgtaaagacttcattatcgacccttaccagatctatctggcgcgctattaccaggccgatgcctgcttattaatgctttcagtactggatgacgaccaatatcgccagcttgccgccgtcgctcacagtctggagatgggggtgctgaccgaagtcagtaatgaagaggaacaggagcgcgccattgcattgggagcaaaggtcgttggcatcaacaaccgcgatctgcgtgatttgtcgattgatctcaaccgtacccgcgagttgcgccgaaactggggcacaaccgaatccggcatcaatacttacgctcaggtgcgcgagttaagccacttcgctaacggttttctgattggttcggcgttgatggcccatgacgatttgcacgccgccgtgcgccgggtgttgctgggtgagaataaagtatgtggcctgacgcgtgggcaagatgtaaagcagcttatgacgcgggcgcgatttacgcgcgagactgcgtttgctgcgattccgcaaaacatccgcatcggtaccgacccgacctatgcgccatttgaatcaaaaaattcacaaggcgaactggttggcttcgatatcgatctggcaaaggaattatgcaaacgcatcaatacgcaatgtacgtttgtcgaaaatccgctggatgcgttaatcccgtccttaaaagcgaagaagattgacgccatcatgtcatcgctttccattacggaaaaacgtcagcaagaaatagccttcaccgacaaactgtacgctgccgattctcgtttggtggtggcgaaaaattctgacattcagccgacagtcgagtcgctgaaaggcaaacgggggcaggacaacatttattctgacctgactgccggacgtattgatgccgcgttccaggatgaggtcgctgccagcgaaggtttcctcaaacaacctgtcggtaaagattacaaattcggtggcccgtctgttaaagatgaaaaactgtttggcgtagggacccgggttgggctcccttaa

SEQ ID NO: 132368 - DNA, 1213 bp, Homo sapiens
gcaggtagatttctccgcctctggcacggaagttctccgacatatccgccattcccatttcaatagtttgcgtggcggcgtaatcacgcacttcctggctgattttcatcgagcagaatttcggcccacacatggagcaaaaatgggcgactttacctgactcttgcggcagggtttcatcgtgataagcgcgggcggtaaacgggtcgagggccagattaaactggtcttcccagcgaaattcgaagcgggctttcgacatggcgttatcgcgaatttgcgcctctatccgttcccggaagagaagattggggaaatggccactgcgccgctcagtacgagtggcgattgccgcacttaatatgcgctcatcggcatacagcgacagacggcgacgcgcgcgggtcaccgcggtataaaccagctctcgcgttactaccggcgtgcgttggctcggcaaaatcaacgccgcatggtcgaactccgatccctgcgatttatgtaccgtcatcgcccacgtagtttcgtgctctggcaagcgactcggttgcacagacttaatattgccgtccggcatcgcaaaccagacgcgcgtcccctgcccggtctctttgacacggaccatcacgcgggagaaaacatcgccgccggtaaaggtaaacagtgtttttggaatattgccgtagtcggcgtaggggtgatcaaagcgcaaatcacgggcgatttgtcggtcgagaatgccaatgccctgagtgcgttgttccatattcggcgtagcaagcagcatctctaccagctccgacacgtcggcgcgcatctcgcgcaccagtttcagcgtttgcagacgttgctctttgagaatatcgcggcgaacaccaccaatcagattcagaccgtaggttttacgcgacccgatcagcaattccgccatcgtcatcgacttttcccgcacgcggaaaaattgcataaagccggtatcaaaaccaacgaaatggcaggagaggccaaggttaagcaaatgactgtgtagccgttcgacttccagcagaatcgagcgaatagtatgtgctcgttgcggcacctcaatccccagtgcattttcaaccgaattggtataggccacactgtgggcaaaaccgcaaatcccacacacgcggtccgataagaaggtcacttcgttgtagcccatccgcgtttctgacagtttctccat

SEQ ID NO: 132369 - DNA, 572 bp, Homo sapiens
  misc_feature (1)...(572): n = a,t,c or g
atagaaaaaaaatctgcttaactagtgatttgctgtgaatctttaatcaatgcctcttaaaaataattcatttannnnnnnnnnnnnnnnnnnnnnnnnnnnnnnnnnnnnnnnnaatgtagccatgaataaaagtcacattagatgcctggaagccatatttttccatgtgatagtcaagatacttttcagccacttccacgtggcctttggtcatgtctattccagtcacgtgtcctttttcgccagccagctggctaagtacatagcaatctctgccacttccactacccagatccaaaatccagcagttttgtagatgctcagggatcaccagaccacagccataatatcttagggctacttcttcgtgtacatttcgcaaggcttcccgaatgtgcttggggaccggcctggctgtggtgacacagccgttggtctggaggtctgccgatctcttcagcacctgcccgtagtaggtctgcacgtccttctgtatctaagcgtcacgaagtgcagccatgtctcctcggcctgcgactcagggcgcgcactctctgcccacgcgtccg

SEQ ID NO: 132370 - DNA, 659 bp, Homo sapiens
gccgatagttcgaagaaaattgccgacattatcagcgttatcgacggtattgccttccagactaatatcctcgcgctgaatgccgcggttgaagccgcgcgtgcgggtgaacagggccgtggttttgccgtggtggcgggtgaagtgcgtaatcttgccagtcgcagcgcccaggcggcaaaagagatcaaagccctcattgaagactccgtctcacgcgttgataccggttcggtgctggtcgaaagcgccggggaaacaatgaacaatatcgtcaatgctgtcactcgcgtgactgacattatgggcgagattgcatcggcatcggatgaacagagccgtggcatcgatcaagtcgcattggcggtttcggaaatggatcgcgtcacgcaacagaacgcatcgctggtgcaggaatcagctgccgccgccgctgcgctggaagaacaggcgagtcgtttaacgcaagcagtttccgcgttccgtctggcagccagcccactcaccaataaaccgcaaacaccatcccgtcctgccaatagccaccggcgctttaatgcccggatgcggatcgtagccttcaatctcaaagtcttcgaaacggtagtcgaagatggattcgggtttacgtttgataatcaacttcggcagcggacgcg

SEQ ID NO: 132371 - DNA, 1843 bp, Homo sapiens
  misc_feature (1)...(1843): n = a,t,c or g
atggagcagctcaccgcgacagtgaagcaaaacgccgataacgcccgccaggcctcgcaactggcgcaaagtgcctccgacaccgcccagcacggcggcaaagtggtggatggcgtantgaaaacgatgcatgagatcgccgatagttcgaagaaaattgccgacattatcagcgttatcgacggtattgccttccaaactaatatcctcgcgctgaatgccgcggttgaaaccgcgcgtgcgggtgaacagggccgtggttttgccgtggtggcgggtgaagtgcgtaatcttgccagtcgcagcgcccaagcggcaaaagagatcaaagccctcattgaagactccgtctcacgcgttgataccggttcggtgctggtcgaaagcgccggggaaacaatgaacaatatcgtcaatgctgtcactcgcgtgactgacattatgggcgaaaattgctttgcatcggatgaacagagccgtggaatcgatcaaattgcattggcggtttcggaaatggatcgcgtcacgcaacagaacacattatattatggctgtggtctggtgatccctgagcatctagaaaactgctggattttggatctgggtagtggaagtggcagagattgctatgtacttagccagctggttggtgaaaaaggacacgtgactggaatagacatgaccaaaggccagaggtccttagcgctacgcatcattggcgttttggcgctcatccttacctcctgtggtctggcggcaatcaacgctgacgatatctggtattttgcctccggtggcgtcattggcagcttactaagcactacgctacaaccactgctacacagtagcgggggaactattgcgctgctctgcgtttgggcagcgggcctgacgttgttcaccggttggtcatgggtgaccattgctgaaaaactcggcggctggattttaaacattctcaccttcgccagtaatcgtacccgtcgcgatgatacctgggtcgatgaagatgagtatgaagacgacgaagagtatgaagatgaaaatcacggcaaacagcatgaatcacgccgtgcccgtattcttcgcggcgcgctagcgcgtcgtaaacggttggcggaaaaattcattaatccgatggggcggcaaacagacgctgcgttgttctccggtaagcggatggatgatgacgaagagattacctacactgcacgcggtgtggctgccgacccggacgacgtcctattttcgggcaatcgtgcaacgcagccagaatatgacgaatacgatccattattaaacggatccccccgcgatattctcaaagagcaacgtctgcaaacgctgaaactggtgcgcgagatgcgcgccgacgtgtcggagctggtagagatgctgcttgctacgccgaatatggaacaacgcactcagggcattggcattctcgaccgacaaatcgcccgtgatttgcgctttgatcacccctacgccgactacggcaatattccaaaaacactgtttacctttaccggcggcgatgttttctcccgcgtgatggtccgtgtcaaagagacgtttgattcgctggcaatgctggaatttgccctcgacaacatgccggataccccactgctgaccgaaggctttagctataaacctcacgcattcgcgctgggctttgttgaagcgccacgcggtgaatacgtgcactggagcatgctcggtgataaccaaaaattgttccgctggcgctttccggccatcacctacccccaactggccggtgttgcgttacatgctgagcggcaataccgtttatgacccaaccgttgaatatcggtag

SEQ ID NO: 132372 - DNA, 2154 bp, Homo sapiens; identical to SEQ ID NO: 131960

SEQ ID NO: 132373 - DNA, 1127 bp, Homo sapiens; identical to SEQ ID NO: 131961

SEQ ID NO: 132374 - DNA, 2471 bp, Homo sapiens; identical to SEQ ID NO: 131963
  misc_feature (1)...(2471): n = a,t,c or g

SEQ ID NO: 132375 - DNA, 1460 bp, Homo sapiens; identical to SEQ ID NO: 131964

SEQ ID NO: 132376 - DNA, 234 bp, Homo sapiens
atggcctgctacatctaccagctgccctcctgggtgctggacgacctgtgccgcaacatggacgcgctcagcgagtgggactggatggagttcgccgcgttcagccatattgctgatcctgggttttgcttccgggctaccgctcgccctgacatccggtaccttacaggcctggatgacggtcgagaatatcgatctcaaaaccattggtttcttctctctgataaattttag

SEQ ID NO: 132377 - DNA, 1491 bp, Homo sapiens
cgccccttccagcggctgctcattcatcatctccaggtaaccctgtaacacggtcaatggcgtacgtaactcatggctcacgttggcaaaaaagttacgccgcgccccttccagttgatgcatttgcgtgacatcacgcgccaccatcagcaactgtttgtgggtataaggcatgacgcgaatttccagatgccgcccggtgttgagcaccagattgagcgggcgagaaaaatcacgcgttttcagatattgcgtaaactccgggtaacgcagtaggttaaggatgttctgcccgttatcttccggccagcgcaaaccaagaatttgttgcgccagaccgttacaccagaaaataccgccctcttccgtggtcagcaccaccgcgtcgggaagcgactccgcgccgctacgaaagcgtttaatcagattgcccagttcacggcggcgttttttatttcgcaactgcatctggtgtaagccctttactagcggttccagcgagatacgacgtttctgccaccattgacgccagttttctgttgatgctgcaagaagttggtcgtaactctgctgcgcgcacatttcaagctggcgaagcgacgcgctgccccactcgtctaaagcagcttgcctgtcatcccgccagtcgatccacaccagtttttgcaacgtcattgtctcgcctgcatgaagctgcgcactggtatgttgcagtaaacggcgctctttggcggtatagcattgctgcacatcaccgctcaccttacagcaacagctgatggccacatcactgcgtccatcctgggtggtgtagctcccctgcatcagatgctgaccaaacacccgcacctgggtttcgtcgagatgttggcgaccgtgattggtttgcgtggcgtcaatgcctgttgaaatcagcactgacgcgtcggcgtccagtggcgtaatagtgatttccagcgcaatgagcggcagttggtctgccgaaacaaagcgacggctggcgatggtgtaacctgagccgttgctggtacgccagacaacattgcggcgtaattcgccactggcaaagtcaagctcacgctgccaggcttcgtgggataacgagaaaacctcaccatttatggcaatctccatccccacgacatcaggcaggttcacaagttcgtctgattcaccttttcccgcccgatgatacagccccgccagatacatccctcgcgtctggcggcgtggtaatcttctttcatgggcataagtgtatgttgcattgctgacgatgccgaccgggcagctatccagacacaccaggcaacccgttttcttctcttctgctgccgttaaattaccgccaaagcgcatgtccagtttcttgccattactgtcaacaatcacttcatcgaaggaatacgcttttgccgccccttgccagttggccgaaatatccagtttgctgcctgtgacatgagtcgtttctttattatccatcgtcat

SEQ ID NO: 132378 - DNA, 1977 bp, Homo sapiens
atgagcgcagcacgcggcgtatttgaacgcggcgactggtcactctcttctccggctaaacgtaaagcggtactgaataaactcgccgatttaatggaagcccacgccgaagagctggcactgctggaaactctcgacaccggcaaaccgattcgtcacagtctgcgtgatgatattcccggcgcggcgcgcgccattcgctggtacgccgaagcgatcgacaaagtgtatggcgaagtggcgaccaccagtagccatgagctggcgatgatcgtgcgtgaaccggtcggcgtgattgccgccatcgtgccgtggaacttcccgctgttgctgacttgctggaaactcggcccggcgctggcggcgggaaacagcgtgattctaaaaccgtctgaaaaatcaccgctcagtgcgattcgtctcgcggggctggcgaaagaagcaggcttgccggatggtgtgttgaacgtggtgacgggttttggtcatgaagccgggcaggcgctgtcgcgtcataacgatatcgacgctcttgccgcggcattgatatcaatatcgcggcatatagatccagatctatcgggtaaatcacgcacagtgcgtgaagccgaattcttcgaacttttcggcgagaaagtaaacgcagaaaacatcgtcgcccgttatgccaaactgcatctctatgatgcatttgccattcaggaatcacgccgtgttgatgctggtaatgaaatcgctccgttactgaaggtggaagggatgaaggtcggtctgatgacctgttatgacttacgctttccagagctggcgctggcacaggcattacagggagctgaaatcctggtacttcctgccgcctgggttcgcgggccgctcaaagagcatcactggtcaacgttgcttgccgctcgtgcgctggataccacctgttatatggtggcggcgggggagtgcgggaacaaaaatatcggtcaaagccggattatagatccctttggcgtcaccattgcggcagcgtcagaaatgcctgcactcattatggcggaagtgacgcccgaacgtgtgcgtcagaggatccccagttttaacgccgtggcagagttgataaacgccgggcatcaggagattgctttccttaccggctcgatggattcccccaccagcattgaacgtcttgccgggtataaagacgcgctggcgcagcatggtattgcgctcaatgaaaaacttatcgctaacggtaaatggacgcctgccagcggggccgaaggggtagaaatgttgctcgaacgtggggctaaatttagcgcgttagttgccagtaacgacgatatggcgataggtgcgatgaaagcgttacacgagcgcggcgtagcggtgccagagcaggtgtcagttatcggattcgatgatatcgctattgccccctacaccgttccggcgctctccagcgtaaaaattccggcgcggggcacgtatccggcttactctgcccgcgtattccgcgaaaaaggggtacccatcaacaaagcaccgggcgatgatgaaatcctgaaaaacaccgtcgattttgtctctttcagctattacgcctcgcgctgcgcctcggcggagatgaacgccaacaacagcagtgcggcgaacgtggtgaaatcgctgcgtaatccgtatctacaggtgagcgactggggctggggaattgatccactcggtctgcgtatcaccatgaatatgatgtacgatcgttatcagaagccgctgtttctggtggaaaacggcctgggcgcaaaagatgaatttgctgccaatggcgagattaacgacgactatcgcatcagctacttacgcgaacatatccgcgcaatgggcgaagcgattgcagacggcattccgctgatgggctacaccacatggggctgtattgatttagtttccgcctctacgggtgaaatgagcaaacgctacttgttgaaatga

SEQ ID NO: 132379 - DNA, 1947 bp, Homo sapiens
cagtcagtccgtgttaaacgcggccaagtcccaagctggcatgcctgcgggtggactctaaagaatttgcactgggccgcgttcattattaacccgcgtttttaaagcgtggatgagatcgatgccatcatggcgcgcacagtcacccgataatggtgcttaatcaccgcctgcgcaaaaccagcagccatagcgtctgggtgcgatcataaacagaccagttttaacgccgtggcagagttgataaacgccgggcatcaggagattgctttccttaccggctcgatggattcccccaccagcattgaacgtcttgccgggtataaagacgcgctggcgcagcatggtattgcgctcaatgaaaagcttatcgctaacggtaaatggacgcctgccagcggggccgaaggggtagaaatgttgctcgaacgtggggctaaatttagcgcgttagttgccagtaacgacgatatggcgataggtgcgatgaaagcgttacacgagcccggcgaaacggtgccagagcaggtgtcagttatcggattcgatgatatcgctattgccccatacaccgttccggcgttctccagcgtaaaaattccggtgactaagatgattcaggaaattattggacggctgatttttatgctcgatggcggggatttctctccgaaagaaaaccttcagcggaaaactgatccggcgcgactcactcattggttctttgcgataacattgtcatcacatgtcatcggcactagtgtcgatgagtccactctagaggatccccattctgtggctggaaacgtcatttgcactcaacatccgcgaacagtcgattatgaaccacatatctacaccgataacaacggtgaattaatgacgctgatgcaacgggaaatagcagacgacaaccgccatttgcgcagcatggaagcctttatcaatcacgtacagggcaagcccgtgatgatagccgacgccgagcagggaaacagggacgcgtgtggaattatgaccaggccagtaacgttatcagaaccccatttcagccagcataccctgaacaagtatgcatcgctgatggcgcaggggaacggctatcttgggcttcgcgccagccatgaagaagattacacgcgccagacgcgagggatgtatctggcggggctgtatcatcgggcgggaaaaggtgaaatcaacgaactggtgaacctgcctgatgtcgtggggatggagattgccataaatgataaagcaggaatatggagcgcatttgagggtgtatctgcaactaaaaacgttctggcctttagtcgtggggattctgtgaacattaatcactctcctcatgatggactagttataataaataaaggaaacgaagaagttgaaggatcgcttctgatgaatgcactgaccgccgtacaaaataacgctgtcgattcaggccaggactatagcggattcaccctcaccccgtcggcgcaatccccgcgtctgctggaactcaccttcaccgaacagacgaccaaacagtttcttgagcaggttgccgagtggcccgtgcaagcgctggagtacaaatcgtttctgcgttttcgggtagccaaaattcttgacgatctatgtgcgaaccagctgcaaccattgctgttgaagacgttgctaaaccgcgctgaaggtgcgttgttgatcaatgcggtgggtgtcgatgatgtgaagcaagcggatgagatggtgaagctggcgacggcggtggcgcatctgattggccgttccaatttcgatgcgatgagcggtcagtattacgcgcgttttgtagtgaaaaatgtcgataactcagacagctatctgcgccagccgcaccgcgtgatggagctacacaacgacggcacgtatgtcgaagagataaccgattacggggtccttccccacgctggctaa

SEQ ID NO: 132380 - DNA, 735 bp, Homo sapiens; identical to SEQ ID NO: 127821

SEQ ID NO: 132381 - DNA, 1213 bp, Homo sapiens
tggtcgagtcggcctgcgcggaagatgtaacggggctaaaccatgcaccgaagctgcggcagcgacgcttatgcgttgttgggtaggggagcgttctgtaagcctgtgaaggtgtgctgtgaggtatgctggaggtatcagaagtgcgaatgctgacataagtaacgataaagcgggtgaaaagcccgctcgccggaagaccaagggttccgcccaagagttcatatcgacggcggtgtttggcacctcgatgtcggctcatcacatcctggggctgaagtaggtcccaagggtatggctgttcgccatttaaagtggtacgcgagctgggtttagaacgtcgtgagacagttcggtccctatctgccgtgggcgctggagaactgaggggggctgctcctagtacgagaggacacggagtgtgcgcatcactgtgttcggtaaatccgatggtaccactgccacgaccagtactgaacagcaccatatggcagcccgcacccgccagggcgctggtcgctacggcatcgttacccggcgcacttaacaagttcagccctggcgttttcagacgctcgccgtaacgcagcacgtcaaccacgacgctggaacccgctttctgggtacagccaagtgatttgtcttccagcgtggtgataccgcccgctttgttccccggcgatgggttttcatagatcggctgatcatgggcaataaagtactgtttgaagtcgttgaccatggtgaccagtttttcaaacgttgcttcgtcgcggcaatggtccatcagcaactgctctgcgccaaacatctccggcacttcggtcagtacggtagtaccgccgttagtaatcacgtagtcagagaaacgccccagcatcgggttagcagtaataccagaaagaccgtcagaaccaccgcactccagaccaaacttcagttcgctgagtttgcctggctcgcgtttatcgttgcgcatcacgttatacagctgatgcaaatgctcgattccggcttcgatctcatcatcctgctgttggcagatcatgaaatgaacgcgttcaggatcgatatcgcccagcgtttcacggaatgcggcaacctggttgttttcacagcccagaccaatgcacggaccgagtcgatatttcgcgccgcggtgcccgctcgggcgctccagtgtggggcgacgggccgccccggcggctagcat

SEQ ID NO: 132382 - DNA, 1239 bp, Homo sapiens; identical to SEQ ID NO: 127826

SEQ ID NO: 132383 - DNA, 2910 bp, Homo sapiens
atgttcggccgggcccaccccagcacccctcctttgcctgtcctcgcagggcccgcctggagcctgctggcgcgcgtggctggcaggcggcgcttggcagccggaggcccgtgggcccgggacattcagcgcgcaggcgcctgggagctgcgcttctcgtaccgcgcgcgctgcgagccgcctgccgtcgggaccgcgtgcacgcgcctctgccgtccgcgcagcgccccctcgcggtgcggtccgggactgcgcccctgcgcaccgctcgaggacgaatgtgaggcgccgctggtgtgccgagcaggctgcagccctgagcatggcttctgtgaacagcccggtgaatgccgatgcctagagggctggactggacccctctgcacggtccctgtctccaccagcagctgcctcagccccaggggcccgtcctctgctaccaccggatgccttgtccctgggcctgggccctgtgacgggaacccgtgtgccaatggaggcagctgtagtgagacacccaggtcctttgaatgcacctgcccgcgtgggttctacgggctgcggtgtgaggtgagcggggtgacatgtgcagatggaccctgcttcaacggcggcttgtgtgtcgggggtgcagaccctgactctgcctacatctgccactgcccacccggtttccaaggctccaactgtgagaagagggtggaccggtgcagcctgcagccatgccgcaatggcggactctgcctggacctgggccacgccctgcgctgccgctgccgcgccggcttcgcgggtcctcgctgcgagcacgacctggacgactgcgcgggccgcgcctgcgctaacggcggcacgtgtgtggagggcggcggcgcgcaccgctgctcctgcgcgctgggcttcggcggccgcgactgccgcgagcgcgcggacccgtgcgccgcgcgcccctgtgctcacggcggccgctgctacgcccacttctccggcctcgtctgcgcttgcgctcccggctacatgggagcgcggtgtgagttcccagtgcaccccgacggcgcaagcgccttgcccgcggccccgccgggcctcaggcccggggaccctcagcgctaccttttgcctccggctctgggactgctcgtggccgcgggcgtggccggcgctgcgctcttgctggtccacgtgcgccgccgtggccactcccaggatgctgggtctcgcttgctggctgggaccccggagccgtcagtccacgcactcccggatgcactcaacaacctaaggacgcaggagggttccggggatggtccgaggctggagtgcatgatgcccaaacggtttgacataccggaacagcgcatgggaaaaaccggtcgggcccatcgcaaaaagagtcgaactggggacctcacccttaccaagggtgcgctctaccaactgagccatatcagcacgctaaatttgatgcctggcagttccctactctcgcatggggagaccccacactaccatcggcgctacggcgtttcacttctgagttcggcatggggagcagcccccctcagttctccagcgcccacggcagatagggaccgaactgtctcacgacgttctaaacccagctcgcgtaccactttaaatggcgaacagccatacccttgggacctacttcagccccaggatgtgatgagccgacatcgaggtgccaaacaccgccgtcgatatgaactcttgggcggattagccaaccttcgtgctcctccgttactctttaggaggagaccgccccagtcaaactacccaccagacactgtccgcaacccggattacgggtcaacgttagaacatcaaacattaaagggtggtatttcaagtggttctgtagccaggtggctgaaggtctatgaagagcgcggagaagctggtttacgcgcgctcaagattggcaccaaaagaaacattgcaatatcagttgatccagaaaaagcggcatcagcattggagctgtcaaaagaccgacgcattgaggatcttgaaaggcaagttcgatttcttgaaacgcggcttatgtatctaaaaaagctgaaagccttagctcatcccacgaaaaaggctgcggagataccgcgcagtacgttttattatcatctaaaggctctcagcaagcctgacaagtatgcggacgttaaaaagcgtattagtgagatttatcacgagaatagaggccgatacggataccgtagggtaacgctgtctcttcatcgagaagggaaacagattaaccataaagctgttcagcgcctgatgggaaccctctcacttaaagcagcgattaaggtcaagcgataccgctcttacagaggagaggtagggcaaaccgcccctaatgttctccaaagagatttcaaggctacgcggccaaacgagaagtgggttaccgatgttactgaatttgcagtcaatgggcgcaagctgtatttgtctccagtaatagatctcttcaacaacgaagttatttcttacagcctttcggaaagaccagtgatgaacatggttgagaatatgctcgatcaggcattcaaaaagcttaatcctcacgagcatcctgttctgcactctgaccagggatggcagtatcgtatgagaagatatcaaaatatccttaaagaacatggtattaaacaaagcatgtccagaaaaggcaattgtctggataatgctgtggtggagtgtttctttggaaccttaaagtcggagtgtttttatcttgatgagttcagtaatataagcgaactgaaggatgctgttacggaatatattgaatactacaacagcagaagaattagcctgaaattaaaaggtctgactccaattgaatatcggaatcagacctatatgcctcgtgtttaa

SEQ ID NO: 132384 - DNA, 813 bp, Homo sapiens
atggctggggatgtgaccaagactatcctagcatctatggctgtggactgggtgtcttctccactgacccttgaaggttgtgttccacttccaccagatgaagagctaaataataaaagctcatgtttccacataaaaaggcatcaaagtccaatttctggctctgctataaactgtgtaacctggagagcagcccccctcagttctccagcgcccacggcagatagggaccgaactgtctcacgacgttctaaacccagctcgcgtaccactttaaatggcgaacagccatacccttgggacctacttcagccccaggatgtgatgagccgacatcgaggtgccaaacaccgccgtcgatatgaactcttgggcggattagccaaccttcgtgctcctccgttactctttaggaggagaccgccccagtcaaactacccaccagacactgtccgcaacccggattacgggtcaacgttagaacatcaaacattaaagggtggtatttcaaggtcggctccatgcagactggcgtccacacttcaaagcctcccacctatcctacacatcaaggctcaatgttcagtgtcaagctatagtaaaggttcacggggtctttccgtcttgccgcgggtacactgcatcttcacagcgagttcaatttcactgagtctcgggtggagacagcctggccatcattacgccattcgtgcaggtcggaacttacccgacaaggaatttcgctaccttaggaccgttatagttacggccgccgtttaccggggcttcgatcaagagcttcgcttgcgctaa

SEQ ID NO: 132385 - DNA, 1296 bp, Homo sapiens
ttaattcggcgtatagcccattaccacgccacttaagccagaaagttgcttcaactcacccagcgaacctttcagcttatctttcgaggcatccggcccaaccagaatacgggtaattttaccctgcactggcgtggatggcgacgtataaacccgataaccggcaccgcgcagcttaccgacaatctcattcactttatcggcatttttcagcgcacccagttgcacaacataggctttacccgtcggtgcagctttttcttccacgaccggcttcggttctggcttcggcgcaggtggtgcttcaaccttcggtttaggcggctccaccggtttcggcttcggtggggcgaccggtgcaggttccggttcaaactcggtgttattggctgcaatagtggccggatcgagcgacggtgctgcggcatcacctgcccgcacctcttccgctgcgccttccggcggctgcgatcggaacgccgtattgttgacttcaaacgcaacaaagacggtatcccggcagttgttgaacgtcttgagtacgatccgaaccgttccgcgaacatcgcgctggttctgtacaaagacggtgaacgccgttacatcctggcccctaaaggcctgaaagctggcgaccagattcagtctggcgttgatgctgcaatcaaaccaggtaacacccggttgagttacggtcagcatcgcgaggcttggcgctgacgggccgggtgatatcttcaaccggagctccgggcggttgtagccttcaacgattttacgatactcttcaaagccttctgtacgtgaagcgacgaacgctttgtcgtacagattttcttcaataatgacatggcccatcgcattcaacagcgcgatgttcgagccgtttttcagtgcaatgtgcatgtcagcaatgcgcgcggtttcaattttgcgcggatcgcagacgataattttcgccccgttacgtttagcgttaattacgtgattcgccacgattgggtgggaatccgccgggttgtacccgaaaacgaacactaaatcggtattatcaatttcgttaatagcattgctcattgcgccattaccgaccgattggtgcagaccgaagttataacgcccggtgtcacctacttcctcgttgacgacgatcttacgaatattcttcgcccaaaagatatcatcccgattgattaggttgtgatgccagtaacggaaaaacatgatgatgaacgaggcaaacataaccacgccgacaaacgggtgcagaattcgcgccagctgcggtgtgcccat

SEQ ID NO: 132386 - DNA, 291 bp, Homo sapiens
ttatcctcctccagagaagcagcgtgctccaagagtctggtgcagtgataccagcagaagctgcaggtagcgtgtcagcgccgccacgtagttaaagtggttaaccctgagctgcacaagggcaaaccttttgctccgttgctggaaaaaaacagcaaatccggtggtcgtaacaacaatggccgtatcaccactcgtcatatcggtggtggccacaagcaggcttaccgtattgttgacttcaaacgcaacaaagacggtatcccggcagttgatgaacgtcttgagtac

SEQ ID NO: 132387 - DNA, 1110 bp, Homo sapiens
aggtcggataaggcgtttacgccgcatccgacaatctgtacgtgaacaggaagaaatctatgttggccgggtaaggcggagccgctctccggcaaaaagaatcaataacaattatacgcgtgacccggcgcgggaaatgtcggggcgctctcccaagtgacacactttcgagaggattcaggatggggcaatcatcgcaaccacatgagttaggcggcgggctgaagtcacgccacgtcaccatgttgtctattgccggtgttatcggcgcaagtctgtttgtcggttccagcgtcgccatcgccgaagcgggcccggcggtattactggcctatctgttcgccgggctactggtggttatgattatgcggatgttggcggaaatggcggttgccacgcccgataccggttcgttttccacctatgccgataaagccattggtcgctgggcgggctataccatcggctggttgtactggtggttttgggtactggttatcccgctggaagccaacatcgccgccatgatcctgcactcatgggttccaggcattcccatctggttattttccctcgtcattaccctcgccttaactggcagtaacttattaagcgttaaaaactacggcgaatttgagttctggctgttgacccgcaaaacggcgctggggatgtttatcgaagccgttggtatcaacattcgggcggcaaaaaatgccggggtaaacacgcgaatcatcgtcatgctcacttatgtgttccgttcgttgatcggccctgatggcgagcagtaccaagctgccgcgcagcgagttccgcgccatgcttcacttctgtgaaaacccaggcaaaattcagtcccgtgctgaactgctgaagaaaatgaccggccgtgagctgaaaccgcacgaccgtactgtagacgtgacgatccgccgtattcgtaaacatttcgaatctacgccggatacgccggaaatcatcgccaccattcacggtgaagttcattcaattgagaaaataacaagaaacacaacctcacctgtccttgggctctgtgttgacactccctgtaacatccaatggctttctattaaatgtgagacagag

SEQ ID NO: 132388 - DNA, 582 bp, Homo sapiens
atgcactggagcctcggttcccttccctatctcccggccaccctccccttcctgaacctgtggaagacccggggaatttctcggaccctcccattgttggcaacttcattcatcactagagtctacacagagagaattaaggccggcgctgactggcgcaatattttcgtcgtcggcgatctgcatgggtgctacacgctgctgatgaatgaactcgaaaaggtttcgttcgaccctgcgtgtgatttgctgatttcggttggagaccttgttgaccgcggcgcggaaaacgtcgagtgcctggagctgattactatgccttggttccgggctgtgcgaggtaaccatgagcagatgatgattgatgggctatcggagtatggaaacgttaaccactggctggaaaacggcggcgtgtggttcttcagtcttgattatgaaaaagaggtgctggctaaggctctggttcataaatcggccagcctgccattcgtcatcgagctgaataaggccctgtgtaaccaggtggtcagcaaccaccagcgggttcgtcccgatacatcccccattgagacccagtga

SEQ ID NO: 132389 - DNA, 563 bp, Homo sapiens
gaaattcgacagcgtattgcgtaaggcgctctcttcgcagcagctggcggcgcgtattgaagcctatgacgaagcgcacagtattctggcgcaggaattgcccattttgccgctggcgtcgtcattgcgtttgcaggcctatcggtacgatatcaaaggtctggtacttagcccgtttggtaacgcctcctttgctggggtgtatcgcgagaaacaggatgaggtgaaaaaaccatgattatcttcaccttacgccgcattttgttattgattgtcaccttgttcctgctgaccttcgttggcttcagcttgagctatttcacccctcatgcgccgttacaaggcgcgtcactgtggaatgcctgggtgttctggtttaacggcctgatccactgggattttggtgtttccagcattaacggtcaaccgattgccgaacagttaaaagaggtcttcccggcgacgatggaactgtgcatcctcgccttcggttttgcgctgattgttggcatccccgtggggatgattgccgggattacgcgccctaagtggcaggataactt

SEQ ID NO: 132390 - DNA, 1219 bp, Homo sapiens
atgaaaccgatatctttatctgcgatagcagggagtttttccaccactttgctaaagcctcggttcatatttagcccgtggtcagcatcgccaatttcgcgatccagtccggtaagatactcgctctcggtgctgaaaatatcgccacaacgagtgatcgtcgagcgcaacggcaaaaagctgtatgtaaagcgcatgacgcatcatctgtttcattccgtacgttatccgttcggccgaccaacgattgtccgtgaggttgcggtaattaaagaactggaacgggccggtgtcatcgtgccgaagatcgtttttggtgaagcggtgaaaattgagggtgaatggcgagcgttgctggtgactgaagatatggcggggttcatcagcattgctgactggtatgcccagcatgcagtatcgccttattctgacgaagtacggcaagccatgttgaaagcagtggcgctggcgtttaagaaaatgcatagcattaatcgtcagcatggctgttgttatgttcgccatatctatgtgaaaacagaaggtaatgcagaagctggttttcttgacctggagaaaagtcgtcgccgcttgcgtcgcgataaagcgattaatcatgacttccgccagctggaaaaatatctggagccaatccccaaagcggactgggagcagaccaacctcgcccactggtgcgatccgaaattcgacagcgtattgcgtaaggcgctctcttcgcagcagctggcggcgcgtattgaagcctatgacgaagcgcagagtattctggcgcaggaattgcccattttgccgctggcgtcgtcattgcgtttgcaggcctatcggtacgatatcaaaggtctggtacttagcccgtttggtaacgcctcctttgctggggtgtatcgcgagaaacaggatgagagtaatttatttgatggcagcgcagagaaaacgtcaggtctggttgtgattggcgatggcaataccgttaatatgaatggtggacttgaactgattggagagaaaaacgcgcttgcagatgggtcgcaggttacttccttgcgcacaggatatagttataccagcgttattgtcgttagtggtgagtcgtcggtatatctgaatggagatacgacaatcagcggagaattccctctggggtttgccggggttattcgggtacaggataaagctttgctggaaattggcagtgcgc

SEQ ID NO: 132391 - DNA, 1570 bp, Homo sapiens
ttaaagaacgtggactccaacgtcaaagggcgaaaaaccgtctatcaggggcgatggcccactacgtgacccatcacccaaatcaagttttttggggtcgaggtgccgtaaagcactaattcggaaccttaaagggaccccccgtttagaacttaacggggaaaccggcaactccagcaatttcctcgtcactggcgctccaatcgcctcgatgggcttctcctccagatacagctgcagatcctgggcgggcacaccgttgagcgtcacctcgtagtgcagattgcactcgttgtcaatggacatccaggccatgccgacggcatgtggattctgtgcatccgtgtgctcctgtcgcttcagcagaatgggttccgccgagtcccgagcatcggccactggacggggcactaggcggccacggatcaggctcgtctcatgctcggtggccacattaacgcccagttcgccggcatacagcgactcgaggaccttgggacccaacttctccacactaccaatggcctggttgaagttgaagctcggcgtcagatcctccagcttggccttccgcttttcctgctcctcaatcaaactgatgtttgggctatcccgggtgttcacgtgctccgtttcgatgttgtaggcagagatccatcggggttttaatagacccacggcaaaacgctggtcttttgtggaaggtttttgcgactttccggccagagccaactcggcctgctgtttgttgccccagaggaggacagagtggagacgatcgtcgcgcaggatgcgcttgtaatcacgtggaactcgtcgccagacaccgcagatcttgcccgtggcattctgatagacactgagagtgcccgccaaggtggtctccagttgatgctcctccaggattacacccgcatcatcaacgaattgaatggcacgcggacgaccgattcgcgatgaggtgtagaaggagtagtatagattcttcttgtggaacaggaaacgggcggtggccaccacattctgcggattgtaggtggtgtacatggacttcatttcctcacccttgaggaaataggaggtgcggcccgttagcaacgcagcgtaatgtttcatgttgcgctcttcctcttccattggggccgggaaatccaaggtagaatccgattcgcaaccggaaccgagcctgcgagagtattggcgcacaaagcccggataggcagcagcagtcacccgcttggacttccggaaaactacacaggccgatgcatcagcggaaccacaggtgcttgggtcatcactacccgtcagcttgccgcctcgcgtgcggctcgcaatcatgccttctacctcaatagctgccgcggagatctccgcagcgataccgtcgacgttgctcggctgcttcacaaacaggcgaaagtctatggagcgcaattcccactcatacggcacaggcagcagcttgggcaaggtggccttctgcaggtgaggcaggggctcagcccaaggacctgacacctggatgctctctgaggacaccactttcagcagctggaacagggctctc

SEQ ID NO: 132392 - DNA, 1575 bp, Homo sapiens
tcagactgtgttggagatagatgtagccaaaatatctttttcttcggcttcccgctgaccagcgtgctggtatttcgctttgatgttggtgtcgcgccgccagaaatcttgttgcaggatggctggccaagaggtgggctgagtgggtgggacacccatcagatgggaatcgttggcaatcgccagcaccactttgatgtcttcttcttgcaggttgcgtaactctttacctaacggccacagtgctttgtctaccaggcgttggtcatagtattccgccagccacaggtctgctttggcgaagaccatctccagcatgccgagacgcgtcgagaagaatggccaatcgcggcacatagcctccagctcgctctgtttgccgtcttcgaccactttttgcagcgccgtacctgcacccagccaggcggggagcatcagacggttttgcgtccaggcgaagatccacggaatggcgcgtagtgactcgacgccgccggttgggcgacgtttcgccggacgtgaacccaacggcagtttgcccagttcttgttccggcgtagcggagcggaagtaaggcacaaaatctttgttttcacgtacgtagccgcggtagacatcgcaggagatgactgacagttcatccataatgcgacgccagctctctttcggctccggcggtggcagcaggttggcttccagaatcgccccggtataaagcgacaggctgctgacggggatcctgtgcgttggtggatccagccagtcatcaagccttccgccgccgggaagaatttgcagatgaccataaaacagcacaatgacgcccagcccaagccagaacgcaggtgtggagattccggtaatggccattattcgcaccagatgatccagccagcgatttcgccagactgcagagagtatgcccagcgggatgccaatcaggagtgccagcagcagggcaccaaaagccagctccagcgtcgccgggaaaaatatacgcaactcttccagcaccggacgcccggtacgaatggatgttcccaggtcaccatgaaacaggtcgctgacgtagcggtaaaactgtacatacagtggctggtccagtcccagttgctggcgaatattttccacgatagcatcgcctggaaccatacctgcgcgaccactggcatttttttgattacgcagtttatcggccagctgatacgccagtttgtgcgcctgttcagcaaccggctgcggcaggcgggcttgttccagcagcatagaaaccgcttcggtttccgggcggcgataggccgcggtgatcgcggcgcgggaaaccgactggggcaatatttgctcggcaaagtcgaggaatggctggtgtggttcctctgccggagtcggtgcttcatcgctctcattggccgcgccagaaagcagcgcaggtagctccggcagagtatcgctgttttccagttgttcgagataagaaaaaatcgcctgcttaattaaccagtgtggtgtgcgatcgatacgtgtcgcggcagacttaatacgctcacgcgtcgcgtcgtccagcttaacccccat

SEQ ID NO: 132393 - DNA, 2229 bp, Homo sapiens
atggacaaggaattaccgtggctggcggataacgcccaactggaactgaaatataaaaaaggcaaaacgccgctcagtcatcgtcgcatgggggaagtttttatggtatttagctacacgttgcaggctgggatggagcaacaaaataaagctggttccctgcgtttctattatcggtttaagggttatcaccgcatcaataaactggtgctggctttcaaaggttgcttctacgtgtttgagcggatgtgcctgttttattgcttgttgcaatacggcggcccagatattttaccaaaattatctgcttccctgactgttcctgaactacagccacatctcattgccgcccttctccccaaccaaaagcctccttcgcatcttcctctcatatccccccaccttagcccacaagatattgatggggtaaccatagcaagttcctgtcctgttaacttccgtgccgccgaagcggacacgttattgattctgggtgatagcctgagcgccgggtatcgaatgtctgccagcgcggcctggcctgccttgttgaatgataattggcagagtaaaacgtcgcatcagccgcgttgggtgctggttgaactgggcggcaatgacggtttgcgtggttttcagccacagcaaaccgagcaaacgctgcgccagattttgcaggatgtcaaagccgccaacgctgaaccattgttaatgcaaatacgtctgcctgcaaactatggtcgccgttataatgaagcctttagcgccatttaccccaaactcgccaaagagtttgatgttccgctgctgcccttttttatggaagaggtctacctcaagccacaatggatgcaggatgacggtattcatcccaaccgcgacgcccagccgtttattgccgactggatggcgaagcagttgcagcctttagcgttgctttctgcgggctgcttctacgcggtttactatgtcacctacaaaacccgcctacgcaaacgcgttgctgatgtaccgcgccgtccgctgtttaccatgaaccgcgtggagaccaatcttacgtgggtgatcctgatgggtatcgcgctggtaagcgtcggcatcttcttcatgcacaacggctttttgctgttccggcttaactcctacagtcagatcttttccagtgaagtctccggcgtggcgttaaaacgcttcttttactttttcatcccggcgatgctggtggtctactttctgcgccaggacagcaaagcgtggctgtttttcctcgtcagcacggtcgcctttggcttgctgacttatatgattgtcggcggcactcgcgccaatatcatcatcgcattcgctatcttcctgtttattggcattattcgcggctggatttcgttgtggatgctggcggcggcgggcgtgctggggattgttggcatgttctggctggcactaaaacgctatggaatgaataacgatactaccacgataacggggcggcagatagaccggctcttccgggtacattcgcgtttcgcatttggcgaacgcgtgcaggccgatcatccagatactacgaacctggagaatgacagccgccgttaccagcaagttgatcagcgtcagcggcaggcagattttccagccgaaggacattacctggtcataacgcggacgcgagatggtcacaatcccgatgtactcacccacgaagaacagaccgaacttcataccggaatattcaatgtggtaaccatccgccagttcctgctcggttaccggctggtcaaacgggagaccgtgacataccgcaacggacctgcaggcatgcaagctgataccgcccaagagttcatatcgacggcggtgtttggcacctcgatgtcggctcatcacatcctggggctgaaaacggagagaaccatgcacaaatttactaaagccctggcagccattggtctggcagccgttatgtcacaatccgctatggcggagaacctgaagctcggttttctggtgaagcaaccggaagagccgtggttccagaccgaatggaagtttgccgataaagccgggaaggatttagggtttgaggttattaagattgccgtgccggatggcgaaaaaacattgaacgcgatcgacagcctggctgccagtggcgcaaaaggtttcgttatttgtactccggaccccaaacttggctctgcgatcccggctcatcccctgatgctgtga

SEQ ID NO: 132394 - DNA, 861 bp, Homo sapiens
tcagtccaccgagatggtggtgcgcaaaaccagcccggtgcttaaccgtctgctggggatttttttgccgtttatcaccaccaactgtgcagtgctcggcgtggcgttgctgaatatcaatctcgggcacaatttcttgcattcggcgctgtacggcttttccgccgctgtcggtttttcgctggtgatggtgctcttcgccgccatccgcgaacgccttgctgtggctgatgtcccgggaccttttcgcgggaatgccattgcgttaattaccgcaggtcttatgtctctggcctttatgggcttcagtggtttggagaacttgtaatgaatgctttctggattgccgttgccgccttgagcctgctgggcctggcgtttggcgccattctgggttatgcctcccgccgctttgcggtggaagacgatccggtcgttgagaaaattgactaaatctgcaggatcgttaacccgcacataacgcataccacgcttatcagcaaagtctgttttactgaccgcgttaatgttgttcaggaagcatcccttatcgggtatatcagcgccgttctggtctttctgcagacgtttctctgcattgtcataggctgattttactgcctttggcgttgccgccagcgtttcaaacgtactgttggtcgcactgctgagctgcactatcccctttttcgtcgaacttgcatcctcaagcgccacggcggatgcaatatcctctgcccgtttagctgctgtctcggcgcgcgttgccgcggattccgccgtacttttgctctgagctgccgccgtcgaacggggtcctttgggaaactggtttttgcggtaaccctttcctatccacat

SEQ ID NO: 132395 - DNA, 1434 bp, Homo sapiens
  misc_feature (1)...(1434): n = a,t,c or g
atgactgaacaggcaacaacaaccgatgaactggctttcacaaggccgtatggcgagcaggagaagcaaattcttactgccgaagcggtagaatttctgactgagctggtgacgcattttacgccacaacgcaataaacttctggcagcgcgcattcagcagcagcaagatattgataacggaacgttgcctgattttatttcggaaacagcttccattcgcgatgctgatgggaaaattcgcgggattcctgcggacttagaagaccgacgcgtagagataactggcccggtagagcgcaagatggtgatcaacgcgctcaacgccaatgtgaaagtctttatggccgatttcgaagattcctggcaccagacggaaacngccgatgatgccgatgacgccgccgaactggctgacgatgcggcagccgtttttgaggattctgcgcttgtttccgacgctttcgcgttcgtttcggatgtcttcgctgcggaagcagacctcgctgctgcgctggcctgttcagtggcttcgccagccttcgttgtggctgttgaagcagacgatgcggcgctttctgccgattttccggcggcggtggcactggctgaggcctgcccggcacttgttgacgctgcactggcagacgacgcagccgctgtttttgagcctgccgcagccgaggcgctctgtcccgctgccgtttcagaagacctggcgttcgtctcgacgttaatccgccttcggtccagctatagtgccactcagaaaaaacaggacattctcgaagcgattcgtgatcaccaggtggtgatcgtcgccggggaaacgggttctggtaaaacgactcagttaccgaaaatctgtatggagctggggcgcgggattaaaggactgatcggccatacccagccgcgtcgtctggcggcaagaacagtggcgaaccgtattgcggaagagctgaaaacggagccgggcggttgcatcggttacaaagtgcgtttcagcgatcacgtaagtgataacacgatggtcaagctgatgaccgacggtatcctgctggcggagatccagcaagaccgcctgctgatgcagtacgacactatcattattgacgaagcgcacgaacgcagcctgaatatcgattttttgctcggctatttgaaagagttgctgccgcggcgtcctgacctaaaaatcattatcacttccgcgactatcgacccggaacgcttttcgcgccactttaataatgcgccgattattgaagtctccggtcggacctatccggtggaagtgcgctatcgcccgattgttgaagaagccgatgacaccgagcgcgatcagttgcaggcgtttgtgcttgtatatgtgttatgtattctaatatatgtcaataatgttaacgcttactggtcagaagtaaatatttga

SEQ ID NO: 132396 - DNA, 2400 bp, Homo sapiens
atgccgacaggaatgccaatgattgaaatacattgtgcgatgcccgttgcaatgtgcatcagggcatacccacagcctaagaaattcagccacctgggctttaaacatcatcatgcaagcggcctctgcggctacctggatgcagcttgcatcatggtcagacgcgtcacggccaatgccttcagcggtaacttcgattgcctggatgataccctgcgggtcaacaacgaaggtcgcacggtcagccagaccttcatcttcacgcatgttgtcgaagttacgggtcagggcgccagtcgggtcgccgatcatcgcatatttgattttagcgatggtttcagagctgctgtgccatgctttgtgggtgaagtgagtatcggtagatactgcgtatacgtctacgcccagtttctgcagttcttcgtagtggtcagcaacgtcacccagttcggtcgggcatacgaaaaggaacttcctgctccagtaaaagcgattgaaaaacagggcattacaatcatcaaaacattcgatgcccccggaggaatgaaaggttatctcggaaagtatcaggatatgggcgtcaccatctacctgactccagatggtaagcacgctatctctggttacatgtacaacgagaaaggtgaaaacctgagtaacacacttatcgaaaaagaaatttacgcaccagccggacgcgaaatgtggcaacggatggaacaatcccactggctcctcgacggtaaaaaagatgcgccggtcattgtctacgtcttcgccgatccgttctgcccatattgtaaacagttctggcagcaggcgcgcccgtgggattctggcaaagtgcattcttatgtctttggttatctggtgatcgccaaagcgtcactgcggttttatattctggcggaagtcagccagttcactttattgatggcgggcatgactgtactgattcacgtactgggatcggatatccctcaccataaccgaaccgttttgcggtttttcaatgacgcgctggccgcgacgagcgagcacgcgcgcgagtttatggttgttggcaaggacgacggcttaagtgatagctgtccggcgctttctgtgcaatttttccctgggaaaaaatcgctggcggaagcggtcatcgcgaaagcaaaagctaaccgtcagcagcgttttttcttccacggtcagttcaatcccacactgtggctggctctgctgagtggtggcattaagcccagccagtttttctggcatatctggggggcagacctgtatgagctttccagtggcttgagatataagcttttttacccactacgtcgcctggcgcaaaagcgagtcggctgtgtatttgccacccgcggcgatttgagcttttttgccaaaacgcacccaaaggtgcggggcgaactgctgttcttcccgacgcggatggacccttcgctcaatacgatggcgaacgatcggcaacgtgaagggaaaatgaccattctggtggggaactccggcgaccgcagcaatgagcatattgctgccttgcgcgccgttcatcagcaatttggcgatacggtaaaagtggtggtgccgatgggatatccgcctaataacgaagcgtacattgaggaagttcgtcaggcggtgctggagttattcagcgaagaaaatctacaaattctgagcgaaaaactggaatttgacgcctatctggcgctacttcgtcagtgcgatcttggttactttatttttgcccgccagcagggcattggtacgctgtgcttactgattcaggcgggcattccttgtgtgcttaaccgggaaaatccgttctggcaggatatgacggaacaacatttgccggtgctgtttactaccgacgatctcaacgaggatattggaggtcgcatgagtctgctgcaattcagtggcctgtttgttgtctggctgctctgcacgctgtttattgccacgctgacctggtttgagtttcgccgtgtgcgctttaacttcaatgtcttcttttcattgctgtttttgctcacctttttcttcggcttcccgctgaccagcgtgctggtatttcgctttgatgttggtgtcgcgccgccagaaatcttgttgcaggcgttgctttctgcgggctgcttctacgcggtttactatgtcacctacaaaacccgcctacgcaaacgcgttgctgatgtaccgcgccgtccgctgtttaccatgaaccgcgtggagaccaatcttacgtgggtgatcctgatgggtatcgcgctggtaagcgtcggcatcttcttcatgcacaacggctttttgctgttccggcttaactcctacagtcagatcttttccagtgaagtctccggcgtggcgttaaaacgcttcttttaa

SEQ ID NO: 132397 - DNA, 912 bp, Homo sapiens
atgccggaagcagacagcccgttcagggcgcttcagcggtgttgcgggtgtcggggctggcttaactatgcggcatcagagcagattgtactgagagtgcaccatatgcgggtgaatacccgcacagatgcgtcgtaccttatcgcccagcatcatcttattctctatttgtattccctccatctttcagatacggatgtagccttggatgtgcccgtgcccaatgaagaggaagagcgcaacatgaaacattacgctgcgttgctaacgggccgcacctcctatttcctcaagggtgaggaaatgaagtccatgtacaccacctacaatccgcagaatgtggtggccaccgcccgtttcctgttccacaagaagaatctatactactccttctacacctcatcgcgaatcggtcgtccgcgtgccattcaattcgttgatgatgcgggtgtaatcctggaggagcatcaactggagaccaccttggcgggcactctcagtgtctatcagaatgccacgggcaagatctgcggtgtctggcgacgagttccacgtgattacaagcgcatcctgcgcgacgatcgtctccatgttgtcctcctctggggcaacaaacagcaggccgaatgggagttaaaagaacaaggatgtaaagtgacctgtaaggccaatcgactgagagataggcccagatatagggtcaaccttcgtgggaactatcagacggttcacagagatctattaagagtgaaggggataatcttagtctggtttggagttggatatgcgtcatatatcgatcagttcagacttacaccgggactcggcggactgactcttgagtcatatgagacaacagagttccgcgatcgattcgagatattctggcacatggatgtagaatatgtttga

SEQ ID NO: 132398 - DNA, 2592 bp, Homo sapiens
atggctgaggaagcctcagaatcacggtatgaggcaaaaggcacttcttacatggcggcagcaagagaaaatcaggaagaagcaaaagcggaaccccctgataaacccatcagatctcgtttgaactttgagggtctgctgacacatggattttcttctgcctctgccaaatctgagacagcaataccaatcccttttcttcttcctcttcctcagcctactcaaaacaaaaatgatgaggatgaagatcttcgtgatggtccacttctacttaatgaatatgtccagggtcatgctgcctatatagtaaggtcaaccagaatcaagatgtctgggactgaggaagcaattcttggaggacgtgacagccatcctgctgctggcggcggctcagtgttatgctttggacagtgccagtacacagcagaagagtaccaggccatccagaaggccctgaggcagaggctgggcccagaatacataagtagccgcatggctggcggaggccagaaggtgtgctacattgagggtcatcgggtaattaatctggccaatgagatgtttggttacaatggctgggcacactccatcacgcagcagaatgtggattttgttgacctcaacaatggcaagttctacgtgggagtctgtgcatttgtgagggtccagctgaaggtgaggggatggagtagacctgctgcccggaaggatcagtgggtggtaggagaaggtgagcaggatggttcatatcatgaagatgttggttatggtgttagtgagggcctcaagtccaaggctttatctttggagaaggcaaggaaggaggcggtgacagacgggctgaagcgagccctcaggagttttgggaatgcacttggaaactgtattctggacaaagactacctgagatcactaaataagcttccacgccaggtatatcagacatggatgagtggagtgaagataatgcggcaaactcttgtgtgtcatgggttgagtatttggaggatgcaaggagaaaaaaatggggtctgtggtggggcagccctggagtcacactgccttgccatgagtggcttctggagtgttcctcctgcctcatctgctctccgaggtccctgccatgtcgctccccagggcagcattcccatcctgtgcctgagggattcttgtcctcatggagccccacaagctcccgaagcagcgtttggcacagcgcagggtcggaacgtggacactaatttccgcccacgctccccgcgtcctggcgggatcaccacagacacgacgtccattgctggggtcctcggcgatgcccgtgtgcgcagccccgcgagtctcagggggcggggcgcggtgacgtcgcgggcgcctgggccgtgctgtggcggcggcggcggcggtagtggcggcggcggcggtgcctgggcggcagcagcagcagtagcggcagccctgaggacgttttacaccgaagaagagggagatcttcggtttagacaacttcgttccggcagccaccatttgggtcgcattacgcttagctccttcaaggaatatttttctggagatggaatcatcatttgttttgctgaatctcgttgtgggcagtgctcaccagggcggtctcgcccctgcacctgtggcaagagccagtggcttgactgggggctgcaggatctgttcttcaggatggctcactcgcgtggccagcaaggaggtgctgctcccagcccagagaatactgatggtctgggccaggcaatgaagtgtctggcagcctatggtgtgcttcacgtggaacacaggctgaaatgggaaggatctgggtcctgcagggtgcgtgtggcgattcagaggcccttctacaagtggcgggcgccggtcgctaactcagcatcgcgtttttttagcggtctgctgaagcttctgggtttccttacggaagaagttcgtgccgccgccgtagaaggctttgttaaattaaagatccttcgccttgatacggatgtagccttggatgtgcccgtgcccaatgaagaggaagagcgcaacatgaaacattacgctgcgttgctaacgggccgcacctcctatttcctcaagggtgaggaaatgaagtccatgtacaccacctacaatccgcagaatgtggtggccaccgcccgtttcctgttccacaagaagaatctatactactccttctacacctcatcgcgaatcggtcgtccgcgtgccattcaattcgttgatgatgcgggtgtaatcctggaggagcatcaactggagaccaccttggcgggcactctcagtgtctatcagaatgccacgggcaagatctgcggtgtctggcgacgagttccacgtgattacaagcgcatcctgcgcgacgatcgtctccatgttgtcctcctctggggcaacaaacagcaggccgagttggctctggccggaaagacaagctgtgaccgtctccgggagctgcatgtgtcagaggttttcaccgtcatcaccgaaacgcgcgaggcagctgcggtaaagctcatcagcgtggtcgtgaagcgattcacagatgtctgcctgttcatccgc

SEQ ID NO: 132399 - DNA, 3411 bp, Homo sapiens
ttatccttcaacctgcgtccggagcgatgattttgtacgtttatgaatgagtccggcgctttcaaaaagccagtacaacagttttgcgatcatcagacatgcgccgaagaccacgataaaaaagaccacgcgtgagacaaacgaatccagcccttcacgcgccagcacgatcatattgaagatcgccccaaagcagaaactgtgcaatatcgcagctttatagcgattaggctcgcggttgcccagctcatacagccagtcgaaccatttgatgatcagaccaaccacgatcgccccgagcgggatgaacaacgcgccgcccatcaccaccagtgagcctataagcgtaggcgagatcgccagtccggagtggttattcagcacttcccaggtaaagtagttggctgagttcagcaccatactcgggcgacccggccacagccaggaagggataaagacatagaaatcgcggacaattggagccaggccctggaagtcgatgttgtcgtagttctgcaacagcaacgccagattctcccacggcgagaaggtgtcgcgagtgagatagagaaacgtatagaacgcttcatcgccgctcacattcattccatagcgttttagtgccagccagaacatgccaacaatccccagcacgcccgccgccgccagcatccacaacgaaatccagccgcgaataatgccaataaacaggaagatagcgaatgcgatgatgatattggcgcgagtgccgccgacaatcatataagtcagcaagccaaaggcgaccgtgctgacgaggaaaaacagccacgctttgctgtcctggcgcagaaagtagaccaccagcatcgccgggatgaaaaagtaaaagaagcgttttaacgccacgccggagacttcactggaaaagatctgactgtaggagttaagccggaacagcaaaaagccgttgtgcatgaagaagatgccgacgcttaccagcgcgatacccatcaggatcacccacgtaagattggtctccacgcggttcatggtaaacagcggacggcgcggtacatcagcaacgcgtttgcgtaggcgggttttgtaggtgacatagtaaaccgcgtagaagcagcccgcagaaagcaacgcctgcaacaagatttctggcggcgtaggctgggactggggctgggaaggaggagagccggagccgttatcaccgaacatcggttttggcataaaggtcgcggttttaccgaagcggtgcgctacgttgtgcacaacatatttgtagatctgaatttcgtcagcttttttggtcatggtattgaagcgggtagccacttcgttctgaccagcagtcgctacttcgtggtgatgggcttcaaccaccagacccatctgttccatcaccagacacatttcagaacgaatatcctgagccgagtctaccggtggaaccgggaagtaaccgcctttcactgccggacggtgacctttgttaccaccttcgtattgggtggaggagttccatgcgccttcgatatcgtcgatagcaacgtgggaaccggagatagatgatccgaaacggatgtcatcgaacaggaagaattcaggttctggcccgaacagtacggtgtcggcaatgccagtggaacgcaggtaatcttcggcgcgcttcgcaatggagcgcgggtcacggtcatagccttgcagggtgccaggttcaaggatgtcgcaacggataatcagggtggagtcggcgaagaacgggtcaatcactgcggtggatgcgtctggcatcagcaccatgtcggactcgttaatgcctttccagccgccaatcgaggagccgtcaaacattttgccttcttcgaagaattcagcattcacctgatgagcagggatagtgacgtgctgttctttacctttagtatcggtgaagcgcaaatcaacaaacttcacttcgtgctcgttcagcatcgtcaccccccatcgtcggcttcaacacccacaacgaaggctgtcgaacccactgaacagtccagcgcagcagcgagttctgcttccgcagcgaagacatccgaaacgaacgcgaaagcgtcggaaacaagcgcagaatcctcaaaaacggctgccgcatcgtcagccagttcggcggcgtcatcggcatcatcggcgtctgcttcaaaagatgaggcgaccagacaagcgtcagcagcgaagagcagcgccacgacggcatccacgaaggcgacagaggctgctggcagtgcgacggcggcagctcagagcaaaagtacggcggaatccgcggcaacgcgcgccgagacagcagctaaacgggcagaggatattgcatccgccgtggcgcttgaggatgcaagtacgacgaaaaaggggatagtacagctcagcagtgcgaccaacagtacgtctgaaacgctggcggcaacgccaaaggcagtaaaatcagcctatgacaatgcagagaaacgtctgcagaaagaccagaacggcgctgatatacccgataagggatgcttcctgaacaacattaacgcggtcagtaaaacagactttgctgataagcgtggtatgcgttatgtgcgggttaacgctcctgcaggtgcaacatctggaaaatattaccctgttgttgttatgcgttctgctggctcagtgccgccaaatccttctgaactgttgatgagcgaacgctttgccgaactggtgaactgggcgagtaaaaactatgacctggtgttgattgatacgccgccgattctggcagtgaccgatgcggcaattgttggtcgtcatgtcggaaccacgttaatggtggcgcgttatgcggtcaacacattgaaagaagtggaaaccagtctgagccgctttgagcaaaacggtattccggtgaaaggggtgattctgaactccatcttccgccgcgccagcgcgtatcaggattatggctattacgaatacgaatataagccggataaggcgttcacgccgcatccggcaagcaaaccagctcataagccgggagaacaacctatgaaaaacaatccgctgatctcaatctatatgccgacctggaaccgccaacaactggcgattcgggcaataaaatcggttttgcgccaggactacagcaactgggagatgatcatcgtggatgattgctccacctcctgggaacaactgcaacagtacgtcaccgccctcaacgatccgcgtatcacttacattcacaacgacattaacagcggggcgtgcgcggtacgtaaccaggcgattatgctggcgcaaggggaatatatcaccgggattgatgacgatgacgaatggacacccaaccgtctgagcgtcttcctcgcccataaacagcaagctggtcacacacgcctttttgtacgctaa

SEQ ID NO: 132400 - DNA, 2561 bp, Homo sapiens
atatggaaatttgttaccgcattcacattacctgaagtcgctttccccgtagcgatataatcaactttaaaagtcaacgtctgatctccatcctgcaacaaaatgttcccggtttctgtgtctggcgtgatggccgttgtaccatcattcatatacatttgcagggccacgtttgtagcagcatcagatgaggcctggttagcaaacgctgtaatctgagtagtatccgcagtgccattaaaggtgaacgttgcattttttgttacggtagtatcacaatcttttaattcaattggcacatcaatttgcacgccagaaacctgaccattggtttgcaacttcgtggcactaacatctggcaaagtcaccacggaatctttcgtcgcagctaccagggtacaagctggagcaataactttaccattaaatgttactgagccatccgtgatagcattatcatcagcagccataacggttttgcggtatcgctgtactcttttgcggttttcatcatctttcctcgcaaccgttactctgttgttgccgccagtcgttaagtccgcctggcatctctttccggccagagccaactcggcctgctgtttgttgccccagaggaggacaacatggagacgatcgtcgcgcaggatgcgcttgtaatcacgtggaactcgtcgccagacaccgcagatcttgcccgtggcattctgatagacactgagagtgcccgccaaggtggtctccagttgatgctcctccaggattacacccgcatcatcaacgaattgaatggcacgcggacgaccgattcgcgatgaggtgtagaaggagtagtatagattcttcttgtggaacaggaaacgggcggtggccaccacattctgcggattgtaggtggtgtacatggacttcatttcctcacccttgaggaaataggaggtgcggcccgttagcaacgcagcgtaatgtttcatgttgcgctcttcctcttcattgggcacgggcacatccaaggctacatccgtattgttggtcgcactgctgagctgtactatcccctttttcgtcgtacttgcatcctcaagcgccacggcggatgcaatatcctctgcccgtttagctgctgtctcggcgcgcgttgccgcggattccgccgtacttttgctctgagctgccgccgtcgcactgccagcagcctctgtcgccttcgtggatgccgtcgtggcgctgctcttcgctgctgacgcttgtctggtcgcctcatcttttgaagcagacgccgatgatgccgatgacgccgccgaactggctgacgatgcggcagccgtttttgaggattctgcgcttgtttccgacgctttcgcgttcgtttcggatgtcttcgctgcggaagcagacctcgctgctgcgctggcctgttcagtggcttcgccagccttcgttgtggctgttgaagcagacgatgcggcgctttctgccgattttccggcggcggtggcactggctgaggcctgcccggcacttgttgacgctgcactggcagacgacccacaaacaccgtctgcacaggcccagttcaaggtcatcaaccggaccggttgccagggtatgggtttgcgcctgaacatcaggaatatccagttggtaatcaaataccttgatattgagtaccggaccaaacagcggttcatcacctgccgctcgcccgctgtcacgggcaatttgttcggcatcgtaacgttgatgacgacgcatttttttcagttgtgcggccagtcgggttgccagttccggcagcgtttcttgcgccgcaatgtgaatacccaacggcaaaacggtgacgcccggttccggtaaccgtcaagcccccccaagcccagtcgacgcataaagataaatccggcggcgtagtccatacgattgcacaatcgccccagccacaaggctgccagcgcaagggcccccgaaaagacggcggtgtgggggggacacagaggggaggtcgcatgagtctgctgcaaatcagtggcctgtttgttgtctggctgctctgcacgctgtttattgccacgctgacctggtttgagtttcgccgtgtgcgctttaacttcaatgtcttcttttcattgctgtttttgctcacctttttcttcggcttcccgctgaccagcgtgctggtatttcgctttgatgttggtgtcgcgccgccagaaatcttgttgcaggcgttgctttctgcgggctgcttctacgcggtttactatgtcacctacaaaacccgcctacgcaaacgcgttgctgatgtaccgcgccgtccgctgtttaccatgaaccgcgtggagaccaatcttacgtgggtgatcctgatgggtatcgcgctggtaagcgtcggcatcttcttcatgcacaacggctttttgctgttccggcttaactcctacagtcagatcttttccagtgaagtctccggcgtggcgttaaaacgcttcttttactttttcatgggaccctgtaagtggtccccaaggctcacgaagcatgatccggaacgctacgagtga

SEQ ID NO: 132401 - DNA, 1287 bp, Homo sapiens
atgaacggactcacggcaacgggtgtcaccgtcggtatttgtgcagggctttggcagttagtgtcttcacatgtcgggctctctcaaggatgggaattattaggaaccattggcttcgtcgccttttgcagtttttatgccgcaggcggcggtaaatcggggtttatcagaagtctggcggttaattattccgggatggtgtgggcgtttttcgccgcgctgactgctggttggctggcctctgtaagtggactgtccgcgttctgggcgagcgtaattactaccgtacccttctcggcggtagtggtctggcaagggcgtttctggttactgtcctttattcccggtggctttctcggcatgacgctgttttttgccagcgggatgaactggacggtgacgttactgggttttctggcgggtaactgcgtggggctggagaaattcatagtagataatggcgagaatggtttaatgaactcaatttttaccgaagagaatctgttggcatttactaccgctgcgcgttttggcagcttcagtaaagccgcagaagagttgggtttaaccacttccgccattagctacaccattaagtccgtcgagcaacagcgcgaagtgtttgagtttgtcgccagcagcgactacttctccggcccgacgtggatggcgatgtatcagtcgcgattcacctgcactcgcaacgaggttcatcttatgtcgactcgtaccccttcatcatcttcatcccgcctgatgctgaccatcgggctttgttttttggtcgctctgatggaagggctggatcttcaggcggctggcattgcggcgggtggcatcgcccaggctttcgcactcgataaaatgcaaatgggctggatatttagcgccggaatactcggtttgctacccggcgcgttggttggcggaatgctggcggaccgttatggtcgcaagcgcattttgattggctcagttgcgctgtttggtttgttctcactggcaacggcgattgcctgggatttcccctcactggtctttgcgcggctgatgaccggtgtcgggctgggggcggcgttgccgaatcttatcgccctgacgtctgaagccgcgggtccacgttttcgtgggacggcagtgagcctgatgtattgcggtgttcccattggcgcggcgctggcggcgacactgggtttcgcgggggcagacctgcaggcagcgagctgcactgcacgcagcgagctccattcactcatcagacttggtgaacaaagcacaatttattga

SEQ ID NO: 132402 - DNA, 795 bp, Homo sapiens
atgggtgacatcgaagtggacttgaatgagatcatcgaatggactcgatgtgtgttcatcatcgcttggaatcgaatggaatcatcagatgcacatgggtgggctcatcagcgactggtgtcaagtagtctcatcgtgctgattcgagtgtcgatgaccgcgcggtgtgacgccgctctggatcctgtcgcggaattcctgtgctactgccgtgtgcacagcacatcgtcgctcgagcccaacgatcttcgggattcactacgcgtaagccttaatgtgctccaaacatccctctgcagattatacaaaaacagtgttgcgcagccgctctatcaaaaggcagcggttgaaccgaaagaagacactatcaccgttaccgctgcacctgcgccgcaagaaagcgcatgggggcctgctgcaactattgcggcgcgacagtctgctaccggcactaaaaccgatacgccgattcaaaaagtgccacagtctatttctgttgtgaccgccgaagagatggcgctgcatcagccgaagtcggtcgactctagaggatccccacttgataaggatcattgcatggacacgaatggaatcatcattttatggaatcgaatggaatcattgaatggtttcgacaggtatcatcagcgcatgggatcgaatatgattatcaacaagagcattccaattgcgatcgagggtgtcagtgtcgttggatcgcgcgcgatcggcggtggagtggtgttgctcaccatcgctggggtcgatgttatcgtcctcgggggtatcgcatga

SEQ ID NO: 132403 - DNA, 981 bp, Homo sapiens
atggggccggaaggtgtgggtaatgcgtcgttgtcgaacattgccggtgatgccgccgaaggcatgttggtcactatgccaaaacgctatgaccaggatccggcaaaccagtgcatcgttgatgcgctgaaagcagacaagaaagatccgtccgggccttatgtctggatcacctacgcggcggtgcaatctctggcgactgcccttgagcgtaccggcagcgatgagccgctggcgctggtgaaagatttaaaagctaacggtgcaaacaccgtgattgggccgctgaactgggatgaaaaaggcgatcttaagggatttgattttggtgtcttccagtggcacgccgacggttcatccacggcagccaatacctacgcgctgatagccatcggctacaccatggtttacggcattatcggcatgatcaacttcgcccacggcgaggtttatatgattggcagctacgtctcatttatgatcatcgccgcgctgatgatgatgggcattgataccggctggctgctggtagctgcgggattcgtcggcgcaatcgtcattgccagcgcctacggctggagtatcgaacgggtggcttaccgcccggtgcgtaactctaagcgcctgattgcactcatctctgcaatcggtatgtccatcttcctgcaaaactacgtcagcctgaccgaaggttcgcgcgacgtggcgctgccgagcctgtttaacggtcagtgggtggtggggcatagcgaaaacttctctgcctctattaccaccatgcaggcggtgatctggattgttaccttcctcgccatgctggcgctgacgattttcattcgctattcccgcatgggtcgcgcgtgtcgtgcctgcgcggaagatctgaaaatggcgagtctgcttggcattaacaccgaccgggtgattgcgctgacctttgtgattggcgcggcgatggcgacgtgggggggaccgagctga

SEQ ID NO: 132404 - DNA, 1113 bp, Homo sapiens
ttaatggttggagaaccagttcagtttatcgcgcaggccaacaacccgaccaataataattagcgatggactgttcatttgctgcgccagttctcccagctgtgtgagcgtaccgtcaatcacgcgctgcgtgactgccgtaccgttttcgacaattgccaccggcatttcgcctggcattccgtgttcaatcagcttttgctgaatagtcgcggcctgattcaaccccatatagaacaccagcgtctgtttttctgccgccaggttttcccagtccagctcgccaccggtttttaagtgtccggtaattaagcgtacgctctgggcataatcgcgatgcgtgagtggaatacccgaataggcagagcaaccagaagctgcggtaatacccggaaccaccgagaacggaatacccgcgttgcacagtgtttccagctcttcgccaccacggccaaaaataaacggatcgccacctttcagccgcaccacgcgtttgcctttttgcgcttcccgcagcaggatctggttaatctcttcctggggtacgcagtggtatcccgcgcgtttgccgacgaaaacacggtccgcatcgcggcgtaccagattcataatatcgtcagaaaccagacggtcgtagaccaccacatctgcctgctgaatttgttgcagtcctttcagtgtcagcagcccggcatcgcccggacctgcaccaaccagcaccacttcaccgcgatggtcgagcggttcgttgattaactgttcggtcgtttcagtaatggctttctgatcgttgtttgccagcgactgcgccaggcggtcgttaacgaacaatttctcccagaaacggcgacgctcacccatcgtggcgaactgttgtttcactcgcccgcgtaattgcccggcgtatttcgctacctggcccagatgtaacggcacgcagtgattcaagtttttcgcgcaacaggcgtgccagaaccggagaggtgccgccagaggagaccgcatgagcggtgagcggtcaataatcgacagcataatagaattcggtaccagctctgaccggccctgcgaggaactcacgaagaacctgctctcggagccgttcatgagggc

SEQ ID NO: 132405 - DNA, 679 bp, Homo sapiens
ataaaaatgcgccaatcttcaactatgccgactacggtctggtgggcgatatctacaaagtcgtccctgccctgattagccagttgagccgctaattcccctttcaaccacatctcccgctgtaaacgcagcgggaagggagcataacgcatgtcggatgacaaatttgatgccattgtggtcggtgcgggcgttgctggtagcgttgccgcactggtcatggcacgagccgggctggatgtcctggtgatagaacgcggcgacagtgccggatgtaaaaacatgacccggcgggcgtctttatgcccacacacttgaagcaatcattccaggctttgcagtatcagcgccggtagaacgcaaggtcacacgcgagaaaatctccttcttaaccgaagaaagcgccgttaccctcgattttcaccgcgagcagccagatgttccgcaacacgcatcttataccgtattgcgtaatcgtctggacccgtggttgatggaacaagccgagcaggcgggcgcgcagtttatcccaggcgttcgcgtcgacgcgctggttcgtgaaggaaacaaggtcactggcgtgcaggctggggatgatattctcgaagcgaatgtggtgattctggctgatggcgttaactcgatgcttggccgctcgctgggaatggttcccgcttcc

SEQ ID NO: 132406 - DNA, 2244 bp, Homo sapiens
ttattggcgatggtcgatgattttcgctgcgtagtcatcaaactggcggagcgtattgctcatctgcgcgaagtaaaagatgcgccggaagatgaacgtgtactggcggcaaaagagtgtaccaacatcgtctcggaatcggacaactgaaatgggaactggacgaacttcggcgatgttgatctgtgcaggaacgccagcgatgtccgctacgaccttacgcagtttttctacgtcttcaccttttttaccgataacgatacccgggcgagcagtgtgaatggttacacggatgctcttagccggacgctcgataacgatacgagatacggacgctttagccagttccttagtcaggtactgacgtacgtcaatcacgcgctgcgtgactgccgtaccgttttcgacaattgccaccggcatttcgcctggcattccgtgttcaatcagcttttgctgaatagtcgcggcctgattcaaccccatatagaacaccagcgtctgtttttctgccgccaggttttcccagtccagctcgccaccggtttttaagtgtccggtaattaagcgtacgctctgggcataatcgcgatgcgtgagtggaatacccgaataggcagagcaaccagaagctgcggtaatacccggaaccaccgagaacggaatacccgcgttgcacagtgtttccagctcttcgccaccacggccaaaaataaacggatcgccacctttcagccgcaccacgcgtttgcctttttgcgcttcccgcagcaggatctggttaatctcttcctggggtacgcagtggtatcccgcgcgtttgccgacgaaaacacggtccgcatcgcggcgtaccagattcataatatcgtcagaaaccagacggtcgtagaccaccacatctgcctgctgaatttgttgcagtcctttcagtgtcagcagcccggcatcgcccggacctgcaccaaccagcaccacttcaccgcgatggtcgagcggttcgttgattaactgttcggtcgtttcagtaatggctttcggtcgattcggatcaggcatagtgtcctggtgaatgtgtccgtccaataccaaaatatagcgcagcttttgcctaattcccctttcaaccacatctcccgctgtaaacgcagcgggaagggagcataacgcatgtcggatgacaaatttgatgccattgtggtcggtgcgggcgttgctggtagcgttgccgcactggtcatggcacgagccgggctggatgtcctggtgatagaacgcggcgacagtgccggatgtaaaaacatgaccggcgggcgtctttatgcccacacacttgaagcaatcattccaggcctcgattttcaccgcgagcagccagatgttccgcaacacgcatcttataccgtattgcgtaatcgtctggacccgtggttgatggaacaagccgagcaggcgggcgcgcagtttatcccaggcgttcgcgtcgacgcgctggttcgtgaaggaaacaaggtcactggcgtgcaggctggggatgatattctcgaagcgaatgtggtgattctggctgatggcgttaactcgatgcttggccgctcgctgggaatggttcccgcttccgatccgcatcattacgctgttggtgttaaagaggttattggcctcacaccagaacagatcaacgatcgctttaatattacgggcgaggaaggtgccgcctggctgtttgccggttccccttctgacggcctgatgggcgggggatttctctataccaacaaggattccatatccttggggctggtttgtggattgggtgatatcgcccatgcgcaaaaaagcgtgccgcaaatgctggaagattttaaacaacaccccgccattcgcccgctgattagcggcggcaaactgcttgaatattccgcgcatatggtgccggaaggcggtctggcaatggtgccgcaactggttaacgagggcgtgatgatcgttggtgacgccgcaggcttctgcctgaatttgggttttacggtccgcggcatggatttagccattgcatcggctcaggctgccgccacaacggtgatcgccgccaaagaacgcgcggatttctccgccagcagtctggcgcaatacaaacgtgagctggaacaaagctgcgtcatgcgtgatatgcagcattttcgcaagatcccggcgctgatggaaaacccgcgcctgtttagccaatacccacgaatgtag

SEQ ID NO: 132407 - DNA, 1347 bp, Homo sapiens
atgagcacacttgcacacaggaagggtaaaatcacatacgcatgtaggctacgagctcaacggcccgaaaataaaataaatacactctcccttgtttctttgtgtaaaggtctttcaggcggtattgcagaagaaggcatcattatcataggagatgacagctccatgcgtgttattgcccttgaagaccttccagtgaaacaagatgcagaggtagaagacagtgacattgatgattctgaccctgtgaactttgatggggaccaaacaaatactgtgataaaggtccttcaccaaaagtatacgccagcgacggtgaatcgtagcgtaagtacgaatgatcaagggtatgccgccaatccgttcccgaccagtagtgccgcaaaacctgatgctgtactggtcaaaaatgaagagaaaaatgccagtgagacaggctcgatttattcttccatgactctgaaagatttcagtaaatttgtgaaagatgaaattggctttagttacaacggctattaccgttctggttgggggaccgcctctcatggttcacctaaatcatgggcgattggttctctgggccgctttggtaacgaatactccggctggtttgttttgcaggctgcgatcgtaatcatcgacatcttcgcgaaccagcgcgatatcaattttacccggaccgactttccagttttccagacctacacccgctgcggcatcagtacgctgcgttttccagatagtgagggagttctcatgaaacctgatggtttaaaagtggtacttgccccttcactctctctctctctcctgctgccttgtgaagaaggtgcctgcttctccttcaccttctgccatgattgtaggtttcctgagggctccccagccatgctgaacttgacaagttttggcaaattcctatacaaatataccagcaacaaccagctcagtggttggactgagaagaaactccaaagcacttcccatggccaaacttgtgccaaaaaaaaggtcatggtcactgtttggtggtctgctctcagtctgatctactacagctttctgaatcctggtgaaaccattacatctaagaagcatgctcagcaaatcagtgagatgcacccaaaactgcaatgcctgcagccggcactgatcaacagaaagggcccaattcttctcgacaacagtgcccaaccgcatgtcatacaaccagtggttcaaaagttgaacaaattgtgctatgaagttttgcctcatccaccatattcacctgacctctcgccaaccaactaccacttcttcaagcatctcgacaactttttgcagggaaaatgcttccacagctag

SEQ ID NO: 132408 - DNA, 1065 bp, Homo sapiens
  misc_feature (1)...(1065): n = a,t,c or g
cacatgaacgcgaatattttcgttttcatcagccagaccgtgaataccgcttgcggtcgtggcgtccacttcgcccaccataattgacgaacgctcactggtgcccnccgggcttgccaggaaacttaacaccggtttggtccgtttgactatcagtcccgcctcttcaatcgcttcgcgacgggcaacatcttccacactttcaccctcttcaatcatcccggcaaccatctccagtagccaaggggtttcgctggtgtcgtacgcggcaatccgaatctgctcaatcagcacaacttcatcacgcactgggtcaaagggtagcaagactgcggcgtgaccgcgctcaaaaatttcccgccgcacctcatgactcatttgcccgttgaatagacgatgacgaaatctataaagatctaatgaaaaaaagccgcgataaagtgtttctcgtgcaataatttctacatcgtttttgccaaatgtaacgggcaggttgtctgggtcggtctgcgcaacagtgcgatttacacgcagagtgaaaataatcagcgaaccgatgaccgccaccgctgccagcgtcagtaatcccgccgcatcgctggcaaataacgtttctgctttcacgcgcaggatcggggcaataaacccgcccactgcaccaaacaggtttacaaaaccaattcccgcagccagcgccgtaccggaaagcagttgtgtcggcatcgtccagaacactggctgcacggcaataaacccgatagctgcaacacacagcgctacgatcgccattactggagaaagcagcccggacagaccaataccaatgcccgccgccagtaatgtcagcgctgcgacattacgccgttcgccggttttatcggaatagcgcggaataagccaggtcccaaacaaggccgcaacccacggaatggcggtgaccaccgacgctgtaaagcccacttttgttcccagcaatgccgcaacctgggtcggcaggaagaaaattaatccgtaaaccgccacctgaatggtcaggtagataatcgctagttgccagacttccat

SEQ ID NO: 132409 - DNA, 3999 bp, Homo sapiens
atggctggggtacctggattcgaaccagggaatgccggtatcaaaaaccggtgccttaccgcttggcgataccccatccgtacaacgctttctggtgaatggtgcgggaggcgagacttgaactcgcaagaggccaccctgcaacaaccgctgttgcaggctatcgacctgaaaaaacattatccggtgaagaaaggcatgttcgcgccggaacgtctggttaaagcgctggatggcgtttcgtttaaccttgaacgtggcaaaacgctggcagtagtgggcgaatctggctgcggcgtgctggcctgcaccctttttgcctggaatcgcaactactttgttttgctattcgttggcgtctttcttagcagctttggctcgaccgctaacccgcaaatgtttgcccttgcccgtgaacatgccgacaaaaccggacgtgaggcggtgatgttcagctcttttttacgcgctcaggtttcactggcatgggtcattggcccaccgctggcttatgccttagcgatgggtttcagctttacggtaatgtatctgagcgcagcggtagcgtttattgtttgcggtgtgatggtgtggctgtttttaccgtcgatgcgaaaagagcttccgctggcgaccggcacgatcgaagcgccgcgccgtaaccgtcgcgatacgctgctgctgtttgtcatttgtacattgatgtggggctcgaacagcctgtacatcatcaacatgccgctatttattatcaacgaactgcatcttcccgagaaactggccggtgtgatgatggggaccgccgccgggctggaaatcccgacgatgttgattgccggatattttcgccaaacgtctgggccggataaggcgttcacgccgcatccggcaagaagctataagaaaagggcggagatcatctccgccctttttatttctgcaatccgcaattatcatcccgcaaatctatactttttgggtcaacacgtgattatcatggggctttttgatgaagttgtcggtgcctttctgaaaggcgatgcggggaaatatcaggctattttaagttgggttgaggagcagggcggcattcaggtgctgctggaaaaactgcaaagtggcggcttaggggccattctctcaacctggctgagtaatcaacagggcaatcaatcggttagtggcgagcaactggaatcggcgctcggcacaaatgcggtgtccgatctcgggcaaaaacttggcgtggataccagtacagcttccagtttactggcagaacaattgccgaagattattgatgcgctctcaccgcaaggaaccaatctacctggggaactcatggctattaaactcattgctatcgatatggatggcacccttctgctgcccgatcacaccatttcacccgccgttaaaaatgcgattgccgcagctcgcgcccgtggcgtgaatgtcgtgctaacgacgggtcgcccgtatgcaggtgtgcacaactacctgaaagagctgcatatggaacagccgggcgactactgcattacttataacggcgcgctggtacagaaggccgctgatggtagcaccgtggcgcaaactgctctcagctatgacgactatcgtttcctggaaaaactctctcgcgaagtcggttctcatttccacgcctgggaccgtaccacgctgtaccccgccaaccgtgatatcagcggggacatgggccccatcccgtccgggatgctgtgttggtcagtagcccatcggcaaaatgcggcgattcttctcgataacgccaggttctttggtcaaattgccctcatcatcaaagccaccatcgaccgggagctgacgacctgccagacggtaacttctaacataccactggagtatctcggttatacctttggttttattatcgtcattatggcccgccagcaattatttaccgaaaataccgtgactgcggtactacccgtcatgcaaaaaccgacaatgagcaacgtcggcttactaacaaggaaaaggggcgtcgtgctgctgggtaatattctcgggacaggtattgcggcgtgggcatttgaatatatgcctatcttcaatgaagaaactcgcgatgcatttgtcaaaatcggcatggatgtgatgaagaacacccccagcgagatgtttgccaacgcgatcatttccggctggctgatcgccactatggtttggatgtttcctgcagcgggtgcggcaaagattgtggtgattatattgatgacctggcttattgccctgggtgacaccacccatatcgtggtcggttctgttgaaatcctctatctggtgtttaacggtacgctgcactggagcgatttcatctggcccttcgcactacctactttagcggggaacatctgcggcggcacctttatcttcgcgttaatgagtcatgcacagattcgtaacgacatgagcaataagcgtaaagcagaagcacgccaaaaagcagaactggataaaataattttacccaccggatttttacccatgctcaccgttaagcagattgaagcagcaaagccgaaagaaaaaccataccgccttctcgatggtaatggcctgtacctttatgtccctgtgtcagggaaaaaggtatggcagcttcgctacaagattgacggtaaggagaaaatcctgaccgtcggaaaatatccgcttatgactttgcaggaggcaagggataaagcatggactgcgaggaaagacatctcggttggcatcgatcctgtaaaggcgaaaaaggcttcgtctaacaacaattcctttagtgcgatttacaaggaatggtacgagcacaagaagcaagtatggtcagtagggtatgcaactgaacttgccaaaatgtttgacgacgacattttacctatcattggcggccttgaaattcaggatattgagccgatgcaactgctggaagtaatccgcaggtttgaagatcgcggtgcaatggaacgagccgacaaagcacgcagaagatgcgaagagtttgccctgccctttcttgcaaaagagtccaacgctttttatcgccgtaacctggccgccgggcaaaaaggtctttccgttgcgtttgaccttgccacccaccgtggctacgactccgataacccgcgcgtggcgggcgacgtcggcaaagcgggcgtcgctatcgacaccgtggaagatatgaaagtcctgttcgaccagatcccgctggataaaatgtcggtttcgatgaccatgaatggcgcagtgctaccagtactggcgttttatatcgtcgccgcagaagagcaaggtgttacacctgataaactgaccggcaccattcaaaacgatattctcaaagagtacctctgccgcaacacctatatttacccaccaaaaccgtcaatgcgcattatcgccgacatcatcgcctggtgttccggcaacatgccgcgatttaataccatcagtatcagcggttaccacatgggtgaagcgggtgccaactgcgtgcagcaggtagcatttacgctcgctgatgggattgagtacatcaaagcagcaatctctgccggactgaaaattgatgacttcgctcctcgcctgtcgttcttcttcggcatcggcatggatctgtttatgaacgtttatgactggttgctgattgacggggagcacgcgccaaacaccattcaggatctttatcatcagctacaggcggtagcgccctatgccagccaacccgtgatccgtccggtggaaggcagtaaaccgctgattaaacaagtcctggatattggcgcgcaaactctactgatcccgatggtcgatactgccgaacaggcacgtcaggtggtgtctgccacgcgctatcctccctacggtgagcgtggtgtcggggccagtgtggcacgggctgcgcgctggggacgcattgagaattcttggtcccgtgccgatcgcctgggtgtggcgccgttccagtaa

SEQ ID NO: 132410 - DNA, 730 bp, Homo sapiens
  misc_feature (1)...(730): n = a,t,c or g
agtancgacgtccccattccgtggcgctcatcaacgtcggtttatcccccatgaaatagcggtagtaagcgtcataagccagcacgttcttcacataaccgcgcgtctcggagaatggaatactctcgacaaatgccactgcgtcgatacgcccggcgctgttgccaagccaggttcgcacccgccctggtccggcgttataagctgctgaggagaaaatacgattattgccaaactgctgataaacatattgcaggtaactggtgccaatgttgatattcgtttccggatccagcaattgcccaggactgctataaccgggaatagagaacatcttcaccgtatgggtcgctgtaccaggcataatctgcatcaagccgctggcccctaccggtgatttcactttcggattccaagcgctcttctgacgagcaatcgccatcgcatagctttgcgggatcttcttaccgcttgtgtagcgttttgaaagatcgttgttagccaacgggaatcgctctttcagatgatccccaaggtttccggcgaatcgtggctgaacgctcaaaatccaccattgggtggtggaagcataccccggcaggtgagcccggtctggttttgatttgttcttcaacagaattggcccacttgctacgcgcgggattattttggaatcccgtgcattaaattttgggacgcgcggccatttttcggcccctgaataaggcat

SEQ ID NO: 132411 - DNA, 2193 bp, Homo sapiens
  misc_feature (1)...(2193): n = a,t,c or g
ttatgtgtttaacaactcatatttcttaatcttgcgatagagcgtagcaatgccgatgcccagttcatcagcaacttgcttcttgctgttatgacgtgaaagcgcctcgcggatcatttgcttttccatctcctccagcgccgtgccgcccgcatcatcgagtgacaggtgcgcctcactgacctctgttacatcactttgctccgttgtgccattattcagcagatttggcggcaatagcgtgctgtcgataacttcacctgaaggaaccacgttaaccagatattccatcaaattgcttaactcgcgcaggtttccgggccaacgatgcttacgcaatatttcgacgacatcgggagcaatgccaggataaaccgatcccagacgacgggtatgcagatgtaaaaagtaatgcaccaatagttcaatatcttcctgacgttcacgcagcggtggcagagttatcgggataacattaagtcggtagaagagatcttcgcggaatttaccttcggcaatgaactgggccaaattctgattagttgcagaaatgatgcgaatgtcgacttgtattgggctaggtggcttgacccccccttcccctccccccctgagcaccagtttacagtcaccagctgactttcccatttgatcgaccatcgactccacgggtacgacatcgatgttcagccgatcgctgagacggcgaattgcttttctggccccgcatgacagcacccgaaaaccaaccacaaacactaccgtcagcgcggcgagcattatccagagcatgacttctcctgcgtaatcagaactcatgatatctggaaaccctcgccagttatttnccatttgatcgaccatcgactccacgggtacgacatcgatgttcagccgatcgctgagacggcgaatttcttttctggccccggatgtcagcacccgaaaaccaaccacaaacactaccgccagcgtggcgagcattatccagatcatgagttctccgtagggaggatagcgcgtggcagacaccacctgacgtgcctgttcggcagtatcgaccatcgggatcagtagagtttgcgcgccaatatccaggacttgtttaatcagcggtttactgccttccaccggacggatcacgggttggctggcatagggcgctaccgcctgtagctgatgataaagatcctgaatggtgtttggcgcgtgctccccgtcaatcagcaaccagtcataaccagaagtggcggcaatttctgccatataggcagtcgttgagcttaaccacagaccaatttgcacttcgcccttgcgtaaacgttctttaaagggattgcttaataatgcgatcatcgtgttccttaacctatttaatgatgtgccacgtcggtcgatgaccgccaccgctgccagcgtcagtaatcccgccgcatcgctggcaaataacgtttctgctttcacgcgcaggatcggggcaataaacccgcccactgcaccaaacaggtttacaaaaccaattcccgcagccagcgccgtaccggaaagcagttgtgtcggcatcgtccagaacactggctgcacggcaataaacccgatagctgcaacacacagcgctacgatcgccattactggagaaagcagcccggacagaccaataccaatgcccgccgccagtaatgtcagcgctgcgacattacgccgttcgccggttttatcggaatagcgcggaataagccaggtcccaaacaaggccgcaacccacggaatggcggtgaccaccgacgctgtaaagcccacttttgttcccagcaatgccgcaacctgggtcggcaggaagaaaattaatccgtaaaccgccacctgaatggtcaggtagataatcgctagttgccagactcggccattacgcagcgcatcgctcagccgagaagtcactttctgttgttcttcacttgccagttgattgataagcaacgttttttcttgtttactcagaaaacgtgcctgctccggtgtgtcatcaagccaaaagaatgtgaataccccagcaccgactgccaacaatccttcaatcacaaacatccagaaccagccgggatgccccataaatccatgcatctccaacagcgcgccggaaagcggtgatcccagtgttaacgccagcggtgcgcccatatagaacagccccat

SEQ ID NO: 132412 - DNA, 1824 bp, Homo sapiens
atggcctccctcccagagggcctgcatcacccagtaaaacttgtgttcctggggaaaccagggtgcctcctcacagacaggcccctgaagggtcccaacacagccaagcctgtggtcagtcccagccatggcgcggcccacctgcccgccctttcctatgctggccggaagcgccaggaggaagacaatcacacaaaagagtcgctagtggaaaagccatttcgaaaaatcctggtcataaagatgcgatatcatggggatatgttattaactactcctgtcatcagtacgctcaagcagaattatcctgatgcaaaaatcgatatgctgctttatcaggacaccatccctattttgtctgaaaacccggaaattaatgcgctctatgggataagcaataaagagcgaggcaaaaaaccaatgaatcaaccgttactttcggtcaataacctgacccacctttacgcgccgggcaaaggctttagcgatgtctcttttgatttatggccgggggaagtgctgggcattgtcggggaatccggctccgggaagaccacgctgctgaagtcgatctccgcgcgcctgacgccgcagcagggggaaattcactacgagaaccgttcgctgtatgcaatgagcgaggccgaccgccgtcgcctgctgcgtaccgaatggggcgtggtgcatcagcatccactcgacggcctgcgccgccaggtgtcggcaggcggcaatatcggcgagcggctgatggcgaccggggcacgtcattacggcgatattcgtgccaccgcgcagaagtggctggaagaggtcgctaccgctatcgtcctgacgctctacatcatttatatggtcggttttttcgctaccagtggcgagctgacatatgaagtctggatcggtttcttcgcctctgcgttcaccaaagtgttcaccctgctggcgctgttttctatcttgatccatgcctggatcggcatgtggcaggtgttgaccgactacgttaaaccgctggctttgcgcctgatgctgcaactggtgattgtcgttgcactggtggtttacgtgatttatggattcgttgtggtgtggggtatgcgcgcggcgctgcaaatttcccagagcggccagacctgtgcgctgctctctaaagtcttcccgacccgttcccataccgtttctgcgcaaggcggcattaccgttgcgctgggtaatacccatgaagataactgggaatggcatatgtacgacaccgtgaaagggtcggactatatcgcgacccatacggtgaagatgttctctattcccggttatagcagtcctgggcaattgctggatccggaaacgaatatcaacattggcagccagctacctgcattatgtttatcagcagtttggcaataatcgtattttctcctcagcagcttataacgccggaccagggcgggtgcgaacctggcttggcaacagcgccgggcgtatcgacgcagtggcatttgtcgagagtattccattctccgagacgcgcggttatgtgaagaacgtgctggcttatgacgcttactaccgctatttcatgggggataaaccgacgttgatgagcgccacggaatggggacgtccttactgatccgcacgcttatgatatgctttggtactctttaacgagcacacccgggggaagggttttgcttcccccgctaacaatggcgacatattatggcccaacaatcaccctattcagcagcgatggcagaacagcgtcaccagcagtggttacaatttgtgtaccggcatagtaatgccagccaaaacgatcta

SEQ ID NO: 132413 - DNA, 1862 bp, Homo sapiens
  misc_feature (1)...(1862): n = a,t,c or g
atggcgtctattcagggtggagcctcgttagctaagtcactttttcctctggtgggcgcaccgggtgtcactgcgctgcgtctggcattaggaacgctgatcctcatcgcgttctttaagccatggcgactgcgctttgccaaagagcaacggttaccgctgttgttttacggcgtttcgctgggtgggatgaattatcttttttatctttctattcagacagtaccgctgggtattgcggtggcgctggagttcaccggaccactggcggtggcgctgttctcttctcgtcgcccggtagatttcgtctgggttgtgctggcggttcttgtaatggcgatcgtagcgctgtgtgttgcagctatcgggtttattgccgtgcagccagtgttctggacgatgccgmacacaactgctttccggtacggcgctggctgcgggaattggttttgtaaacctgtttggtgcagtgggcgggtttattgccccgatcctgcgcgtgaaagcagaaacgttatttgccagcgatgcggcgggattactgacgctggcagcggtggcggtcatcgaccgacgtggcacatcattaaataggttaaggaacacgatgaacgcattattaagcaatccctttaaagaacgtttacgcaagggcgaagtgcaaattggtctgtggttaagctcaacgactgcctatatggcagaaattgccgccacttctggttatgactggttgctgattgacggggagcacgcgccaaacaccattcaggatctttatcatcagctacaggcggtagcgccctatgccagccaacccgtgatccgtccggtggaaggcagtaaaccgctgattaaacaagtcctggatattggcgcgcaaactctactgattccgatggtcgatactgccgaacatgcacgtcatgtttggggggaagattctagcaaatcgttaatgtgcggattgattcaatgtcccgcacggcaggtggtgggaaccgaactcgactatatgcagtcggcaatgggtagcggcaaactgtgtggcgatggcggttttacccgtcgctgccagcagtggctggagcaacgttttggcagcgccaaattgttactgacgccgtcctgcaccgcttcgctggatatggcggcgctgctgctcgatatccagcctggcgatgaagtgatcatgccgagctacacctttgtctccaccgccaatgcctttgtgctgcgtggcgcaaaaatcgtttttgtggatgttcgcccggacaccatgaacatcgacgaaacgctgattgaagcggcgatcaccgacaaaacgcgcgttatcgtgccggtccattacgcgggtgtggcctgcgaaatggacaccattatggcgttggcgaaaaagcataatttgtttgtggtagaagatgccgctcagggcgtgatgtccacttacaaagggcgtgcactgggaaccattggtcatattggctgctttagcttccatgaaaccaaaaactacacggcgggcggtgaaagcggcgcgacgctgattaacgataaagcgttaatcgaacgagccgagatcatccgtgaaaagggcactaaacgcagccagttcttccgtggtcatgtcgataaatatacctggcgcgatattgggctcagctatttgatggtcgatctgcaagctgcatanctggcgggccaatccaccagcttgcatctgccgaatcaccacatcagcccagagaaagttttgtacttccgctttgacatcgtagtcgttgttggcgcgaacgatgcggacatcatgcccaaggtcgcgcagtgtgccatccgcgacttcggtcaccgttgtcgttcag

SEQ ID NO: 132414 - DNA, 2310 bp, Homo sapiens
caccagcgggaggcgacggcttcaaatttagcgatctcttcgtggtctacgttatggtttaccggcgatttttcggcattcattggcacttctactccgtaattggcaagacaaacgagtatatcaggcattggatgtgaataaagcgtataggtttacctcaaactgcgcggctgtgttataatttgcgacctttgaatccgggatacagtagagggatagcggttagatgagcgacctttgcgagagaaattacaccggtcaacattgaggaagagctgaagagctcctatctggattatgcgatgtcggtcattgttggccgtgcgctgccagatgtccgagaaggcctgaagccggtaccccgtcgcgtactttaccccatgaacgtactaggcaatggactggaacaaagcctatacttaatcggcccgggtcgttggtgacgtaatcggtaaataccatccccatggtgactcggcggtctatgacacgatcgtccgcatggcgcagccattctcgctgcgttatatgctggtagacggtcagggtaacttcggttctatcgacggcgactctgcggcggcaatgcgtatacgcggtagtaagcgtcataagccagcacgttcttcacataaccgcgcgtctcggagaatggaatactctcgacaaatgccactgcgtcgatacgcccggcgctgttgccaagccaggttcgcacccgccctggtccggcgttataagctgctgaggagaaaatacgattattgccaaactgctgataaacatattgcagctatcgggtttattgccgtgcagccagtgttctggacgatgccgacacaactgctttccggtacggcgctggctgcgggaattggttttgtaaacctgtttggtgcagtgggcgggtttattgccccgatcctgcgcgtgaaagcagaaacgttatttgccagcgatgcggcgggattactgacgctggcagcggtggcggtcatcgaccgacgtggcacatcattaaataggttaaggaacacgatgaacgcattattaagcaatccctttaaagaacgtttacgcaagggcgaagtgcaaattggtctgtggttaagctcaacgactgcctatatggcagaaattgccgccacttctggttatgactggttgctgattgacggggagcacgcgccaaacaccattcaggatctttatcatcagctacaggcggtagcgccctatgccagccaacccgtgatccgtccggtggaaggcagtaaaccgctgattaaacaagtcctggatattggcgcgcaaactctactgatcccgatggtcgatactgccgaacaggcacgtcaggtggtgtctgccacgcgctatcctccctacgtatcattccgcgaaacgtttcaggaagagaaactcttaacgatgaaaggtagttataaatcccgttgggtaatcgtaatcgtggtggttatcgccgccatcgccgcattctggttctggcaaggccgcaatgactcccggagtgcagccccaggggcgacgaaacaagcgcagcaatcgccagcgggtggtcgacgtggtatgcgttccggcccattagccccggttcaggcggcgaccgccgtagaacaggcagttccgcgttacctcaccgggcttggcaccattaccgccgctaataccgttacggtgcgcagccgcgtggacggccaactgatagcgttacatttccaggaaggccagcaggtcaaagcaggcgatttactggcagaaattgaccccagccagttcaaagttgcattagcacaagcccagggccaactggcaaaagataaagccacgcttgccaacgcccgccgtgacctggcgcgttatcaacaactggcaaaaaccaatctcgtttcccgccaggagctggatgcccaacaggcgctggtcagtgaaaccgaaggcaccattaaggctgatgaagcaagcgttgccagcgcgcagctgcaactcgactggagccggattaccgcaccagtcgatggtcgcgttggtctcaagcaggttgatgttggtaaccaaatctccagtggtgataccaccgggatcgtggtgatcacccagacgcatcctatcgatttagtctttaccctgccggaaagcgatatcgctaccgtagtgcaggcgcagaaagccggaaaaccgctggtggtagaagcctgggatcgcaccaactcgaagaaattaagtgaaggcacgctgttaagtctagataaccaaataaaacacatcttttcaatggctggctaa

SEQ ID NO: 132415 - DNA, 695 bp, Homo sapiens
gccaaccggggcaaaaatcccattgttcatacctttgatcgcaacggcttatggcacgcgttaacaccgcaatttttccctcttgagctgttcccatcactgtatgacgcgcgctctaaatgaaggcggacatattatcgacgaagcctcggcgctggaatattgcggattccatcctcagttggtcgaaggccgtgcgaataacattaaagtcacgcgcccggaagatttggcaccgggccgagtttttccctcacccgacccatccatcaggagaatacataatgcgaattggacacggttttgacgtacatgcctttggcggtgaaggcccaattatcattggtggcgtacgcattccttacgaaaaaggattgctggcgcattctgatggcgacgtggcgctccatgcgttgaccgatgcattgcttggcgcggcggcgctgggggatatcggcaagctgttcccggataccgatccggcatttaaaggtgccgatagccgcgagctgctacgcgaagcctggcgtcgtattcaggcgaagggttatacccttggcaacgtcgatgtcactatcatcgctcaggcaccgaagatgttgccgcacattccacaaatgcgcgtgtttattgccgaagatctcggctgccatatggatgatgttaagggcgagatcacaggaccacaggactga

SEQ ID NO: 132416 - DNA, 1281 bp, Homo sapiens; identical to SEQ ID NO: 131991

SEQ ID NO: 132417 - DNA, 626 bp, Homo sapiens
gcgtcggtacccgctatgtgcaaatcgatccgaaaaagattgtcgccgtcgtggaaaccaacttacccgacgccggtaatatgctggataagcaaaatcccatgcgccagcagcattccaaaaaccggtcccacgttcttatcccagaaaatggcgcatgggcgtattccaccgcaatttctgccgctgcaaagtggcgtgggcaatatcaataatgcggtaatggcgcgtctgggggaaaacacggtaattcctccgtttatgatgtattcggaagtgctacaggaatcggtggtgcatttactggaaaccggcaaaatcagcggggccagcgcctccagcctgacaatctcggccgattccctgcgcaagatttacgacaatatggattactttgccagccgcattgtgttgcgtccgcaggagatttccaataacccggaaatcatccgtcgtctgggcgtcatcgctctgaacatcggcctggagtttgatatttacgggcatgccaactcaacacacgtagccggggtcgatctgatgaacggcatcggcggcagcggtgattttgaacgcaacgcgtatctgtcgatctttatggccccgtcgattgctaaagaaggcaa

SEQ ID NO: 132418 - DNA, 1425 bp, Homo sapiens
atgcaccaacaggcactgacactccagcaggccatagaccggcagaacgatgcggagtttggctggggcagtcggaggagagcccaggtcactgagcagcccgactccaggggaaaaccttcccactccatcttcttctggcttctcccatctgctgagagctacctccactcaataaaaccttgcactcattctccaagcccagcggcaatattgagtgtggtcgaaggattgacagaatttctgccggtatccagcacgggccatatgattattgtcggtcacttgttggggtttgagggcgacacggcgaaaacctttgaagttgtgatccagttaggatcaattctggcggtagtagtgatgttctggcggcgtctgtttggcctgattggcatccactttggccgcccgttgcagcacgaaggtgaaagcaaaggtcgtttaacgctgatccacattttgctggggatgattccggcggtggtattggggctgttgttccacgacacgattaagtcattgtttaacccgataaatgtgatgtatgcgctggtcgttggcggtttgttgctgattgccgccgaatgcctgaagccgaaagagccgcgtgcgccgggtcttgatgatatgacctatcgtcaggcatttatgattggctgtttccagtgtctggcgctgtggccgggtttctcccgttccggggcgaccatttcaggtgggatgctgatgggggtgagccgttacgctgcttccgagttttcgttcctgctggcggtgccgatgatgatgggcgcaacggcgctcgatctctacaaaagctggggcttcctgacaagcggcgatatcccgatgtttgccgttgggtttatcaccgcttttgtggtggcgctgatagcgattaaaaccttcctgcaattgattaagcgcatttcgtttatcccgttcgccatttatcgctttattgtggcggctgcggtgtatggcttgcaggcaagcgagttcaaagcgtttttcaaaccagcgaaaaggattggtaaaggaactttggaactaagagctgtttgcactaatgagtctcctgacactgtcccaaagttaacagagggatttagcaatatagattatgtcatgttcttagaggggaattccctagttgtagggacccttttggtcaagtttctgaaggctcttttttcagaactaagacgtttccaagtagaaaataaagccaataaaaagaaagaagagctgagacaaagagttttagtcctcacactgctcataccctcagtgtggatgtcatctttgttctggacatctgctcctccttacctgatgttcacctgttcacctagcaacatgacatctgatatcagccctggatggagccttctgcttcctgctggtggggtcttaacttag

SEQ ID NO: 132419 - DNA, 3747 bp, Homo sapiens
atgcacattaatatctctgccacgtgttatttttcgcgtggtgtttcgtccagacccctcgttggtgttacgtgtctgtccccgtgtgattctgcttcgtgtgccccagctgggttgtacttctgcccgctggtgtgtgttgtcgtctcccctagtggttctgttgctcctcgtccattggttctccggcttttttgtggccatggctgttccattcctgcgttccccgtttcccgacgtgcttgtcgcaaacattggggtaattacacccttctaggccttctccagtgggctgtgttgccggttccgtggtcccccacaacagtgttttactctccgtactcatcatattcccaagcttttatactgtacttcccctctgccaatggaaacctctgtctgtacattacataccttcccctgagtatccaacgagctgcttcttccctacacaacttgacgctcctatgtgctttcaggactttctccccagcaatatcctatgccccttccttaactgctgtccccttgcagactatcttcacaagtcgacaaatgatctatctaatgaccctgaccattccctttccttgcacaaccagtgcagatttcctcaataccgcaaaatatccacaggcaacattcacctccaccagcgtgaagaaagacggtgacgaactggatattaccggcgatctgacgctgaatggcgtaaccaaacccgtcacgctggaagcgaaattaattggtcagggcgacgacccatggggtggtaaacgtgcaggcttcgaggccgaaggcaaaattaagctcaaggacttcaatatcaagacagatttaggtccagcttctcaggaagtggatctgattatttcagtggaaggcgtacagcagaaacgtccacgagacttattaaagatcttattgccattttcacgtcctgcccgacggcgtcgctgttcttctggcggtaacgcgctttcttcgcaacaaatctcactacaacaacctttgtatttttccgcacatactggacactgaataaacagcaggtggcagccatcatttttacagttggtatggctgtcgcacggcgcgccgcactggtggcaatgcgcgataatctcatccgatatacgttcgcccatccgctcgtaaaaaacaaaatttttgccaataaaacgcaccggcaagccctgctcgcgcgccttacgggcgtattcaataattccgccctcgatatgccagactttgttgaatccgttatgtttcatccaggcactggccttttcacaacgaatgccgccggtgcagtacatgacgatttttttatctttatgtgcctgcatcatcctcgactgcttttggcacctgctcacggaaggcatctgccggaatttcgagcgcgttttcaaaatactcaccaacattgctggcatcaaagtgaggatcgtcaataccgtcggcaacaatgcgatcgcgtaccttcatgcgcagtacccagaagggggatcctctagatcattgttgcgtccgcaggagatttccaataacccggaaatcatccgtcgtctgggcgtcatcgctctgaacatcggcctggagtttgatatttacgggcatgccaactcaacacacgtagccggggtcgatctgatgaacggcatcggcggcagcggtgattttgaacgcaacgcgtatctgtcgatctttatggccccgtcgattgctaaagaaggcaagatctcaaccgtcgtgccaatgtgcagccatgttgatcacagcgaacacagcgtcaaagtgatcatcaccgaacaagggatcgccgatctgcgcggtctttccccgcttcaacgcgcccgcactatcattgataattgtgcacatcctatgtatcgggattatctgcatcgctatctggaaaatgcgcctggcggacatattcaccacgatcttagccacgtcttcgacttacaccagcaactttcggtaatcaccactattggtgtttacgactgggaacagaccatcgaacagaagttagtgttcgatatcgaaatggcgtgggataaccgtaaagcggcgaaaagtgatgatgtggcggattgcctcagttacgctgacattgcagaaacggtggtcagccacgtcgagggggcgcgttttgcgctggtggaacgcgtggctgaagaggtggcggagctgctgttagcacgcttcaactcgccgggtttattgatgagcgatatgcactcgctgctgatagcggcaatattgggtgtggtcgaaggattgacagaatttctgccggtatccagcacgggccatatgattattgtcggtcacttgttggggtttgagggcgacacggcgaaaacctttgaagttgtgatccagttaggatcaattctggcggtagtagtgatgttctggcggcgtctgtttggcctgattggcatccactttggccgcccgttgcagcacgaagctggcgcatctgtggtggtcagtgatattaacgccgacgcagctaaccatgttgtagacgaaattcaacaactgggtggtcaggcatttgcctgccgttgtgatatgacttccgaacaggaactctctgcactggcagactttgctatcagtaagctgggtaaagttgatattctggttaacaacgccggtggcggtggacctaaaccgtttgatatgccaatggcggattttcgccgtgcttatgaactgaatgtgttttcttttttccatctgtcacaacttgttgcgccagaaatggaaaaaaatggcggtggcgttattctgaccatcacttctatggcggcagaaaataaaaatataaacatgacttcctatgcatcatctaaagctgcggccagtcatctggtcagaaatatggcgtttgacctgggtgaaaaaaatattcgggtaaatggcattgcgccgggggcaatattaaccgatgccctgaaatccgttattacaccagaaattgaacaaaaaatgttacagcacacgccgatcagacgtctgggccaaccgcaagatattgctaacgcagcgctgttcctttgctcgcctgctgcgagctggatggcgcaaaccatttatattccagctattgccgatatggcgcgcgatctcaacgtccgtgaaggggcggtgcagagcgtaatgggcgcttatctgctgacttacggtgtctcacagctgttttatggcccgatttccgaccgcgtgggccgccgaccggtgatcctcgtcggaatgtccatttttatgctggcaacgctggtcgcggtcacgacctccagtttgacggtgttgattgccgccagcgcgatgcaggggatgggcaccggcgttggcggcgtaatggcgcgtactttaccgcgagatttatatgaacggacacagttgcgccatgctaacagcctgttaaacatggggattctcgtcagtccgttgctcgcaccgctaatcggcggtctgctggatacgatgtggaactggcgcgcctgttatctctttttgtcggttctttgtgctggtgtgaccttcagtatggcccgctggatgccggaaacgcgtccggtcgatgcaccgcgcacgcgcctgcttaccagttataaaacgcttttcggtaacagcggttttaactgttatttgctgatgctgattggcggtctggccgggattgccgcctttgacgcctgctccggcgtgcacagattgtga

SEQ ID NO: 132420 - DNA, 793 bp, Homo sapiens
ctgctgccggtggcgattttgcctggtacgatcatgtactgaccaccagtctgctgctgggtaacgttccggcgcgtcatcagaacaaagatggttcggtagatatcgacaccctgttccgtattggtcgtggacgtgcgccgactggcaacctgcggcggcacggaaatgaccaaatggtttaacaccaactatcactacatggtgccggagttcgttaaaggccaacagttcaaactgacctggacgcagctgctggacgaagtggacgaggcgctggccgtgggccacaaggtgaaacctgtgctgctggggccggttacctggctgtggctggggaaagtgaaaggtgaacaatttgaccgcctgagcctgctgaacgacattctgccggtttatcagcaagtgctggcagaactggcgaaacgcggcatcgagtgggtacagattgatgaacccgcgctggtactggaagcgctgcctgttcagggtctgcatgttgacctcgtacatgctaaagatgacgttgctgaactgcacaagcgcctgccttctgactggttgctgtctgcgggtctgatcaatggtcgtaacgtctggcgcgccgatcttaccgagaaatatgcgcaaattaaggacattgtcggcaaacgtgatttgtgggtggcatcttcctgctcgttgctgcacagccccatcgacctgagcgtggaaacgcgtcttgatgcagaagtgaaaagctggtttgcttcgccatacaaaaatgccatgaactggcacctgcctcgatgcg

SEQ ID NO: 132421 - DNA, 4107 bp, Homo sapiens
tcaggaatcttccataacatagaaattggctttatccagataagcaatcagcagcgcaaccgactttaatcggtcacctttttgccaatcttcagcgttaatagtaccagtgttgattgcttgtataaggagatcaaggtaaagacctaaagcatcattttgtttatggttccacagctgcggcttgccttcttcctgcacatctgccatcacgggggagttgctgtcaaatcggatatgcacagcattcatttgcacgggaattccatccagtcgttttgggttgctaatgacgtcctgcatccgcttaatctggtcgggcgtagacatataatcccacagggtgagcagaaccttttttgcggctacactatttccctgatctgatactaatagctcgcgaccgctgatgatcagccttttgctgtaatgcgtcgcctgacgctgcaggataatcctgctatcgcccgcgtcattcgtcaggtatccgccgaatacggtcttaccgctgataaaggctacaccgtcgccgatccgaatcttgacgagctgtatcaagtatatagtcagcgagggtgaagtggtcggcggcggtgggatagcgccattaaccgggagtgagtcggaaaatttatcctgatgttctttcagcagattaatcgctttatcaacaatatagtcgacgtaaaccagcgtgttgtcgtaagtgttcaccagttgctctttggtacaggtctggatctcattggtgtcgcaggttggggtaaatttcctgaactgaggcggatagcggttgtaataggtcggaccgtggctgccgatggtgtgtaagacaatcacgccatcaccttgcaggttattgatgtactcttcaagcccgtggaacagcacttcgtcatagcattcgccgttgatgcactgatcaggtagattcagcgcggtgacgttctggtgaggcacgcggtcgcaggcacctttacagccgccatcgttgtcattccacagcacgttgatgcccgctcgctgaatgatatccagcacgccttcctggtgctgtgccagctcttctttgtagtgctcacgcggcatatccgagaacatgcacggtactgaaactgccgttgccgtgccgcaagatgcggtattagggaaatagaccacgttatctttcgccagccgcgggttagtttcacgcgggtagccgttgagggagaagttctccgcccgcgaggtttcgccgacaatcaggatggtcaaatttttacgtttttcgttctgcattaacgggttgcggtgcgcgtcttcaccaattcgcaccagcggcagatttgccagtcgcagggacataaacgcacaccgaaacagttggcgctcatcatcaaacgttgtttgccgatggtgctcactggcagcggcatgctttgcactaccgctaacgccgaagagtattatttcgaccccattatgctgatcgagttttgcaatttcgccgagttcgtctttgtcgagacggaaatcccagacatcaaagttttcggcaatacgtgaaggtgtgaccgatttcgggatcaccaccaggccgctatccagatgccagcggataacaatctgcgccggggttttgccgtatttatctgccagatcgcgaatgactttctgatcgaaaacgcctttccctccttgcgctaatgggctccaggattcggtctggattttgtgtgtcgcgttccaggcgtgtagctggcgttgttgcatcagcggatgaagttcgatctggtttatcacaggcgtcacgccagtttcatcaatcaggcgttgcaggtgatggatctggaagttgcacacgccgatgcttttgattaatccctctttttgcaattcgatcatgcctttccatgcttcgacataatggtcgatagcgggaacgggccagtgcattaagtagaggtcgatataatcaagctggagttttttcaggctgtcgagcagggcttcgcgggggccgactatcacggccgacgacgacgcggaccgcacggatgtcgacggacgatgacaccgaacatcgatacacaagttaatactgcgttcgcgcagtacctctttcatcgcctgagtcaccagttcatgttcatggcgatctttttctgacgccagcagacgattacctgcttcgcgatcgagcacttcatccggctgacgacgcgcggaaccggctaacggaatggagctaaaacgctcgccgtctttacgtagcagcagttccgggctggcccccagcaggacgccaccatcagccagcggaacatggaagttgtaactaaccgggttttgcgcaatcaaccgttccagcaatacgccactatcaatggcggcgtcagtggtgatatcaatcaaccgtgacaacaccactttgtcgacctgcggcgtggcggtaagtgcggcggcgcgggcaaccatctgttcaaacgtggtttgctccggaattgcctggcgttccaccacattcagcgactggctgcgggtgaaacggcgtgcggaagcttgtttttcctgacgggagaacgactgccaggattcaggaatatacagcgacgaaggctgacgtggatcgaagggaatcgccccgaccatcaccggatttaagcccggtggagatcgcctggccgcaggaagcgtagcagcagccggcgcgatatattgattagtctgcgaacaagctttgcagattttgccaccgctttcacagaagtggtagacttcgttccttatgaagattctctgaaacaactggcgcgcgaacgctataaagcctaccgcgtggctggtttcaacctgaatacggcaacctggaaataatggaaaagacatataacccacaagatatcgaacagccgctttacgagcacctcggtttccctcgcgttggcctgcgtcgcgagctgaaaaaagcgcaagaaagttattgggcggggaactccacgcgtgaagaactgctggcggtagggcgtgaattgcgtgctcgtcacctgggatcaacaaaagcaagcgggtatcgacctgctgccggtgggcgattttgcctggtacgatcatgtactgaccaccagtctgctgctgggtaacgttccggcgcgtcatcagaacaaagatggttcggtagatatcgacaccctgttccgtattggtcgtggacgtgcgccgactggcgaacctgcggcggcagcggaaatgaccaaatggtttaacaccaactatcactacatggtgccggagttcgttaaaggccaacagttcaaactgacctggacgcaactgctggacgaagtggacgaggcgctggcgctgggccacaaggtgaaacctgtgcttgctgggcccggtacctggctgtggctggggaaagtgaaaagtgaacaattttaccggctgagcctgctgaacgacattcttgcgggttatcaacaagggctggcagaaaccggagtaggtccagacgatatcgtcacggcttaactgctttttaaagtgcgtgttatacacattcagcaggtaattgatttcactctcttcaatcttcaccgctttcggatcgcctttgtactcgacatcggtagtgccgatgatggaaaactcgtccatccacgggatcacgaacacaatacgtttatcttcgttttgcagaatgtaggcttgcttctgggtatgcacgcgcggcaccacaatatggctgcctttgatcaggcgaatgccataaggcgaaggcagatgcatcccgtcgtcgaagaactgtttcacccacgggccggtggcgttaaccaagccgcgcgcttgccagctatattttttgccggtatcgatatcttccgcttccacaatccacaggccgttttcgcggcgagcagaggtggcgcgagtccgagtaagcacttcgccgcctttacgcaccaccatctgggcgttggcgagtaccagacgggcgtcgtctacccaacagtcagaatattcgaatccgcgcttaatttccggttttaacactgaatttgcgccaaaacgcaaaccagttgatcccggcaagctggtgcgtttacccagatgatcgtacat

SEQ ID NO: 132422 - DNA, 2812 bp, Homo sapiens
atgaagcaaacagtttatatcgccagccctgagagccagcaaattcacgtctggaatctgaatcatgaaggcgcactgacgctgacacaggttgtcgatgtgccggggcaggtgcagccgatggtggtcagcccggacaaacgttatctctatgttggtgttcgccctgagtttcgcgtcctggcgtatcgtatcgccccggacgatggcgcactgacctttgccgcagagtctgcgctgccgggtagtccgacgcatatttccaccgatcaccaggggcagtttgtctttgtaggttcttacaatgcgggtaacgtgagcgtaacgcgtctggaagatggcctgccagtgggcgtcgtccatgtggtcgacgggctggaccgtctggctaggcagttaattaagaatctggcgacactaaaagcaggcaatgcacgcgtggtgaacagcaacgcgatgtcattcctggcgcaaaaaggtacaccgcataatatcgtgtttgtcgatccaccgttccgccgtggcttgttagaagagacgataaatttactggaagataacggctggctggctgacgaagccctgatttatgtcgaaagcgaagtcgaaaacggtctgcccactgttccagcaaactggtcattacatcgggaaaaagtggcggcttttgctggagcggagccatatcattatttgaatcacaccctcggtttccctcgcgttggcctgcgtcgcgagctgaaaaaagcgcaagatagttattgggcggggaactccacgcgtgaagaactgctggcggtagggcgtgaattgcgtgctcgtcactgggatcaacaaaagcaagcgggtatcgacctgctgccggtgggcgattttgcctggtacgatcatgtactgaccaccagtctgctgctgggtaacgttccggcgcgtcatcagaacaaagatggttcggtagatatcgacaccctgttccgtattggtcgtggacgtgcgccgactggcgaacctgcggcggcagcggaaatgaccaaatggtttaacaccaactatcactacatggtgccggagttcgttaaaggccaacagttcaaactgacctggacgcagctgctggacgaagtggacgaggcgctggcgctgggccacaaggtgaaacctgtgctgctggggccggttacctggctgtggctggggaaagtgaaaggtgaacaatttgaccgcctgagcctgctgaacgacattctgccggtttatcagcaagtgctggcagaactggcgaaacgcggcatcgagtgggtacagattgatgaacccgcgctggtactggaactaccacaaccctgtctggaccgcatacaaacccgcttacgatgcgctccagggacagggtctgcatgttgacctcgtacatggtaaagatgacgttgctgaactgcacaagcgcctgccttctgactggttgctgtctgcgggtctgatcaatggtcgtaacgtctggcgcgccgatcttaccgagaaatatgcgcaaattaaggacattgtcggcaaacgtgatttgtgggtggcatcttcctgctcgttgctgcacagccccatcgacctgagcgtggaaacgcgtcttgatgcagaagtgaaaagctgtggtgacacggcagctctggcagagtggagcgccccgattcaggcacgtcgtcactctacccgcgtacataatccggcggtagaaaagcgtctggcggcgatcaccgcccaggacagccagcgtgcgaatgtctatgaagtgcgtgctgaagcccagcgtgcgcgttttaaactgccagcgtggccgaccaccacgattggttccttcccgcaaaccacggaaattcgtaccctgcgtctggatttcaaaaagggcaatctcgacgccaacaactaccgcacgggcattgcggaacatatcaagcaggccattgttgagcaggaacgtttgggactggatgtgctggtacatggcgaggccgagcgtaatgacatggtggaatactttggcgagcacctcgacggatttgtctttacgcaaaacggttgggtacagagctacggttccccccagacaaatgaacaccaaaccctgagtgaattgttttataaagaactcgaggataaattttctggcaaggagctggcgacgcctctattaaaaagcttctcagagaactgtagacaaaatggtcgtcatatctttagcaacaaggattttgtcattaaattttccacgtccgtcttacaagctgataagaaagaaattacgataattaataaaaacgaaaacacgacacttactcaaaccattgccccaatatttgaaaaatacctaatggaaattttacctcaacgctcagacactcttgataaacaagaattaaacctaaaatcagatagaaaagaaaaagaattcccaagaattaaacttaatggtcaatgttattttccggggcgaccccaaaaccgtatagtatgccgacacattgctgcacaatatattaatgatatttatcagaatgttgattacaaaccccatcaagatgattactcttcagctgaaaaatttctcacgcacttcaacaaaaaatgcaaaaaccagactttggcgttggtttccagccgtcctgaggggcgttgcgttgctgcctgcggtgatttcgggctagttatgaaagcatattttgacaagatggaatcaaatggcatcagtgttatggcagccatattactggtggataaccatgctttgacggtcccgcttaagaataaagaacacaactga

SEQ ID NO: 132423 - DNA, 2563 bp, Homo sapiens
ttatccgttctgcttttgcatccactccaccacaaaatcagccagcccctcaacatcattaatatccagtaatgcgacatgtggagaaatcgtgcacgggattgagattgaggagaaagtccagatcccatccatgcccttcatatccccgtggagcagaaggtatttttctggcttctgctctctcaaattctcaactgtgcaatacccacaacggcaggcacacttcacgggtttttcctggcaaaactttgacgggtgcgtttcaacggaaggggagaagccacccttctccatggctgtgtgtgtgcctatggtctgctcaggtcccgggtgtagcaccgcaggtgattcatcgccgtgggtcgttatcgccgtggtcagtgaggtattgtcggcgataatctgacagccaggcagttgaaatgcgatgcgatcgcctgattcaatacccttcgctaacatccagtttgccagacagctcgcggcgggatcgagcgcgctataggtgtacgatgcaccatgattatcgaccacggcaattttgtctggcatcgcacgacggtctgctgccagtaatcggccagcgaagcatcgccccataacccgtgccagactcagcacgtcggcgtgttcatatcccaggcgttcatacattccgagcaccatgtcgttatcttccggcacattgactccgcgatgcccgtcataaccgcccatcaccgttccgaccacgtcaccgtttacctcagcgaccaaaaacaaactgacgtcatggttcatcttacgctcgatgtccatttccggatcgttccacgacgcagcaagtcgcacgctcccaagggtgatgacctttcgagggatatagctgtcgtcgaggcctgacccagaggattccagggcgcacgacaacgctacttcggtcgcccggaagacggcacggttacggcgaactgcgatcgtatcgaaaaccgttacaacggtacggtaaaccactacttcctctgcgaccgtggtcgtttcggttacggttacgtcaacctgaaggatcgtccgcgtcagccagtacagcgtcgtggcgatgatttcattaccaggcaatgcagggccgcggcagatattctgcgtcagtcgaagaaagtgatcggtattggttctccgcgtgccagcgtggaaagcaactttgcgctgcgtgaactggtgggcgaagaaaacttctacaccggtatcgctcacggtgagcaggaacgtctgcaactggcgctgaaagtgctgcgtgaaggcggcatttatactccggctctgcgcgaaatcgaatcttacgatgcggtactggtgctgggcgaagacgttacccagaccggcgcgcgcgtcgcgctggcagtgcgtcaggctgtgaaaggtaaagcgcgcgaaatggcggcagcacagaaagtggctgactggcagattgcggcaatcctcaacatcggtcaacgtgcgaagcatccgctgtttgttaccaacgttgatgacacccgtctgcaagcctggcaaaaagcacaaatcgacgtcatcgtgcaggcactggcagtgcaagaactcctgcaggttgactctagaggtatcccccagacgcacttcatagtcgaccatcgccgaataatgcaggccactgcgcggcagaatatcggacgtcattaccagatccagctctccctgttgcaaggcgggctgttcatcaaatgtcacgcccgatttaaaatccatgtctacctgcggccagttcttatggaaattttctaacgcgggtgtcagccactgaatacagctatggcactcaatggcaatgcgcagacgcgtctgctgcggttcattgcaggcttgcagggcctggctaatttgcggcagtacctggtttgccagttgcaacaggatttctccctgcggtgtaaagcgtaacggctggctcttacgcacaaatagccggaagccaaggcgttgttccacatcgctaaactggtgagacagggcggattgcgtctgatgcaacgtcgccgcaacggctgcgagcgagccgcagttccgcaacgcttgtagcgctttcaggtggtttacttcgatcatgaaaagccttcacttcggcatgaataatttgcgcttgaggaatatacaggaactcgcaattaaggatgtgtaaaccttctggaccggtaaaagcctttcccctttaaatttatggtgcgttggctgcgtttctccaccccggtcacttacttcagtaagctcccggggatgaatgaactttggcgcctccctaaattccccaacccctaggagttacctttcattggggggagaaaaaaaggcccctgtttgggagcacacccttggggtcccctcccgtaggcctgcggccgggaagctgaaaaaagcgccagaaaggtattggggcggggaacatccccccgtgaaaaaatggctgggcgggtaggcccggaaatgccggcctcgtccctgggaaaccctctagaagtcccacctgcggcgccggccaagcttggggccttgggccggcggttta

SEQ ID NO: 132424 - DNA, 1314 bp, Homo sapiens
tcaagcccacccgcgaactgataacccaggtaattcaccatttttgctggcattaaaacgtaggccggataaggcgctcgcgccgcatccggcgctgttgccaaactccagtgccgcaataatgtcggatgcgatggatttaaaatccatctctacctgcggccagttcttatggaaattttctaacgcgggtgtcagccactgaatacagctatggcactcaatggcaatgcgcagacgcgtctgctgcggttcattgcaggcttgcagggcctggctaatttgcggcagtacctggtttgccagttgcaacaggatttctccctgcggtgtaaagcgtagcggctggctcttacgcacaaatagccggaagccaaggcgttgttccagatcgctaaactggtgagacagggcggattgcgtctgatgcaacgtcgccgcagcggctgcgagcgagccgcagttccgcaacgcttgtagcgttttcaggtgttttacctcggtttccctcgcgttggcctgcgtcgcgagctgaaaaaagcgcaagaaagttattgggcggggaactccacgcgtgaagaactgctggcggtagggcgtgaattgcgtgctcgtcactgggatcaacaaaagcaagcgggtatcgacctgctgccggtgggcgattttgcctggtacgatcatgtactgaccaccagtctgctgctgggtaacgttccggcgcgtcatcagaacaaagatggttcggtagatatcgacaccctgttccgtattggtcgtggacgtgcgccgactggcgaacctgcggcggcagcggaaatgaccaaatggtttaacaccaactatcactacatggtgccggagttcgttaaaggccaacagttcaaactgacctggacgcagctgctggacgaagtggacgaggcgctggcgctgggccacaaggtgaaacctgtgctgctggggccggttacctggctgtggcggggattccgcccggtaaaccactcgaccagcgtatgattgtgctgggcgcactggaagcggtcgactggtgtagtgtcgtgttgaagaggacacgccgcagacgcttgatcgccgggatcttgccagatctgctggtgaaaggcggcgacatgtgacaaatgtggtgccagcatcacatacgacgattaccaggatcatccacagagcatactggcttgcgttatgagctaggcgaacaccaggaaccatacgcacacaaacgtcgcaccatcgccacactgccggcgtaccacatacatacaatgccgttcgcagcaggacgtacat

SEQ ID NO: 132425 - DNA, 1833 bp, Homo sapiens
atgaatgaaaattttggcacgcaaatttgcgtaaataatcggctgagcttcactgactgttccggttatgtaacccgctatgaccatgaccgttttggtcaggtgacggcggtgcaccgcgaggaagggctgagtcagtaccgcgcatacgacagccgtggacagttaattgccgtgaaagacacgcagggccatgaaacgcggtatgaatacaacgccgccggtgacctgaccaccgtcattgccccggacggcagcagaaacgggacacagtacgatgcgtggggaaaagccatctgtaccacgcagggcggtctgacgcgcagtatggaatacgatgctgccggacgggtcatccgcctgaccagtgaaaacggcagccacaccaccttccgttacgatgtactcgaccggctgatacaggaaaccggctttgacggccgcacacagcgttatcaccacgacctgaccggcaaacttatccgcagcgaggatgaggggctggtcacccactggcactatgacgaagcagaccgcctcacgcaccgcaccgtgaatggcgaaaccgcagagcggtggcagtatgacgaacgcggctggctgacagacatcagccatatcagcgaaaggcaccgggtgacggtgcactatggttatgacagtaaaggccgcctcgccagtgaacacctgacggtgcatcatccgcagacgaatgaactgctctggcagcatgagaccagacttgcgtacaaacgcacaggactggcgaaccgctgtataccggacacctgcccgcctgtgaatgcttacctaggcacggcttgctgtcagcatgaaatctgtgacacaccgtggttgagttaccgcgaccctttcaccgggaaatcttggctttccggccgttatgaattacacaagcgtatttacggcatcaccgctaaagagcgtaaagatgttgatgtctggcatccggatgtacgtttcttcgaactgtatgacgaaaataacgaactgcgcggtagcttctacctcgatctgtatgcccgtgaaaacaagcgcggcggggcgtggatggatgactgcgtaggccagatgcgtaaagctgatggttctttgcaaaaaccggtcgcgtatttgacttgtaacttcaaccgcccggtaaatggtaaaccggcgctgttcactcacgacgaagtgatcaccctcttccacgagttcggtcacggcctgcaccatatgctgacccgcatcgaaaccgctggtgtttccggtatcagcggtgtgccgtgggatgcggtcgaactgccgagtcagtttatggaaaactggtgctgggagccggaggcgctggcgtttatctctggtcactatgaaaccggcgaaccgctgccgaaagagttgctggataaaatgctggcggcgaagaactaccaggcggcgctgtttattctgcgtcagctggagttcggcctgtttgatttccgccttcatgccgagttccgcccggatcagggggcaaaaatcctcgaaactctggcagaaatcaagaaactggttgccgtggtgccatctccgtcctggggccgtttcccgcacgctttcagccatattttcgccggtggttatgccgcaggttactacagctacctgtgggctgacgtactggcggcagatgctttctcgcgctttgaggaagagggcattttcaaccgtgaaaccgggcagtcgttcctcgacaacattctgagccgtggcggttcagaagagccgatggatctgttcaaacgcttccgtggtcgtgaaccgcagctggatgtgtccaaaataccttga

SEQ ID NO: 132426 - DNA, 535 bp, Homo sapiens
aacccggacgcttcatcagtttgagaatgcgcgggctggcgtgctgcaacggaatgtccagatacggcaggattttgccttctgccatcagtgggatgacgtcgtccacatgcggataaggcaaagacaaattgatcccaagtctgaaagagagcctgcaaaaattgcgtaccgattattggtgcgtgaggcgactatcgatgttaacgcgctggcggcgaagcagcctgtgaccgaacaggagattgccagctactacgaacaaaacaaaaacaatttcatgacgccggaacaattccgcgtgagttacatcaagctggatgccgcaacgatgcagcaaccggtcaggtggagtaccatttacggcgactccacccggaaaagagttccccgcgccagcagggataaaccggcaacgacgcgccagtgccagcacaatcagcacaataccgctaccttcaacggcccccggattctcgccgagcagccaccaggaaaagagtacgccgcaaacgggaacggccagtgtgcttaa

SEQ ID NO: 132427 - DNA, 886 bp, Homo sapiens
atgggccttatgaacgcatttgattcgcaaactctagattcttcacctgcaattggtcgcaacttgcgtagccgcccgctggcgcgtaaaaaactctccgaaatggtggaagaagagctggaacagatgatccgccgtcgtgaatttggcgaaggtgaacaattaccgtctgaacgcgaactgatggcgttctttaacgtcgggcgtccttcggtgcgtgaagcgctggcagcgttaaaacgcaaaggtctggtgcaaataaacaacggcgaacgcgctcgcgtctcgcgtccttctgcggacactatcatcggtgagctttccggcatggcgaaagatttcctttctcatcccggtgggattgcccatttcgaacaattacgtctgttctttgaatccagtctggtgcgctatgcggctgaacatgccaccgatgagcaaatcgatttgctggcaaaagcactggaaatcaacagtcagtcgctggataacaacgcggcattcattcgttcagacgttgatttccaccgcgtgctggcggagatccccggtaacccaatcttcatggcgatccacgtttgcctgctcgactggcttattgtcgcacgccccaccgttaccgatcaggcactgcacgaacataacaaacgtttggtattaacaacatatttgcgatcggtgatgcgatcccgccgtcatgattctgacgaaacccgatcgcatagtgctgtgtttaacggtgcttggatttaccctttttggtcggagactccctgtgtgaggttaccgtggaagaacccaattttgaagttaaaggctgttctcgctttccaacccaaagatgtacccctttgccgggaaggaatccctaaaggcctacctaaag

SEQ ID NO: 132428 - DNA, 1527 bp, Homo sapiens; identical to SEQ ID NO: 130196

SEQ ID NO: 132429 - DNA, 1008 bp, Homo sapiens
atgaaaatcaagcatgagcacatcgaatcagtgttgtttgccctagcagccgaaaaagggcaggcatgggtagccaatgcaattactgaagaatatctgcgccaggggggcggcgaattgcccctggttccaggcaaggactggaacaatcagcagaatatctatcaccgttggttgaaaggtgaaacgaaaacgcaaagagaaaaaattcagaagctgatcccagcaattctggcaatccttccgcgcgagctgcgtcaccgactctgcatcttcgatattatgaacgcatttgattcgcaaaccgaagattcttcacctgcaattggtcgcaacttgcgtagccgcccgctggcgcgtaaaaaactctccgaaatggtggaagaagagctggattcaaagaacagactgaccagagataaacgccagcgcctccggctcccagcaccagttttccataaactgactcggcagttcgaccgcatcccacggcacaccgctgataccggaaaccaggcaacaaacgtcgacatcagcaaaatatgcagacacataatgttctgcattattccgtctatgcgcggcgacctggtgagccgtccgattggcgaagtgttaagtgaagcgaaacgtctggtagatgcgggcgttaaagagattctggtgatctcgcaggatacttccgcctatggcgttgatgttaaacatcgtactggcttccacaacggcgagccggtaaaaaccagcatggtcagcctgtgcgaacagttatcgaaactggggatctggacacgtctgcactacgtttacccttatccgcatgtggacgacgtcatcccactgatggcagaaggcaaaatcctgccgtatctggacattccgttgcagcacgccagcccgcgcattctcaaactgatgaagcgtccgggttctgtagatcgccaactggcgcgcatcaaacagtggcgcgaaatctgcccggaactgctgtgggttatggccgcttaa

SEQ ID NO: 132430 - DNA, 747 bp, Homo sapiens
atgggtgtcttactgctcaggctcaacgacgctgccctgcgggcgctgcaagagtgtcagcggcaacagggaccttgggcctcagccggcgaccctggagaaggtgcaggggagagggagcggcttccgcaagctctggcctccccacctctccaagtgaagcccgctaggcaggtgatcccgggctccggacgccggatcctggggacactgcttcacctgcgctcaacggtcacatcttcgctctccccgcaggtacggccggtgattgctttccaaggccaccgaggggaaggaaaaatagtggaacctgaagtggtaggagagagtgactcagaagtagaaggagatgcttggcgcatggaacgagaagacagcagtgaagaagaggaggaggaaattgatgatgaggaaatagagcggcggcgtggcatgatgcgtcagcgagcacaggagagaaaaaatgaagagatggaagtcatggaagtggaagatgagggtcgttctggagaggagtcagaatcagagtctgagtatgaagagtacacagacagtgaagatgagatggagcctcgccttaagccagtcttcattcgaaacagtacccaagttacagagaagaaaagcgtcgctggtggccgtgaattaagtgattttattagctatctacaaagagaagctacaaacccccctgtaattcaagaagaaaaacccaagaagaagaagaaggcacaggaggatctctaa

SEQ ID NO: 132431 - DNA, 576 bp, Homo sapiens
tttcgtgggtgtgccaaccaaaccctgaacagaggaggtggcggaggtggccctcgcctgtggcccccgtgctgcttgcactcgaactcgtcgccatggaggagctccaggagcctctgagaggagagctccggctctgcttcacgcaagctgcccggactagcctcttactgctcaggctcaacgacgctgccctgcgggcgctgcaagagtgtcagcggcaacaggtacggccggtgattgctttccaaggccaccgagggtatctgagactcccaggccctgggtgggcctgcctcttctccttcatagtgccccaacgttgtcaggagggcgctggtggtagcttggaccttgtgtgccaacgcttcctcaggtctgggcctaacagcctccactgcctgggctcactcagggagcgcctcattatttgggcagccatggattctatcccagccccatcatcagttcagggacacaacctgactgaagatgccagacatcctgagagttggcagaacacaggaggctattctgaaggagatgcagtatcacagccacagatggcactagagg

SEQ ID NO: 132432 - DNA, 1578 bp, Homo sapiens
atggtcttctgcccctctgtgctgccaggatctgctgggagacagggtcacagtcgagggggatatgcatttggtctgcacagtgccgtggcagagctgttgcaaagctcagaagagaaaatggtaaatacatgttcgtttgctcaacggatgtctgtgactgcccagaacagagaactgggaaatgacagggtcgggggagcagccgtcctggctgtgggcatctggaccctggtggagaagagtggctacctcagcgtcctggcctccagcacctttgccgcctccgcctacatcctcatctttgcgggcgtacttgtcatggtgaccggcttcctgggcttcggtgccatcctctgggagcggaagggctgcctctccacgaccacaggggatcgattttggaaggaccggcagccctggacctgcaggggcagaccagtcacagaaaccagagtggagctggaggtcagtgggataggttcaggtcacaccaagggcacagggaccatgaaggcagaaccagtaactggggcagtggcttcccccgagaagtggcgtgacactgccagctatccaggagtatcctacgggcctgactcacagctcacagtggtggtggagagaaggaagtatttctgcctgttgctcgtcatcttcctggttgagctggtggcgggagtcctggcccatgtgtattaccagaggctgagtgatgaactgaagcagcacttgaaccggactctggctgagaactacgggcagcccggagccacgcagatcaccgcctcagtggaccgactccagcaggatttcaagtgctgtggaagcaacagctcagccgactggcagcacagcacgtacatcctgttgcgggaggccgagggccgccaggtgcccgacagctgctgcaagacagtggtggtgcgctgcggccagcgggcccacccctccaacatctataaggtggagggaggctgcctcaccaagctggagcagttcctggccgaccacctgctgcttatgggggcagtgggcatcggggtggcctgcctgcagggcaggccttctgtcctgtgtgctgaaccccagaggagtagtcagtgggaacaggagaagtcatggaacagcacaccagaggcagtttcagacctggacaggatcatcacagtgctgaggcagtgctgttactggcttacaactgctgcctacacagccccaacagccaacaagagccttgtcagccaggcaggcagcatgatgccattgctgaagctgtgcctttggtggctgctggctggcctgccagctgccactacttcccagcaagtgctgatgcctcatgtcagccccaaagaccaagttgtcattgctgcctctgggctcctgtctgcagatgccaggactggcaggacccctgtgtcctctccacgcattctgagcgaaggctggtccaggatgaggagacacagcaacgtccctgtcaccacagttattgagtgcttgccccgtgccttcaacaagccagggaaacagacacataaccagatgatgcgagtgcgatgcgtgtttcgatag

SEQ ID NO: 132433 - DNA, 534 bp, Homo sapiens
atgatgccattgctgaagctgtgcctttggtggctgctggctggcctgccagctgccactacttcccagcaagtgctgatgcctcatgtcagccccaaagaccaagttgtcattgctgcctctgggtccaggatgaggagacacagcaacgtccctgtcaccatagttattgagtgcttgccccgtgccttcaacaagccagggaaacagacacataaccagatgatgcgagtgcgatgcgtgtttcgaaaggcaccgcggagggcagccagttcagcagcaatggatccaaaccaagaagaaatccctgatttacctgaaaaagaattcaggaagttagttattaagctaatcaaggagagaccagagaaaggcgaaggccaattctgtaaaatcagatggaccatcaatcggaaaatgagagctgcccagtctggccttacattctttcaattaatacataaacacaaagacctaaaagcaaagagtgtcaccctccagatgtcccttggctacaccgtggccctgggttaa

SEQ ID NO: 132434 - DNA, 1901 bp, Homo sapiens
gcgtgaggtcgcctctagaggatcgcatgccgtattcaatggctgggataaacattggctattgactgaatcaatgtattgcaatgtttatattttaattatttatagtttaaggacaaataatgagtaagtttgttaaaacagctattgctgcggcaatggtgatgggcgcgttcacctctacggcaacaatcgctgcgggtaacaacggtactgcacgtttttacggcaccattgaagactcagtgtgttctatcgttccggacgatcacaaactggaagttgatatgggtgatatcggtgccgaaaaactgaaaaataacggcaccaccacgccgaaaaatttccagattcgcctgcaagattgcgtatttgatactcaggaaacaatgaccactacctttactggtaccgtttcttctgcaaatagcggcaattattacaccattttcaataccgataccggtgcggcatttaacaatgttagcctggcgatcggtgactctctgggtacctcttacaaaagcggcatgggtattgaccagaaaatcgcgacagatactgccactaataaaggcaaagcgaacgagaatgtgaactttaaagcctggatggtcggcgcactgactgcgccagatctgggtaatttcgcagcaaataccacctgccagattacttacctccgccgggtatgtttgagcctgcgcctcggagaacatatgaaacgtgcatttattatggtgctggactcattcggcatcggcgctacagaagatgcagaacgctttggtgacgtcggggctgacaccctgggtcatatcgcagaagcttgtgccaaaggcgaagctgataacggtcgtaaaggcccgctcaatctgccaaatctgacccgtctggggctggcgaaagcacacgaaggttctaccggtttcattccggcgggaatggacggcaacgctgaagttatcggcgcgtacgcatgggcgcacgaaatgtcatccggtaaagataccccgtctggtcactgggaaattgccggtgtcccggttctgtttgagtggggatatttctccgatcacgaaaacagcttcccgcaagagctgctggataaactggtcgaacgcgctaatctgccgggttacctcggtaactgccactcttccggtacggtcattctggatcaactgggcgaagagcacatgaaaaccggcaagccgattttctatacctccgctgactccgtgttccagattgcctgccatgaagaaactttcgagctgaccaacggcggctacaatatcggtcgtgttatcgctcgtccgtttatcggcgacaaagccggtaacttccagcgtaccggtaaccgtcacgacctggctgttgagccgccagcaccgaccgtgctgcagaaactggttgatgaaaaacacggccaggtggtttctgtcggtaaaattgcggacatctacgccaactgcggtatcaccaaaaaagtgaaagcgactggcctggacgcgctgtatgacgccaccatcaaagagatgaaagaagcgggtgataacaccatcgtcttcaccaacttcgttgacttcgactcttcctggggccaccgtcgcgacgtcgccggttatgccgcgggtctggaactgttcgaccgccgtctgccggagctgatgtctctgctgcgcgatgacgacatcctgatcctcaccgctgaccacggttgcgatccgacctggaccggtactgaccacacgcgtgaacacattccggtactggtatatggcccgaaagtaaaaccgggctcactgggtcatcgtgaaaccttcgcggatatcggccagactctggcaaaatattttggtacttctgatatggaatatggcaaagccatgttctga

SEQ ID NO: 132435 - DNA, 924 bp, Homo sapiens
atggtgatgggcgcgttcacctctacggcaacaatcgctgcgggtaacaacggtactgcacgtttttacggcaccattgaagactcagtgtgttctatcgttccggacgatcacaaactggaagttgatatgggtgatatcggtgccgaaaaactgaaaaataacggcaccaccacgccgaaaaatttccagattcgcctgcaagattgcgtatttgatactcaggaaacaatgaccactacctttactggtaccgtttcttctgcaaatagcggcaattattacaccattttcaataccgataccgacggccccaccatcacgctgaaccagcggttacgcacggaatcttcatgccagcggcaagaagttccgcaatatggcacgctgctggaactggtagctgatgtgaatctggctgtgctggaaaacaatcctcaactgcacgaaaaaatggtaaatgcagacgagctggcgcgactgaatgttgaacgtcatggggcgattcgcgttgggactgcacaagagcttgctactcttcggcggatgtttgccattatggggatgtacccggtgagctattacgatctctcgcaggcaggggtgccggtacattcgacagcatttcggcccattgatgatgcttctctggcgcgtaatcccttccgcgtttttacctccttactccgccttgagcttatcgagaacgaaattttgcgccagaaagcggcggagattctgcgtcagcgcgatatcttcaccccacgttgtcgacaactgttagaggaatatgagcagcagggcggttttaacgaaacacaggcacaggagtttgtgcaggaagccctggaaacgtttcgctggcaccagtcagcaacggtagatgaagaaacctatcgcgcattgcacaacgaaccgaggtaa

SEQ ID NO: 132436 - DNA, 2118 bp, Homo sapiens
atggcaacactaaccaccacccaaacgtcaccgtcgctgcttggcggcgtggtgattatcggcggcaccattattggcgcagggatgttttctctgccagtggtcatgtccggggcgtggtttttctggtcaatggcggcgctgatctttacctggttctgtatgctgcattccggggggatctctagagtcgactgcaggatgctagctctatggggtctattgagcgtcggtatcgatatcggcaccaccaccacccaggtgattttctcccggctggagctggttaaccgtgcggcggtgtcgcaggtgccgcgctacgaattcattaaacgcgaaattagctggcaaagtccggtgttctttacccctgtcgataaacagggcggtttaaaagaagcggaactgaaaaccttaatactcgagcaatatcatgctgcgggtattgagccggaaagcgttgattctggtgccatcatcatcaccggtgaaagcgcgaaaacccgcaatgctcgcccggcggtgatggcgctctctcagtcgctgggcgattttgtcgttgccagcgccgggccgcacctcgaatccgtgatcgccggtcacggagccggggcacaaaccctttctgaacaacggctgtgtcgggtactgaatatcgacatcggcggtggcaccgcgaactacgccctgttcgatgccggaaaaatcagcggcactgcctgcctcaacgtcggtggtcgcctgctggaaaccgacagccacgggcgcgtggtttacgctcataaaccggggcagatgattgtggatgagtgcttcggtgcagggggtaccgagctaaacccgggatacgaccagcagtgtagagtcgcggtgtgttggccgtactggaatttacgaacgatcggattaagcaatgtaatatcctttctctttcttagacagtaccttacggcactggtgttaatacccgatcttctgcgcatcctcgcgactaatgacaaccctaacccagctctatgtagtcgagcagtttacgacgctgagaaaccatgcgcagcagaccacgacggctgtggtgttgcccatacctatatggcagcagaggcgctggaaagtgccgcgaaagcgaaaggctgggaagtgaaagtagaaacccaggggtcaattggtctggaaaatgaactgactgcggaagatgtggcgagcgctgatatggtgattctgaccaaagatatcggcatcaagtttgaagagcgttttgctggcaagaccatcgtgcgcgtcaacatcagcgatgcagagttcctcatcacgaatcgtatctctcgcctccccactgcactgttccccaatacccgtgaaatctcgctggagcgggcgctgctttataccgccagccatcggcaaacccaaggcgaaccgtccattactccggcaaacacctcagagcagtgcgatggttattcagagagtcgacctgcacgactgcagtcagccctggtaaaaatttatcgccggttgatttttttgataaacctccagcatcaggtggggatggcgctgctgcacatactgcatcagcgccttaccaataccgcgcctgacggccttcggtgcgacaaacatcgctgccagaaatcggccttccataatgctgacaaaaccgagaagcttaccgtcttcttcccagacccagttttgcgcgttggcaagataggcatcccgcaccagcggaatgcagtcacgccagtaattcgcttttataaagggatgcccccagccacagttcgaggatcgcggggagttctgaacgttgcgcttcccgaatcatggtttatttcccggatagcaacagcagccaaccacatgatcattcaccagcccacatgcctgcataaaggagtaacagattgtggtgccgacaaacttaaaaccacgttttttcagtgccttagatacggcgtcggaggcgcacgtagacgtgggaatttcgcccaacgttgtggcttgtgtcacctgtggctgatgatttacaaacgaccagacaaagtcgacaaacggttcgccgttctgttccatttgcaggtttcaatgcctgcatacagtgaacaattatga

SEQ ID NO: 132437 - DNA, 457 bp, Homo sapiens
agccagaagaaatgaaagccgacgtggtggtcgctaacatccttgcaggcccattacgtgaactggcaccgttaatcagcgtcctgccggtttcaggcggtttgctgggcctttccggtattctggcaagccaggcagagagcgtttgtgaagcttatgccgatagcttcgcactggacccggtcgtggaaaaagaagagtggtgccgtattaccggtcgtaagaattaaccttcgcatcgccgtagggtgacgcggggcgaagtgcgagcaagctcacaaaaggcacgtaaatttgccgattatttacgcaaatttgcgtgccaaaattttcattcataaagaaaaattgagaacttactcaaatttctttgagtgtaaattttagtcactattttctaatatgatgatttttatgagtaattatcgcaccacgctcattttaaatgcaattcttt

SEQ ID NO: 132438 - DNA, 1657 bp, Homo sapiens
atggcaacactaaccaccacccaaacgtcaccgtcgctgcttggcggcgtggtgattatcggcggcaccattattggcgcagggatgttttctctgccagtggtcatgtccggggcgtggtttttctggtcaatggcggcgctgatctttacctggttctgtatgctgcattccggcttgatgattctggaagctaacctgaattacagaatcggttcgagttttgacaccatcaccaaagatttgctgggcaaaggctggaacgtggtcaacggcatttccattgcctttgtgctctatatcctgacctatgcctatatttctgccagtggttcgattctgcatcacaccttcgcagagatgtcactaaacgtcccggcacgggcggcgggttttggttttgcattgctggtagcgtttgtggtgtggttgagcagtaaagccgtcagtcggtaccgagagctcgacagcctcgatttaaccgcaaaagccattggtattgatatcgatccgcaggcgattcaggccagccgcgataacgcccgaacgtaatggcgtttctgaccgtctggaactctacttaccgaaagatcagccagaagaaatgaaagccgacgtggtggtcgctaacatccttgcaggcccattacgtgaactggcaccgttaatcagcgtcctgccggtttcaggcggtttgctgggcctttccggtattctggcaagccaggcagagagcgtttgtgaagcttatgccgatagcttcgcactggacccggtcgtggaaaaagaagagtggtgccgtattaccggtcatgcgtttgcggtggacatgaaaccgtggaaaaacgtcaagatcgcgtcaattggcatcctgttcgcgatgattggcgtctatgccgggctggctgaattcggcggctacggtacgcgctggttagcgatgatcagttatttcattgccgccgtagtgattgtctacctgatttttgacagctggcggcatcgtcacgacccagccgccaccaatatggtcggttgctatagcggtaaaccgctgaatacgcaaaatattgatagtctggcggcggaaggtattcgctttaattccgcctacacctgttcaccggtttgtacgcctgcacgggccggactatttaccggtatctacgctaaccagtccggcccgtggaccaacaacgtcgcgccaggcaaaaacatctccactatggggcgctactttaaggatgccggctatcacacctgttacatcggcaaatggcatctcgacggtcatgactatttcggcactggcgagtgtccgccggagtgggacgctgattactggttcgatggggcgaactatcttagcgaactgacggaaaaagagattagcctgtgggcgccaagtcctatacaaagtgtaaaatatttacaggcgaaccatatcgacgaaaccttcacctgggcgcatcgtatcagcaatcgggcggtggattttctgcaacagcctgcgcgcgcagacgagcctttcctgatggtggtttcgtatgatgagccgcatcacccgttcacctgtccggtggagtatttagagaaatacgctgatttttactacgagctgggcgagaaagcacaggatgacctggctaacatttga

SEQ ID NO: 132439 - DNA, 969 bp, Homo sapiens
atggagaatgcctgtgtcctgttgatgggggttctgagcacttttctggtcagctggctgggaaaagatgcgatggccggcgtgggattggcggacaacttcaatatggtcattatggctttttttgctgctatcgatcttggtactactgtccctggggcatttagtctctgtaagcgggatcgacgacaagcgagggtggcgacgcggcagtcattggtgatcatgacgtttttgcccgtactgttggcaccgcttattcatcattttggcgaacaaattattgatttcgtcgcgggtgatgccacgacagaagttaaagccctggcgttgacttatctggagctgacggtactcagttatccagcagctgccatcactcttattggtagcggggcacttcgtggtgcagggaatacgaaaatcccgctattgattaacggtcaagtcgccatgctgatgcaagcgccatattacttccaggaagcgcagattgaagccgcgatcgccgcgatggatgttgcacctgaatatgccgatatacggcaggtggagtcatcgacggcggtgttgtacttgtttagcgagcgatttatgacctatggcaaggcttatggcttatgcgaatggttcgagggaagccgtttatcgatagcacacattccagtcaccgataacgacaacgaaacgcagtatcacttttttcgccagtcatgtcagcactgcgaagatgctccgtgcatcgacgtttgcccgacgggggcgtcgtggcgtgatgagcaggggatcgtgcgggtagaaaaatcgcagtgcatcggctgcagttattgcattggcgcttgtccgtaccaggttcgctaccttaaccctgtcactaaagtggcagataaatgtgatttctgcgctgagtcccgactggcaaaagctttccgcccatttgcgtcagcgcctgcccggaacacgcattga

SEQ ID NO: 132440 - DNA, 9231 bp, Homo sapiens; identical to SEQ ID NO: 121137

SEQ ID NO: 132441 - DNA, 1431 bp, Homo sapiens
atgatagcagaccccacgttagctgaaatgggaaaaaacttgaaggaggcagtgaagatgctggaggacagtcagagtggacaagatatggtgagcatcctccagttagttcagaatctgatgcatggagatgaagatgaggagccccagagccccagagaggcgctggcagaaggactgaagactttgatgtatgatctgaaggttccccgctgggacttccagaccggtaggcagttacgcacctctcctctctacgaccggctggatgcacagggagccaggtggatggagaaacatggatttgagaggccaaagtactttgttccccccgacaaggacctcctggcattggagcagagcaagactttctataagccagattggtttgacatcgtggagtctgaagtcaagtgcttttcactgaatgataaaggggatatcaccaccgatcccacagaaatacaaactaccgtcacagaatactataaacacctctatgcaaataaactagaaaatctagaagaaatggataaattcctcgacacatacaccctcccaagactaaaccagaaagaagttgaatctctgaatagaccaataacaggctctgaaattgtggcaataattaagagcttaccaaccaaaaaaaatccgggaccagatggattcacagccgaattctaccagaggtgctgccatggccacgactgttgttacactggagctgaggaggccggctgcagccccaagacagagcgctactcctggcagtgcgtcaatcagagcgtcctgtgcgaagtcttgaagtatgacaagggtgaagccgggctaaagcgggtggtaaaaaaggaacacgcggacggcagcgtcacgcagagtcagtttgacgccgtgggcaggctcagggcacagacggatgccgcaggcaggacaacagagtacagcccggatgtggtgacgggcctcatcacgcgcataaccacgccggatggcagggcatcggcgttttactataaccaccacaaccagttaacgtcagccaccgggcctgacgggctggaattgcgccgggaatatgatgaattgggccgtctgattcaggaaactgcccctgacggcgatatcacccgctaccgttatgataatccacacagtgacttaccctgcgcaacggaagatgccaccggcagccggaaaaccatgacgtggagccgttacggcttgttcgatggcctgcacaaaatgcgggttatctggcagatcatcaccgaaaacttcacgcagggaaagcagggcggttacgcgttgttcactgctgctgcccgcaacaagttcgcgaattttatcgctaagcggatcgcgaacatcaatggcatttccggcatcatcaacgccgctgacgtaacgcatccagcctgcaacgcctaa

SEQ ID NO: 132442 - DNA, 1530 bp, Homo sapiens
atgattgtgttcctccaaaatggaaatagttcccaaaagtcaatacaaggatcccttcagagcgatattactttctggcgcgatattttctttcagtacaatccggagatcatatccgccacggggagtaatagtcacagatatattaatgataatcactatcaccatatcgtcacgcctgaagccatcagtctggcgttggaaaaccacgaattcaaaccgtggatccaaccggttttctgcgcgcagactggcgtactgacgggctgtgaggtgcttgtccgctgggaacatccacaaacgggaattatcccaccggatcagtttattcctctggcggagtcatccggtcttattgtcataatgacccgccaactgatgaaacagactgcggatattctgatgccggtaaaacatttgctgccggacaatttccatattggcatcaacgtctcggcgggttgttttttggcagcgggatttgaaaaagagtgtctgaacctggttaataaattaggtaacgataaaatcaagctggttctcgagctaacggaacgtaaccctattccggtaacgccagaagccagagcgatatttgacagccttcatcagcacaacattacctttgcgctggatgactttggtacgggttatgcgacctatcgttacttgcaggcgttcccggtcgattttattaagatcgataagtcatttgtgcaaatggcgagtgtcgacgaaatctccggtcatattgtggaccatattgtcgaactagcgcctgttctggaaaagctggagatgaaatggtctccagagcaaatatcaggatggttaaggcgaacaaaaccacgtcaaaaaacgctgcgaatatcacctgagacaatttataaaacgctgtactttcgtagccgtgaagcgctacaccacctgaatatacagcatctgcgacggtcgcatagccttcgccatggcaggcgtcatacccgcaaaggcgaaagaggtacgattaacatagtgaacggaacaccaattcacgaacgttcccgaaatatcgataacagacgctctctggggcattgggagggcgatttagtctcaggtacaaaaaactctcatatagccacacttgtagaccgaaaatcacgttatacgatcatcgttagactcaggggcaaagattctgtctcagtaaatcaggctcttaccgacaaattcctgagtttaccgtcagaactcagaaaatcactgacatgggacagaggaatggaactggccagacatctagaatttactgtcagcaccggcgttaaagtttacttctgcgatcctcagagtccttggcagcggggaacaaatgagaataccaatgggctaattcggcagtactttcctaaaaagacatgtcttgcccaatatactcaacatgaactagatctggttgctgctcagctaaacaacagaccgagaaagacactgaagttcaaaacacccaaagagatcatcgcacggggtgttgccttgaccgattga

SEQ ID NO: 132443 - DNA, 2516 bp, Homo sapiens
gttttgtcccgtaagagagctctgcatgcttcaggcgactctgaggatcccgtatggtgatggtgataatggtggtgatgatgatgatggtgatgatggtggcgatggtgatgatgatggtgatgaagatggtgatgatataatgatgatgagggtgatggtgacgatggtaatggtgatgaggatggtgatgatactgatgataatgatgaaggccaaacgcagcggcggacgacggcgcgttacgcagtcatcgaagcgcctcattcctgctatcactcagctcaactggactcagctgcagctccggtcggaccagagctgcagcagacgcggtatccagatccaatcaaaaaggcagagctggatccccaagatcttcaagaagaagacctgcacgacgttcatagttgactccacagatccgggtggcctcgaccggaccgagcagagagcgctgacccggagcagagcccaggaccgagacgcccacgcatccactgggcacaggcaaacccgtctcaaaaaagaaaaaagcatcaagctgtccaccttcgtgcatttttctgcagccgtgtgtgccgtcatccaccagggtaccggagtattaggccccttccgtctgggcttcttgcattctgggacagccaagtctgtgacttgcacgtactcccctgccctcaacaagatgttttgccaactggccaagacctgccctgtgcagctgtgggttgattccacacccccgcccggcacccgcgtccgcgccatggccatctacaagcagtcacagcacatgacggaggttgtgaggcgctgcccccaccatgagcgctgctcagatagcgatggtctggcccctcctcagcatcttatccgagtggaaggaaatttgcgtgtggagtatttggatgacagaaacacttttcgacatagtgtggtggtgccctatgagccgcctgaggttggctctgactgtaccaccatccactacaactacatgtgtaacagttcctgcatgggcggcatgaaccggaggcccatcctcaccatcatcacactggaagactccagtggtaatctactgggacggaacagctttgaggtgcgtgtttgtgcctgtcctgggagagaccggcgcacagaggaagagaatctccgcaagaaaggggagcctcaccacgagctgcccccagggagcactaagcgagcactgcccaacaacaccagctcctctccccagccaaagaagaaaccactggatggagaatatttcacccttcagatccgtgggcgctgggaaggagccaggggggagcagggctcatccagccacctgaagtccaaaaagggtcagttaggtaccgagctcgattcgcattgctcggacccgcgatggttgcgcaccgtcacacgggccggccggaaatccgttaccgttacgacagcgacgggcgggtgacagaacagctaaacccggcaggcttaagctacacgtatcagtatgagaaagaccgcatcaccatcaccgacagcctggaccgccgtgaagtgctgcacacgcagggcgaagccgggctgaagcgggtggtgaaaaaggaacacagcggacggcagcgtcacgcagagtcagtttgacgccgtgggcaggctcagggcacagacggatgccgcaggcaggacaacagagtacagcccggatgtggtgacgggcctcatcacgcgcataaccacgccggatggcagggcatcggcgttttactataaccaccacaaccagttaacgtcagccaccgggcctgacgggctggaattgcgccgggaatatgatgaattgggccgtctgattcaggaaactgcccctgacggcgatatcacccgctaccgttatgataatccacacagtgacttatccatgcgcaacggaagatgccaccggcagccggaaaaccatgacgtggagccgttacggtcagttgctgagcttcaccgactgttccggttatgtaacccgttatgaccatgaccgcttcgggcagatgacggcggtgcaccgcgaggaagggctgagtcagtaccgcgcatacgacagccgtggacagttaattggcgtgaaagacacgcagggccatgaaacgcggtttgaatacaacatcgccggtgacctggacggcggtattgccccggaaggcggcaaaacgggcgcagtacgatgcgtggggaaggcgtcgtacaacaaggggggtgacgcagatgatagaagtgcggggggaacgcgtgcaagaaaggggcacacttcgtttaggtctgtcggcgatagaacacgtttcgcggcacggttaccccggacggaatctgcggagaatggtccggagctcggtaccactttatcggctgacagcgtccattgcgccagttccacaagagtaccgatttccaccccatcaatcagaggaagtgtactaatcccgcgcccgtcggtacaggttttgcacaatttcaccggtacattctga

SEQ ID NO: 132444 - DNA, 2604 bp, Homo sapiens
atggggcaacaaaagcagcgtaatcgacgttgggttctggcctcgcgtccacatggcgcacctgttccggaaaatttccgtcttgaagaagatgatgtcgccacaccgggtgaaggacaggtgttactgcgcacagtttatttgtccctggacccgtatatgcgtggacgtatgagcgatgagccatcttattcaccgcctgttgatattggcggcgtgatggtcggcggtacggtgagccgtgtcgtggagtcgaatcatcctgattatcagtctggcgactgggtgctgggctacagtggatggcaagactatgacatatccagtggtgatgatctggtgaaacttggcgatcatccgcaaaatccatcgtggtcgctgggtgtgctagggatgccaggctttaccgcttatatgggcctactggatatcggtcagcctaaagagggcgaaacgttggtggtagctgcggcgacaggaccagtgggggcgacggtggtttcagaactggataccccagcagcagtaagcgtggtggatggcgaggagatgcgcctggcaacaccgcgcattaacttgtccgaatcactgaccggcgtgcctggtttgcaggtacaaaaccggcagaactatgcgcaagatttacagctgtcgattcgcggatttggctcccgctccacttacggtattcgcggtattcgcctgtatgtggacggtattcccgccaccatgcccgacgggcaagggcaaacatccaacatcgatttaagcagtgtgcaaaatgtggaagtgctgcgtggccccttctctgccctgtatggcaacgcgtctggtggggtaatgaatgtcaccacccagaccggacaacagccaccaaccattgaagccagtagttactacggcagttttggcagctggcgctatgggctgaaagcaacgggcgcaacgggagacggcacacagcctggcgatgtcgattacaccgtctcaaccacgcgttttacgacccacggctatcgtgaccatagtggcgcacagaaaaatttagccaatgccaaactgggcgtacgcattgatgaagccagcaaattaagtctgattttcaatagtgtggatatcaaagcagatgacccaggtgggctaaccaaagcagaatggaaggctaatccacaacaagcgcctcgtgcagaacagtacgacacgcgaaaaaccatcaagcaaactcaggctgggttgcgctatgagcgtagcctgagttcgcgggatgatatgagtgtgatgatgtatgccggagagcgagaaacgacccagtaccagtcaatacccatggcaccacaacttaacttgtcacatgcgggcggcggtatacactttgtcgtttaccccctgaagcgtcacattgttgccctgctttttcgccagatcgataagatggagcagcagtgccagtccccccgtatccacgcgggagacacggctaagatcgatgcagcggtagcaaaacgtcctgatccagctctccggataacgccagcgtgtcacccgtctgcatccagctcagtgactcgctcattattttttctcttccagagtgattttctgttgagaaatcgatttcagttgcgcagtcaggccgtcgatacctttggtacgcagcagcgttccccactcgttttgtttggtggtgatcatactgacgccttcagcaatcatgtcgtaagcctgccaattgcccgtctgggagtttttacgccactggaagtccagacgcaccggcggacggccattcgggtcaataatggtgacgcgaataggcacaatggttttatcgcccagcggctgttctgcgcaatctggatagttgaccgtgatacatcgccagcgcctgaccgtagcctgctcaagactcacgaaagcgcaaagggcgactctggattctgcccactggctaaaggaatgggtaagatgacccatcagagtgaattgcctttagcgaaagtcaggcaatgttacgagccgaagcggcaatggttgcaggagatgcatcactccgttgatccggtacccgacccagaacctgctgaaatcctggctgagttcattcgccagcattctgcggctgggcagctggtggcgcgcgccgtgtttctctcgccaccctatttggttgcagaagaggaactgtcagttttgctggaaagcattaagcagaacggagactacgcggatatcgcttgtttgacgggaagcaaggatgattactattactcaacgcaggccatgagtgaaaactacgcggcgatgtctttgcaagttgtggagcaggacatttgtcgcgccattgcacacgccgttcgttttgagtgccagacgtatcctcgtccttacaaagtcgccatgctgatgcaagcgccatattacttccaggaagcgcagattgaagccgcgatcgccgcgatggatgttgcacctgaatatgccgatatacggcaggtggagtcatcgacggcggtgttgtacttgtttagcgagcgatttatgacctatggcaaggcttatggcttatgcgaatggttcgaggtagagcagtttcagaacccctga

SEQ ID NO: 132445 - DNA, 2643 bp, Homo sapiens
atggtgcggatgcacttccgtttataccaaaatgtgtcgcgagaaaatattagtgatgcgatgactggactgtataatcgcaaaattttaacccctgaactggagcagcggttgcagaaactggtgcaatccggttcttcggtgatgtttattgctattgacatggacaagttaaagcaaataaatgacaccctcggtcatcaggagggggatttagcgattacgttattagctcaggcgattaaacagtcgattcgtaaaagtgattatgccatccgactcggtggcgatgaattctgcatcaatctgtcgattcgacgccacaaattgcagcacaactggctgccgcgtgtccactattgctgggtaagatcagattacaacctgtacgccaatactatcaccgtaactaacggcggtgtattggatgtgaacgttgatcagttcgatactgaagctttccgtactgacaaactggaactgaccagcggcaacatcgctgaccataacggtaacgtagtatctggtgtgttcgatatccatagcagcgattacgttctgaacgctgatctggtgaacgaccgtacctgggatacttccaagtctaactacggttacggtattgttgctatgaactctgatggtcacctgactatcaacggtaacggcgacgtagacaacggtactgaactggataacagctctgtagacaatgttgttgctgcaaccggtaactacaaagttcgtatcgacaacgcaactggcgctggcgctatcgctgattacaaagatcaagaaattatctacgtaaacgacgtcaacagcaacgcgaccttctctgctgctaacaaagctgacctgggtgcatacacctatcaggctgaacagcgcgcctcaattcttccatgtggcattgtcggcctagaacttcgatttcgagggtatacgcgtgtccgtattcccgcgtttgtcggagccccacattcatctctgacgaaatgtggcttcccgcgcatgtgtccatactggtccaaagtatgtgaccaccaccccgttggcatccgtgtgaatcttgatcatgttgaccaaacgccaaaattcacggatgttttggaccacgttagcgtggagttgggataccctcgtctgtgcaacatccatcgcggcgatcgcggcttcaatctgcgcttcctggaagtaatatggcgcttgcatcagcatggcgactttgtaaggacgaggatacgtctggcactcaaaacgaacggcgtgtgcaatggcgcgacaaatgtcctgctccacaacttgcaaagacatcgccgccaaccggcaggcttaagctacacgtatcagtatgagaaagaccgcatcaccatcaccgacagcctggaccgccgtgaagtgctgcacacgcagggcgaagccgggctgaagcgggtggtgaaaaaggaacacgcggacggcagcgtcacgcagagtcagtttgacgccgtgggcaggctcagggcacagacggatgccgcaggcaggacaacagagtacagcccggatgtggtgacgggcctcatcacgcgcataaccacgccggatggcagggcatcggcgttttactataaccaccacaaccagttaacgtcagccaccgggcctgacgggctggaattgcgccgggaatatgatgaattgggccgtctgattcaggaaactgcccctgacggcgatatcacccgctaccgttatgataatccacacagtgacttaccctgcgcaacggaagatgccaccggcagccggaaaaccatgacgtggagccgttacggtcagttgctgagcttcaccgactgttccgctgcgctggatcgtgcattgactatgtcgctggcggaacgtatttcccgtcatgcagaaatgctggacgttatcgtgaaaaacgatattaaccactggcaggagtgcttcattagcgacctaaagcagatagttccgcgaagcgcggaaagccagcagcgcgataaagttgctacctttccaaagcttgccgacagaatatgctatagcggtaccgaggcccccagtgggaacatcccggggaattttgggtttcctccacgaaaaggcgccccaagaattgtgaaagtcccccagatgctgcagttcggtacaacggttcatttgtcattgcctggtagcgtatccgagaaagaacgactgctactcaagctgctgatgcagggaatgtctgtaacagaaatatcacagtacagaaatcgcagtgcaaagacaatttcacatcaaaagaaacagctctttgagaaactggggattcagagcgatattactttctggcgcgatattttctttcagtacaatccggagatcatatccggtttacatggtgcgcgggtttatattgatgtcatcaatacaggcacgcccattccgcaagaggaacgcgccatgatcttcgaacccttttttcagggaagccaccagcgaaaaggggcggtgaagggcagcggtctgggattaagcattgccagggattgtattcgccgtatgcaaggggaactgtatctggtcgacgagagcgggcaagacgtttgtttccgcattgaattaccgtcgtcgaaaaacacgaaataa

SEQ ID NO: 132446 - DNA, 552 bp, Homo sapiens
atgcgtaagtcagttatcgcgattatcatcatcgtgctggtagtgctttacatgtctgtctttgtcgtcaaagaaggtgagcgcggtattacgctgcgttttggtaaggtactgcgtgacgatgacaacaaacagcaagacgtgcgcaatcttaatcagtatcagactcgcggcgcgttcgcttatatttctgaccaacaaaaagtgtacgcccgctttttctggcagcaaaccggccaggatcgctaccgtctgctgctcactaacccattgggcagcacggaactggagctgaatgctcaaccgggtaacgtgcagttagtcgacaataaaggtcagcgttataccgccgatgacgccgaagagatgattggcaaattgaccggaatgccaattccgctcaacagcttgcgccagtggattttaggtttaccgggtgatgcaaccgactacaaactggttcgacgtgtcgttgttgcaatcactttgacatcaattggtattaaacgccgcgcatccagtcgcgtgataaccccctgcttgataacctga

SEQ ID NO: 132447 - DNA, 389 bp, Homo sapiens
tgcgcgccaatgaagtccgcccggtactggcatgccgcatgacgctctccgctgatggcaccattgaagataatatcgaattctttgccgccaccatcgaatccaaagcaaagctggtgtatgaccaggtttctgactggctggaaaataccggtgactggcagctggtgtttaaagatcgcccggattaccgctttattctcggtgaaaaaggtgaagtgctggatatcgtcgccgagcctcgtcgcattgccaaccgtatcgtcgaagaagcgatgattgccgctaacatttgtgcggcccgcgtactgcgcgataagctcggttttggcatctataacgtgcatatgggctttgatccggcgaatgccgacgcgctggcagcgttg

SEQ ID NO: 132448 - DNA, 2007 bp, Homo sapiens
atgaacaaatttattaaagttgcactggtaggtgcagtactggctacgttaactgcatgtactggtcatattgaaaaccgtgataagaactgctcttacgactacctgctgcacccggcaatttctatttctaaaatcattggcggttgcggtcctactgcacacgcttccaccaaaccgcgcaagattgacggtctgggcatcaagcatgttcagttaagcggtgaaggctgggatgcggatcgctgctgggcattctggcaaggttacaaagccccgaaaggcacgcgtaaagtggtgtggccggatctggacgatgcccagcgccaggaactggataaccgcctgatgatcatcgactgggtgcgtgacaccatcaacgcaccggcagaagaattgggaccatcgcaactggcacagcgtgctgttgatctgatcagcaacgtcgcgggcgatcgtgtgacttatcggatcaccaaaggcgaagatctgcgtgacaaggttatatggggctgcacacagtcggacgcggttcagaacgttctccggtattgctggcgctggattacaacccaactggcgataaagaagcgccagtgtacgcgtgcctgcatcaaacagactgcgtttatggactcgatgaagtcggacatgggcggcgcggcaacggttaccggggcgctggcatttgccattacgcgcggactgaacaagcgcgtgaagctgttcctctgcttccgcccggtactggcatgccgcatgacgctctccgctgatggcaccattgaagataatatcgaattctttgccgccaccatcgaatccaaagcaaagctggtgtatgaccaggtttctgactggctggaaaataccggtgactggcagcctgaaagtgaagcaattgccgaacaagtccgtttgctagcgcaaatttgccaacgccgcggcgagtggcgtcataaccacgcactggtgtttaaagatcgcccggattaccgctttattctcggtgaaaaaggtgaagtgctggatatcgtcgccgagcctcgtcgcattgccaaccgtatcgtcgaagaagcgatgattgccgctaacatttgtgcggcccgcgtactgcgcgataagctcggttttggcatctataacgtgcatatgggctttgatccggcgaatgccgacgcgctggcagcgttgctgaaaacgcacggtctgcatgtcgatgccgaagaagtgctcacgctggacggtttctgcaaactgcgtcgtgaactggacgcgcaaccaactggtttcctcgacagccgcattcgtcgcttccagtcatttgctgaaattagcactgaacccggtcctcactttggcctcgcctcgtaccctatctggatcgagaacgtcgcctgggccgacaccattcgcgttcaaccgaactacccgcaactctcccgccgcaatttgcacgcgctgtcgttaaatattttcaaagatgaaggccgcgaagcgtttctgaaattaatggaaaccaccgatatcttcatcgaagccagtaaaggtccggcctttgcccgtcgtggcattaccgatgaagtactgtggcagcacaacccgaaactggttatcgctcacctgtccggttttggtcagtacggcaccgaggagtacaccaatcttccggcctataacactatcgcccaggcctttagtggttacctgattcagaacggtgatgttgaccagccaatgcctgccttcccgtataccgccgattacttttctggcctgaccgccaccacggcggcgctggcagcactgcataaagtgcgtgaaaccggtaaaggcgaaagtatcgacatcgccatgtatgaagtgatgctgcgtatgggccagtacttcatgatggattacttcaacggcggcgaaatgtgcccgcgcatgagcaaaggtaaagatccctactacgccggttgcggtctgtataaatgtgccgacggctacatcgtgatggaactg

SEQ ID NO: 132449 - DNA, 2178 bp, Homo sapiens
gtcgatagccagaatcgcccgatgtttacaaccggaagtgccgatgtcgaaccctatatgcgcgacattctgcgcgccattgcgcctgtactgaacggtattcccaaccgtattagcctttcaggtcataccgatgatttcccctacgccagcggtgagaaaggatatagcaactgggagctttctgccgatcgggccaatgcatcccgccgcgaactgatggtcggagggttggatagcggcaaagtgttacgtgtcgtcggcatggcggcaacgatgcgcttaagcgatcgcggacctgatgatgccgtcaaccgtcgcatcagcctgctggtactgaacaaacaagccgaacaggccattttgcatgaaaacgccgaaagccagaatgagccagtaagcgccctggaaaaacctgaggttgcaccacaggtcagtgttcccacaatgccatcagccgaaccgaggtgacagcgtgagcatggatataagcgatttttatcagacattttttgatgaagcggacgaactgttggctgacatggagcagcatttgctggttttgcagccggaagtgccagatgccgaacaattgaatgccatctttcgggctgcccactcgatcaaaggaggggcaggaacttttggcttcagcgttttgcaggaaaccacgcatctgatggaaaacctgctcgatgaagccagagaggacatcatgcaagaacagctcgacgcttataaacagtcgcaagagccggatgccgccagcttttattatatctgccaggccttgcgtcaactggcattagaagcgaaaggcgaaacgccatccgcagtgacccgattaagtgtggttgccaaaagtgaaccgcaagatgagcagagtcgcaccgcgtggattgctgaaggcagcaagctggacaaagccgcgaaaattcgcgcattcaccaactatctgcctggcttcaacatccctatgctgcctcgcgagctttctgacgatctctgctcactgcgcgccaatgaagtccgcccggtactggcatgccgcatgacgctctccgctgatggcaccattgaagataatatcgaattctttgccgccaccatcgaatccaaagcaaagctggtgtatgaccaggtttctgactggctggaaaataccggtcgactggcagcctgaaagtgaagcaattgccgaacaagtccgtttgctagcgcaaatttgccaacgccgcggcgagtggcgtcataaccacgcactggtgtttaaagatcgcccggattaccgctttattctcggtgaaaaaggtgaagtgctggataatcgtcgccgagcccttgtcgcattggccaaccgtatcgtcgaagaagcgatgattgccgctaacatttgtgcggcccgcgtactgcgcgataagctcggttttggcatctataacgtgcatatgggcttggatccggcgaatgccgacgcgcctgcagcgatgatgaaacacccagggctgcatgtcgatgccgaacaagtgctcacgctgggacggtttctgcacactgctaagcccgccaccgcctgccgtgaggaaagatgcatgagcgagccgttaattgtcggcatccggcatcatagtccggcctgcgcccggctggtgaaatcgttaatcgaaagccagcggccacgatacgtgttgattgaaggcccggctgattttaatgaccgggtagacgaactgtttttagcccaccagcttccggtagctatttacagttattgccagtatcaggacggtgcagcccccgggcgtggtgcctggacgccatttgctgaattttcgccggagtggcaggcgctacaagccgcacgtcgcattcaggcacaaacttacttcatcgatttgccttgctgggcgcagagtgaagaagaggacgattcgcctgatacgcaagatgaaagccaggccttactgctgcgtgccacccgcatggataacagcgataccctgtgggatcacttggtcaaagatgaaagccagcaaactgcattaccctctgcgctggcgcactattttgcccaactgcggggcgacgccttcggcgatgcgctcaatcgtcagcgcgaagcctttatggcccgctggattggatgggcgatgcagcaaaataatggcgacgtgttag

SEQ ID NO: 132450 - DNA, 672 bp, Homo sapiens
atgggttgtagtgaaagtgctaccggtggaggacctactgggactgtgaaaggatgcggcgggtacactgaccgtcattctgttgagcgcgctaccgttcaggcgatacaatggctgacccgagcacccgatcgctttagcgccgcccagttcagccctttactcgaacacgaaaaatcatcaacgcagattattaatctgctggacaacccgctgctagcgcagcttaaacagcaactgcattcccagacgccacgcgctgaaggggtggtaaaagccacagaaaaaggctttggcttcctggaagtcgacgcgcaaaaaagttatttcattccgccgccgcagatgaaaaaagtcatgcatggcgaccgaattatcgcggtgatccacagtgaaaaagaacgcccgtgttgtgtgtccgcggaaaatcaggcggggcccccgtgtctccacaacgtcgtcaagtgctgcaacaacagctgtcgcgagggggcggagcgttaccaggtggacttcgtgctggattgtgtcaaccacgtgccacgcgtacacctgtacaagcgtctctacgactactggagatcacacgtccagtgccacgcgtccaattatcataatatcgcctcacacagctgcaccccaagagccgccacagccacggagtacttctga

SEQ ID NO: 132451 - DNA, 1856 bp, Homo sapiens
  misc_feature (1)...(1856): n = a,t,c or g
atgcagccagccttgctgatagttctcaacaaagtgcgacaggaagcccgccgccgtgctcgcgcctgccggatacgccgcgcttccggtattgttcagttcggcaaagttagacggcagctggctgcggtggaactccgccagcggcagacgccagaacggttcgttctcctgcgcggcactcgccagcaagcgaccggccagcgcatcgtcaaaactgaacagcgcgtgataatcattacccagcgcagttttcgccgccccggtgagggtcgccgcatcaatgatcatttccggtttcctgcgcacttgccatcaatcagaccaatcggcaagcaccagacgcccttcggcatcagtggtcatcacttcaacttttttaccgttgcgataggtgatgatatcgcccagcttgaccgcattggcgctaatcagagtgtcctgaagggctttaacaagtttgttgttcagtacgctactgactcgatgacctcgcagggtaaagggctgtcgcagggttctggcgttgcatttgataacgaaaaatttgcctacaatattttttcaacggtcacatgctgcgtatcctcgaccacggatatcaactgggataacgacaacggcaccaagtggtggaccgtcggtattcgcccgatgtacaagtggacgccaatcatgagcaccgtgatggaaatcggctacgacaacgtcgaatcccagcgcaccggcgacaagaacaatcagtacaaaattaccctcgcacaacaatggcaggctggcgacagcatctggtcacgcccggctattcgtgtcttcgcaacctacgccaagtgggatgagaaatggngttacgactacaccggtaacgctgataacaacgcgaacttcggcaaagccgttcctgctgatttcaacggcggcagcttcgggtcgtggcgacagcgacgagtggaccttcggtgcccagatggaaatctggggcttatctcgggcatccggtacgctggttacccgggcctggagatacaaaactacgccgacgcgtcactgtttgctgatgaatcattacgctggcgaagcagctatgaggtggaaaaactacctgaagagcacacaaaaagttcaactgcagaactttgccaactggccgaaatactctctctccaccctatttcactttcccttctcgaaaagttgttaaacagcacacggggcaatacacagccggataatcagcttgcggcgttgttatgcgcgcgtataaatggcagtcctgcttgttttgccacctgtatggattcatcaaatgaatataaaaaaatcagcacccttatgcgcaagggcgaaaatgaaattaaccaatgggctgaccgtcattctgttgagcgcgctaccgttcaggcgatacaatggctgacccgagcacccgatcgctttagcgccgcccagttcagccctttactcgaacacgaaaaatcatcaacgcagattattaatctgctggtatggagcgggctgtgtggctggataaatcgcttaaaaatcgcgttgggtgagacatattaaccttgccgcgtcagacagattcgcgtaaaactgtcagccgctctaatggccaccaaaatagacaattatgtttcaggacaacccgctgctagcgcagcttaaacagcatctgcattcccagacgccacgcgctgaaggggtggtaaaagccacagaaaaaggctttggcttcctggaagtcgacgcgcaaaaaagttatttcattccgccgccgcatatgaaaaaagtcatgcatggcgaccgaattatcgcggtaatccccggtgttcgagttcaatttcttaaaagtt

SEQ ID NO: 132452 - DNA, 668 bp, Homo sapiens
gcgataacctggtgcgccaggtgcagcattcacagctggagctggtcgccaactttgccgatatctcgctacgcctgtcgcagattttaaaactgaaccccggcgacgtcctgccgatagaaaaacccgatcgcatcatcgcccatgttgacggcgtcccggtgctgaccagtcagtatggcaccctcaacggtcagtatgcgttacggatagaacatttgattaacccgattttaaattctctgaacgaggaacagcccaaatgagtgacatgaataatccggccgatgacaacaacggcgcaatggacgatctgtgggctgaagcgttgagcgaacaaaaatcaaccagcagcaaaagcgctgccgagacggtgttccagcaatttggcggtggtgatgtcagcggaacgttgcaggatatcgacctgattatggatattccggtcaagctgaccgtcgagctgggccgtacgcggatgaccatcaaagagctgttgcgtctgacgcaagggtccgtcgtggcgctggacggtctggcgggcgaaccactggatattctgatcaacggttatttaatgccccagggcgaagtggtggtcgttgccgataaatatggcgtgcggatcaccgatatcattactccgtctgagcgaatgcgccgcctga

SEQ ID NO: 132453 - DNA, 3189 bp, Homo sapiens
atgcgtccagcaggccgtagcaataatcaggtgcgtcccgttaccctgactcgtaactatacaaaacatgcagaaggctcggtgctggtcgaatttggcgataccaaagtgttgtgtaccgcctctattgaagaaggcgtgccgcgcttcctgaaaggtcagggccagggctggatcaccgcagagtacggcatgctgccacgttctacccacacccgtaacgctcgtgaagcggcgaaaggtaagcagggtggacgcacaatggaaatccagcgtctgatcgcccgtgctcttcgcgcggcagtagatttgaaagcgctgggtgagttcaccattacgctggactgcgacgtgcttcaggctgatggtggcacgcgtaccgcgtcgattacgggtgcctgcgtggcgctggtagatgcgctacagaagctggtggaaaacggcaagctgaaaacctatccgatgaaaggctccaaaacaagggtatcgaagccttgcaaacataatacttttcatcgcaaaggaaaaagggttgaccaaaagcagtgtcagcaatacgaaaatgaacttacgcatttaccagtgcactccaatggtgagaaacgcgttgttgcgctctccgttacgttgattaatcgccttaaaggtatgttgatactcgacgccgagactgactttgtgcggccaggcgtcgtagtgcgtctcgccggtccagatattccagcggaccccgactccgccaagctgcgcgccctgagtgcctttatcacgatagccgttgtcctgaacgtgagcgtaaggctcaatagtctgtccgttagctaccttctgatgccagctgacgcgataatctgccgtccacgcctgaatatcctggcggatatattgcgccgcatcgagacctcactagcaatttggtaccggctccaaaaatgtccttgtgaaaatccctcttcccctttggcgcggaaaagcactgcctttctacccttaagaatcggcaaagttgtgatcgaaaaattgcgtaatatcgccatcatcgcgcacgtagaccatggtaaaaccaccctggtagacaagctgctccaacaatccggtacgttcgactctcgtgccgaaacccaagagcgcgtgatggactccaacgatttggagaaagagcgtgggattaccatcctcgcgaaaaacaccgctatcaaatggaatgattaccgtatcaacatcgttgataccccggggcacgccgacttcggtggtgaagttgaacgtgtaatgtccatggtagactcagtgctgctggtggttgacgcatttgacggcccgatgccgcaaacgcgcttcgtattcgatctgttcgttaacctcgacgcgaccgacgagcagctggacttcccgatcgtttacgcttctgcgctgaacggtatcgcgggtctggaccccgaagatatggcggaagacactgaccccgctgtccaggcgattgttgaccacgttcctgcgccggacgttgaccttgacggtccgttccagatgcagatttctcagctcgattacaacagctatgttggcgttatcggcattggccgcatcaagcgcggtaaagtgaagccgaaccagcaggtcctatcatcgatgcgaagcaaaccgcaacgcgaaagtcgtgaaattaccaatatcaccacctcgccgaacgacattgtggttaacacgccgttccatgtggagattggcaacctgaccggcgaatttaatatctgcctgccattcagcatgatcgagccgctacgggaattgttggttaacccgccgctggaaaactcgcgtaatgaagatcagaactggcgcgataacctggtgcgccaggtgcagcattcacagctggagctggtcgccaactttgccgatatctcgctacgcctgtcgcagattttaaaactgaaccccggcgacgtcctgccgatagaaaaacccgatcgcatcatcgcccatgttgacggcgtcccggtgctgaccagtcagtatggcaccctcaacggaacagcccaaatgagtgacatgaataatccggccgatgacaacaacggcgcaatggacgatctgtgggctgaagcgttgagcgaacaaaaatcaaccagcagcaaaagcgctgccgagacggtgttccagcaatttggcggtggtgatcggaatgcgacgttacctgacacgctggcgacaatgacgccgcaggcttataccagtattcaatacgacgccgaaaaatcgctctggcataacgttgagaaccgtcaactggacgctcagttcttccatatgggaatgggattccgtcgccgcgttcgtatgttttctgtagatccagcaacacatctggcgcgtgaaattcactttcgcccggagttgttcaaatacaacgatgcaggtgttgatacaaaacaattagaagggcaaagcgatctcggctttgccggttttcgcgtgtttaaagcccccgaactggcgcgccgtgatgtagtatcatttctcggcgcgagttatttccgcgccgttgatgatacatatcaatacggtttgtcggcccgcggcctggcgatcgacacttacaccgacagtaaagaagagttccccgactttaccgccttctggtttgatacggtaaaaccgggggcaactacctttaccgtttatgcgttgctcgatagcgccagcattactggtgcctataagttcactatccattgtgagaaaagtcaggtgattatggatgtggaaaatcacctgtatgcgcgcaaagacattaaacagctggggttatatcgacaaagctctggtcaccgatccgcaccagcgctaccgaaaattacagtgttggttgggcacgactccaacattgcctctctgttaacggcgctggatttcaaaccgtatcagttgcatgaccagaacgaacgcacgccgattggcggcaaaatcgttttccagcgttggcatgacagcaaagccaatcgcgatttgatgaaaattgaatatgtgtatcagagtgcggaacagttacgtaatgccgatgcgttaaccctgcaggcacctgcgcagcgtgtgacgctggaattaagcggttgcccgatagacgctgatggtttctgcccgatggataagtttgatagcgtgttgaatgaagcggtgaaataa

SEQ ID NO: 132454 - DNA, 1283 bp, Homo sapiens
ttaaccgaagaacccctgctcgcggatttcgcctacatagtgcggcgcggtttcaaacgcggttttgccggcctcttcacgccaggtcaccagtttcttatcatcgttggcccagtccgccatcataccggaagagaattcgccggagatgatgtcgtccatatgtttctggaacaggggtgccatgatctctttcagctgttcagaaagcgcataagcacgcagtttcgccgggttagagagacggtccatcatcagggtgatgccgccctgtttcagtgcttcggtgatggtttcccaaccgaactgaatcagtttttctgcgtatgctgaatcggtaccttcttccaccagcttgtcgaagcacagcagagagccagcctgcaacataccgcacaggatggtttgctcgcccatcaggtcagatttcacttccgcaacgaaggacgattccagcacacccgcacggtgaccaccggttgcagccgcccaggctttggcaatcgccatgccttcgcctttcggatcgttttccgggtgaacggcaatcagcgtcggtacgccgaacccacgtttgtactcttcacgcacttcggtgcctgggcatttcggcgcaaccatcactacggtgatatctttacggatctgctcgcccacttcgacgatgttgaaaccgtgcgagtagcccagcgccgcgccgtctttcatcagtggctgtacggtgcgcactacatcagagtgctgcttgtccggcgtcaggttaatcaccagatccgcctgtgggatcagttcttcgtaagtacccactttaaaaccattttcggtcgctttacgccaggactcgcgcttgtgggcaatcgcttctttctcgcaaagcgccggatatcttgcagttttggaccagaccggcgctttgccttcgcgcagtttgttgagcaccatttcgtcgtccggcgtccagcgggtgccttcaacgacaaaaatcaccagctcaacatcgccaatagagctgctcgccgctttgttcatcaggcggttaatggcgcgtttttcttccatatgcaggcccggtgtatcgacgtagatcgcctgatacgcgccttcagtatggatccccacaatgcggtgacgagttgtctgcgccttgcgggaagtgatggagattttctgccccagcagtttgttcaacaatgtggatttgccaacgttcggacgtccgacgatggcaataaatccgcagtaacttttatcgatgctcattccagctccagttttttcaacgc

SEQ ID NO: 132455 - DNA, 1440 bp, Homo sapiens
atgactgggccgagcaaacgcatcctgtgcggtatgttgcaggctggctctctgctgtgcttcgacaagctggtggaagaagataccacaggtttctggcatgacgattttaataacgccacgccgaacgatatttgcgtggcaattcgtagcgaagcggcggatgcggggatcgcgcaggcgattatgcagcagcttgaagaggcgctaaaacaactggcgcaggggtcaggcagcagccaggcgttgacgcagagagtaaagagagtatctgagtgtcggaaaataggctccattccttctggaatatttcgagggtatattactaaacaatctttatgtatagcactgggtggaagccttatgcaggcccagcagcacgctatccataaaagtaccgttcccgaacaacccaggccatttgcaccggtaaacatgatcgccagccaaacatccgaaccagttaaaaaaagatgcgccaccctgccggcattcacgaacgagtatgaagcatggatcaccaagcagatgcaaaaagacaatgcatttttagatcacgcagacgtccgggaaagtacccacgaccaagctaatgatgttgacaagtaccttaataatatcaatggactgctaaccagtttctgcggagcggatgccccacagctgcgttttgaagtcggcaccaaaccggtgacgcaaacgccacaagcggcagtgacgagcaacgtcgcggcccctgcacaggtggcgcaaacgcagccgcaacgtgctgcgccttctacgcgctcaggttgggataacgtcccggccccggcagaaccgacctatcgttctaacgtaaacgtcaaacacacgtttgataacttcgttgaaggtaaatctaaccaactggcgcgcgcggcggctcgccaggtggcggataaccctggcggtgcctataacccgttgttcctttatggcggcacgggtctgggtaaaactcacctgctgcatgcggtgggtaacggcattatggcgcgcaagccgaatgccaaagtggtttatatgcactccgagcgctttgttcaggacatggttaaagccctgcaaaacaacgcgatcgaagagtttaaacgctactaccgttccgtagatgcactgctgatcgacgatattcagttttttgctaataaagaacgatctcaggaagagtttttccacaccttcaacgccctgctggaaggtaatcaacagatcattctcacctcggatcgctatccgaaagagatcaacggcgttgaggatcgtttgaaatcccgcttcggttggggactgactgtggcgatcgaaccgtcagagctggaaacccgtgtggcgatcctgatgaaaaaggccgacgaaaacgacattcgtttgccgggcgaagtggcgttctttatcggcaagcgtctacgatactga

SEQ ID NO: 132456 - DNA, 728 bp, Homo sapiens
attttgttccttgaaaaaagcttttgtttctttaactgctttaaagtgctgtttgaaaaaaaatgaaggccaagcgggatgagtgcaccgtgcggtcgggcaatcgcaggatgaaaatgaagataatgaagacgttggcgtaagaaaagtccatcgttttcgcggtaccggtttgcgcctgcccggttacgtcacgacccgccagcgtcagcggaagggccagtgcctgaatgggcgtacagttatgaaacccttttttttcaagggcttctacaaccttcggatgcagggcgaagtcggaaaacttctgttctgttaaatgtgttttgctcatagtgtggtagaatatcagcttactattgctttacgaaagcgtatccggtgaaataaagtcaacctttagttggttaatgttacaccaacaacgaaaccaacacgccaggcttattcctgtggagttatatatgagcgataaaattattcacctgactgacgacagttttgacacggaagtactcaaagcggacggggcgatcctcgtcgatttctgggcagagtggtgcggtccgtgcaaaatgatcgccccgattctggatgaaatcgctgacgaatatcagggcaaactgaccgttgcaaaactgaacatcgatcaaaaccctggcactgcgccgaaatatggcatccgtggtatcccgactctgctgctccacaaaatatgcataggctag

SEQ ID NO: 132457 - DNA, 1043 bp, Homo sapiens
gccaaaatcaaacaaacccaataccctgcaaatcgcgctgcaaacgcgtatcaagttgttctggcgaccaaaggcgctggaaaaggtcagtatgaaaagtccgtggcagcacaaggtgacgctcacccgcagcggtcaggcatttaccgtcaataacccaacgccgtactacgtgattatcagcaacgccagtgcgcagaaaaacggtaatccagctgcagggttctcgcctctggtcattgagccgaaaaccacggtaccgctgaatgtgaaaatggatagcgtaccggtgctgacttacgtcaacgactttggcgcacggatgccgctgttcttccagtgcaatggcaacagctgccaggtggatgaagagcagagccgcaaaggctgatgacggggggagttatgagtcaaaagtttgtagtgggcgcagggctgctggtatgcagtgtctgtagtttttctgatagggctggtagtaaccccgtggatttaattctgcgcgtgttggtcgatgctccgccaccctgttcaatcaagggcagccaggtagagttcggcaatatgattgctgataacgttgatggcaccaattatcggcaagatgcgaaatacacgttgaactgcacaaacagtcttgctaacgacttgcggatgcaacttaagggcaatacctcaacgattaacggcgaaacggtactcagtaccaatatcaccgggctgggcattcggatagaaaatagcgccgataactcattgtttgccgtcggtgaaaatagctggacgccatttaatatcaataaccagccacagttgaaggctgtacctgtgaaggcaagcggggcgcaacttgctgcgggcgagtttaacgccagtttgaccatggtggtggactatcaatgagaaagactttcttaaccctgctttgtgtcagtagcgccatagctcatgctgctgatgaagacatcacctttcacgggacattattgtcaccgccaacctgtagcatcagcggtggtaaaaccattgaagtcgaatttcgc

SEQ ID NO: 132458 - DNA, 2178 bp, Homo sapiens
atggtgcttgatgatgaagaccgtgaaaacgaaggtgatatgatcttcccggcagaaaccatgactgttgagcagatggcgctgaccattcgccacggtagcggtattgtttgcctgtgcattactgaagatcgccgtaaacaactcgatctgccaatgatggtagaaaataacaccagcgcctatggcaccggttttaccgtgaccattgaagcagctgaaggtgtgactaccggtgtttctgccgctgatttcccgccagccaatttggtggtgtcaacgtcgccgggcaatgtcaactttctgcgtccactgattaagttgctggcgatgctgagtaatggctttttccagcgtctggataaactgctgatagttgatccagcggttgctggttatcccggcactcatatcgctgttgaggttattgcgatattcattctgataatcaatcagcattttgagctgttcttccgcctgctgacatccgcgacgcatttcacccagcaggcgcgcggcatcctctacctctttttctgccagatctttcaggccctccagctgcggccacagggcgatggctttatcgagcatcggatcgctgcctttggcatacgcgccgacgctaaccagatcgcggttacgctgaaaactcgacaacagctgtttgaaggtgcgcactcgcgcgtaatgttgctcactgatcgggtaccgagcaagattcgaatcattaagccccttacttgtaggagccaggatcttattcgtaacgaactgaacgaagcggcggaaacgctggctaactttttaaaagatgacgccaatattcacgccattcagcgcgcggcggtcctgttagcagacagctttaaagcgggtggcaaagtgctttcctgcggcaacggcggttcccattgcgacgctatgcactttgccgaagagttgaccggtcgctaccgtgaaaaccgtccgggctacccggcgattgctatttctgacgttagtcatatttcctgcgtcggtaatgatttcggtttcaatgatattttctcccgctacgttgaagcggtaggtcgcgaaggcgatgtactgctggggatctccacctccgatgcgaaatacacgttgaactgcacaaacagtcttgctaacgacttgcggatgcaacttaagggcaatacctcaacgattaacggcgaaacggtactcagtaccaatatcaccgggctgggcattcggatagaaaatagcgccgataactcattcgccatagctcatgctgctgatgaagacatcacctttcacgggacattattgtcaccgccaacctgtagcatcagcggtggtaaaaccattgaagtcgaatttcgcgatctcattatcgacgacatcaacggcaactatggtcgtaaagaggtgccatatgaactcacttgtgactcgacgacccgtcatccagattgggagatgaccctcacctggactggtacacgaaccagttttaatgatgcagcaattgaaactgatgtacccggttttggtatcgagcttcagcacgatggtcagcgttttaaactcaatactccgcttgctatcaacgccactgattttacgcaaaagccgaagctggaggccgtaccgtccggtggttacgtcctgttagcggggctgatattggcaatgagtagcacgttattcgcggcagataataatctgcatttctccggtaatttattaagtaaatcctgtgcgctggtggtggatggccaatatctggcagaggtgcgctttcccacggtcagtcgtcaggatttgaacgttgcaggccagtccgctcgtgtacccgtagtctttaagctgaaagattgcaaagggccggcgggatacaacgtaaaagtcacgctcacgggggtagaagacagcgaacaacccggttttctggcactggatacgtcatcaaccgctcagggagtgggaattggcatggaaaaaaccgacggaatgcagttgccatcaacaatacaaacatccggcaacagatgcctgatgcgacgctaccgcgtcttatcaggcctacaaaatccgaaccgttggacggatcaggcgtttacgctacgtccagcacaagtatttccctgtctgtttgccgacagacgcatatgctctaaccctcattga

SEQ ID NO: 132459 - DNA, 1332 bp, Homo sapiens
atggtggaagagtattccggcgttacgctggacaagagtgaatcgcgcaccgactggctggccagaccgctgaccgaacgtcagtgtgaatacgcagcggcggatgtctggtatctgttaccgatcaccgccagcagcggtcaggcatttaccgtcaataaccctacgccgtactacgtgattatcagcaacgccagtgcgcagaaaaacggtaatccagctgcagggttctcgcctctggtcattgagccgaaaaccacggtaccgctgaatgtgaaaatggatagcgtaccggtgctgacttacgtcaacgactttggcgcacggatgccgctgttcttccagtgcaatggcaacagctgccagggcagccaggtagagttcggcaatatgattgctgataacgttgatggcaccaattatcggcaagatgcgaaatacacgttgaactgcacaaacagtcttgctaacgacttgcggatgcaacttaagggcaatacctcaacgattaacggcgaaacggtactcagtaccaatatcaccgggctgggcattcggatagaaaatagcgccgataactcattgtttgccgtcggtgaaaatagctggacgccatttaatatcaataaccagccacagttgaaggctgtacctgtgaaggcaagcggggcgcaacttgctgcgggcgacgccatagctcatgctgctgatgaagacatcacctttcacgggacattattgtcaccgccaacctgtagcatcagcggtggtaaaaccattgaagtcgaatttcgcgatctcattatcgacgacatcaacggcaactatggtcgtaaagaggtgccatatgaactcacttgtgactcgacgacccgtcatccagattgggagatgaccctcacctggactggtacacaaaccagttttaatgatgcagcaattgaaactgatgtacccggttttggtatcgagcttcagcacgatggtcagcgttttaaactcaatactccgcttgctatcaacgccactgattttacgcaaaagccgaagctggaggcgtaccgtaaatcctgtgcgctggtggtggatggccaatatctggcagaggtgcgctttcccacggtcagtcgtcaggatttgaacgttgcaggccagtccgctcgtgtacccgtagtctttaagctgaaagattgcaaagggccggcgggatacaacgtaaaagtcacgctcacgggggtagaagacagcgaacaacccggttttctggcactggatacgtcatcaaccgctcagggagtgggaattggcatggaaaaaaccgacggaatgcag

SEQ ID NO: 132460 - DNA, 1569 bp, Homo sapiens
atggctgagggccaggaacaaggaagaggcagtgaggaggaggaggaggggcagagtcaggagagaaatcaatacaagcggacctacattcacgccctgactctagactgtgcctcaatccgctgctattttcagagcaacacagacccgatgtgtatactaaatcttaagcactcgattgcttgcacagcgcaggtagcctctcaaagcactgatcacctcattgcaccccagatgccatcgttcaaagcggcccacgatctccccatggggctgaacccaaccagacaccagaggcctgacgtgtggcagctgaggaggtgggagaaggaaaaaggaagaagaagaaagggtgcagagggaagaaaagaaagcatgagaaatggggagaggaaaagaaaaagggaaagagatcccagtgtcacagctatccgagattttcagattctcaggatgatgagatgcgctacctgtagtgtcactgtggccacacagaagaactcaagcatcggcatacggtgtcgacagacagatgcggagcaggcaaaggaactgtttgacaaccaagtgttggctcccgggtctttagataagtccccgctggatctgcaggtatggtctataaggctatctgtgccgagccccttagtaggccatgaccacttggtgcgggttcgggatagctcagtaatactgggactcagagggttacatcatgctgtaatgattgctacattgcctgagtctgatacaacaatgaaggtcttattaatctcttggtgtaagaacccgtggattaattcgggccttttggtcgatgctccgccacctggttcaatcaaggccagccagttagagttcgccaatatgattgctgataacgttgatggcaccaattatcggcaagatgcgaaatacacgttgaactgcacaaacagtcttgctaacgacttgcggatgcaacttaagggcaatacctcaacgattaacggcgaaacggtactcagtaccaatatcaccgggctgggcattcggatagaaaatagcgccgataactcattgtttgccgtcggtgaaaatagctggacgccatttaatatcaataaccagccacagttgaaggctgtacctgtgaaggcaagcggggcgcaacttgctgcgggcgagtttaacgccagtttgaccatgactttcttaaccctgctttgtgtcagtagcgccatagctcatgctgctgatgaagacatcacctttcacgggacattattgtcaccgccaacctgtagcatcagcggtggtaaaaccattgaagtcgaatttcgcgatctcattatcgacgacatcaacggcaactatggtcgtaaagaggtgccatatgaactcacttgtgactcgacgacccgtcatccagattgggagatgaccctcacctggactggtacacaaaccagttttaatgatgcagcaattgaaactgatgtacccggttttggtatcgagcttcagcacgatggtcagcgttttaaactcaatactccgcttgctatcaacgccactgatttgacttag

SEQ ID NO: 132461 - DNA, 921 bp, Homo sapiens
atgtcccggatagaagcggtatttttcgactgcgacggtacgctggtcgacagtgaagtcatttgctctcgcgcatatgtaacgatgtttcaggaatttggtattacgctcgatcctgaagaggtattcaaacgtttcaaaggtgtaaaactgtacgaaattatcgatattgtttccgttgacatggtgttaccgagacaggagattgcggcccatcccgacctgccacggcaagcccatcgcctgtacaacgacaaaagcgaagaacgcattcaggcccatagcgggtgccaggcaactggcaggttagcaaacagtcccatcataatactgccgaatgcagcgatcagacaggaatttggtattacgctcgatcctgaagaggtattcacgtttcaaggtgtaaaactgtacgaatatcgatattttcctgactgtgtacgtagcagaaacgaggccggcatcttggtggaacaaatcttatccaccctgttttccgtgggggagcatttctccttgaagagagcgcctttctttaaagttcccagtttgcggtcgttttacgcctttgggggtttaacaactggggtcgtgagaaggaatgggaaccacggtgtaaacacgccggcgcgaaaaatccacctgtaccactgcgaccatcgcggcctgccgctggcccttatcagcaaggaagggacaacagaatggtgcgcagaatacgatgaatggggcaacctgctgaatgaagagaacccgcatcagctgcagcagcttatccgcctgccggggcagcagtatgatgaggagtccggcctgtattacaaccgccaccgctattatgacccgctgcaggggcggtatatcactcaggatccgattgggctgaaggcggggatggaatttttatcaagtatccgttga

SEQ ID NO: 132462 - DNA, 2487 bp, Homo sapiens
atgactgatctgaaagcaagcagcctgcgtgcactgaaattgatggacctgaccaccctgaatgacgacgacaccgacgagaaagtgatcgccctgtgtcatcaggccaaaactccggtcggcaataccgccgctatctgtatctatcctcgctttatcccgattgctcgcaaaactctgaaagagcagggcaccccggaaatccgtatcgctacggtaaccaacttcccacacggtaacgacgacatcgacatcgcgctggcagaaacccgtgcggcaatcgcctacggtgctgatgaagttgacgttgtgttcccgtaccgcgcgctgatggcgggtaacgagcaggttggttttgacctggtgaagcctgtaaagagcatgcgcggcagagtctccatgtactacggtgcgcattcacattatagaattcaggaacccttgggtgccgccagacctaaaggcacatctagtgccttggcagctcccagtacttcgggtcctcgatgtgatcaccccagacatgttatggactccgaggtcctcagatcgggatttaccagcaactccgtgaaattttcggtaactttcgtctccgggttggatcattctattcgaacgtccgaagtgatcatcccgaacaaagcgtttgttaccgagcgtctgatcaactggtcgttgactgacactactacgcgtctggtgatccgtctcggcgtggcctatggctccgatctggaaaaagtgcgtaaagtgttactgaaggcggcgactgagcacccaagggtgatgcacgaaccaatgccggaagtcttctttacggcatttggtgccagcacgttggatcatgagctgcgtctgtatgtgcgtgaactgcgtgaccgtagtcgtactgtcgatgagctgaaccgtactatcgatcagctgtgccgtgaaaacgacatcaacattgcctttaaccagcttgaagtgcatctgcacaacgagaagggcgatgaggtgacggaagtaaaacgcgactacaaaggcgatgacccgacgccagcggtagggggttatatcacagccaatgtaccttttcctgtgcatttcgcgaatagccgatctgcgaatattatcgacagactcatccattacgcttgtccactgtacgtatactcgcagatgaatccgttcaggatggatcatcacccggatgtttcacgtacctatgtcgaatatctggccgataaggttgcggatcgagaagaggatgcagaggaatatctggaagcaatcatggaggctcgtgttaccgttgctggcatggggctggtgatggaggtgcaggattacttcgatggcgaggccgatagactggcgaaggcgtggctggccgagtacacaccgcaaatcaagtcgttgaaagatgagcgtaaagaggcctatcgtcaaatcgtcgaaatgagtaccgaaccgcaggatgtggatctggtcaggccggcgaacaagtttgaaatgagccagggtatacgcccccggcaccggcgatatagttggcccctgcctaattcgcccgtgtgtcctggtgcattgacccgcacgccacatgacgtttgtcgaacagattgtccactccgccgcattgtttccccgtgtggcaatgtcgacgctggaaggaatctggtgaccggtgaggagaaatcgccgtggcggcatcgtcggcctgcggtggccaaatgcaaaccagagggcccgtatacacgcggcgcgaaaattcacctgtaccactgcaccatcgcgcctgccgctgcccttatcagcacggaagggacaacagcgtggtacgcagaatacgatgaatggggtaacctgctgaatgaagagaacccgcatcagctgcagcagcttatccgcctgccggggcagcagtatgatgaggagtccggcctgtattacaaccgccaccgctattatgacccgctgcaggggcgatatatcactcaggatccgattgggctgaaagggggatggaatttttatcagtatccgttgaatccgatctcaaatatagatccattaggattagaaacactaaaatgcattaagccactgcattcaatgggcggaactggtgaaagaagcggtccagatatatgggggaatccgttctatcatcaatatctttgtgtcccagatggtaaaggggactatacttgtggtggccaagaccaacggggagaatcaaaaggagatggtctatgggggccaggtcggataaggcgttcacgccgcatccgacatttgcacaagatgcctgatgcgacgctgtccgcgtcttatcaggcctacgtgcggcatcagacaaatgtcactgctttggttcttcgctccagtcatcgctttcggaaagatcgccactgctggggattcgtttttcttcagcagcccattctccgaggtcgatcagctgacaacgtttggagcaaaatggccgaaacgggctga

SEQ ID NO: 132463 - DNA, 2919 bp, Homo sapiens; identical to SEQ ID NO: 124814

SEQ ID NO: 132464 - DNA, 2240 bp, Homo sapiens; identical to SEQ ID NO: 124813

SEQ ID NO: 132465 - DNA, 3416 bp, Homo sapiens
atggaggatttgataaaactacggaaaaatgccgttaccagtgtcaggcttatgcgcaatttgtcgccagtcaccgccgaatgctgtggcgaagggggaatcaaagcctgggattatgtccggatgggttttttaagccgaatgggcgtacttaataactggttgagcgaagaagaaagtctatggatccagtcgcgcattcatctacgcgtgctctacgttattatagtaactggcggcaatactttgccggttataccttatggtcggcaatattggcagtctcccgaagatgatcatctgcctttattacgcgaattcttagcgcgtaaagaatacgagcgattccaggcaaaaaccgatccgcagggttttaaacaacttcgtcaggcgtatgaggaggcgctacggatttgcgcagtcgcctgctaaatctgtttggcaaccagaagaatatgaggtagcagaacatgaaattctgcatcgcctatcgtgcgttacttgcctctgatagtgaacgttttctgccctccgcctggcagcgattcattcagcaattaaattattgctcgatggaggagattgatgaattacgctggtcgctgtgcacaatcgccatgaacactgcccatttatccttcgagtgcgtggtgttatttagccaggaaacggccgagacacaacgcccggatacaatcagctcagtaccagcccttcattatatattgatgacctggtggataccggtggggtacaacaagcgagatccccgtcctaccgttggggtaatctgggccttgaggacttcagaccggttcgtggacctgctgtgggactccttttgtcgtgccgggggcactttttatcccccccacgacgggacaaattctccttcccaaacgattcgcacaagagccacgggtagatttcggtggaacttacacgctggcaattgtgccggcacaacaggcgacacgaacacgagctctcccgcgagaacggtccccacgagttgttcctgtacccccctgttggtcgctgtcgccattttcgggggcgtacaccagtctagtgttccgacacactatgtgggcccgggcgtaattattgcctccgatccttgtaccaaacgggggcactgtaaccgctttgatccctactatgttcagcaaggtgtgtcagcgtgtctgccagctgaagagtatgcagaaatcgctgggatcaactggaagcgggtgacgttaacttcattaaagatttttactaccgtctggcgcatcgtgtggaacgctggaatttgggtgaagagtactggggctacgcgaaaaataaactctggtcgccgtttggctatccggttcaccatgccaatgaagcgtcagcgcaggcgggaattattgctcatcgaaagcaatggctgctcgcatggcggtagtagattgggcgctgtacgaatagaaacacgaacctcatcacttacccccgcgagttgggcgctaaaaaagttgtgcaattgcgatgtgagattgctcgccgtacttaacggactgaacagtatcgcgatgatcgccacgctacgttttattatcagcattttcgcccccagccatttctacaactggctgatggcttctgacgtggtggactacgaggagagccgcagcggtcgccgcctcgacgggctggtgttctccacctacctgttcagcctgaagattggcctggcgattggcggggcggtggtgggctggatcctggcgtacgtcaactattccgccagcagcagcgtgcagccggttgaggtgctcaccaccatcaaaattctgttctgcgtggtgccggtggtgctctacgcgggcatgttcatcatgctgtcgctctacaagctcaccgatgcccgcgtggaggccatcagccggcagctgattaagcaccgcgcggcgcagggctccgccgtcagccttggttctacgaatatgaccattttccatatacaccactcggctggcggttttacgcgccacttcaacttcgtgggtgacgatcacctgggtaatattcgtttctgccagctcacgaatgatgctgacgatttgtgccgtaatttccgggtccagtgcggcggtcggttcatcgaacagcagtacctgcggttccatcatcaacgcacgggcaatagcaacacgctgctgctgaccaccagaaagatgcagcgggtaacgatcgctataaggtttgagacgcagacgttccagcaggttttctgcacgggccagagcatgatctttaatcaacccccagtacacggcaggtcaatcgagctcggcggtttaaaagaagcggaactgaaaaccttaatactcgagcaatatcatgctgcgggtattgagccggaaagcgttgattctggtgccatcatcatcaccggtgaaagcgcgaaaacccgcaatgctcgcccggcggtgatggcgctctctcagtcgctgggcgattttgtcgttgccagcgccgggccgcacctcgaatccgtgatcgccggtcacggagccggggcacaaaccctttctgaacaacggctgtgtcgggtactgaatatcgacatcggcggtggcaccgcgaactacgccctgttcgatgccggaaaaatcagcggcactgcctgcctcaacgtcggtggtcgcctgctggaaaccgacagccacgggcgcgtggtttacgctcataaaccggggcagatgattgtggatgagtgcttcggtgcaggcaccgacgcccgttcgctgaccggcgcgcagctggtgcaggtgttacgcccgaaatcattacgctttctggcggcgtgggcgaatgttatcgccaccaggccggcgaaccgttctgtttgccgatattgggccgctgctggcactgggctggatgacattcgggcctggttaaatgacgtcagctccgagcaaacggtgcccccgcgaattggcgggggcaatcctttagcacggacgacaatggctaaggacacgtcagccaaatgcggggaacccatgtaccgctttggcgcgaggcgctcagtagacaagcacgccagcaatccctttcgaggtcaccatcagcgtcagcaccagaatgatttcctgccagatggacaggtcaatgccatacaactgcgcgatgaagatagcggcaatactttgatacagcgtcgaaccatcaagaattgtattcgtgtgcgtaatattgaaacaaaactcgtcactggaaaagtaggtactcaacacacacaactgcttggtaatacgcttactggaagcactgccgccaaaggcgttggcgtactccttgcaggtttagcaaccagtaacaatccgctaatgacattaaaacctaatgataacgaattcttcccgtctaagtgttaa

SEQ ID NO: 132466 - DNA, 2121 bp, Homo sapiens
  misc_feature (1)...(2121): n = a,t,c or g
atggtcgcagtggtacaggcgaatttttcgcgccggtgtgtataccgggtccatctggctttgcatctgcgccaccgccaggccggacgatgccagccagcggcgggtttcctcactcacccggtcagccaggatttcactttccagccggtcgagcatctgcaccagcaccggcgggaacaccacactgccaccgtcttcgccaccggactgctgaagggtatccgccaggctgcggcgctgcgttttcgccagctcaccggtggcggtttcaaccctgatgagtggcgtgaagctccccggctgataaatcgcctggatgcgggttctgtcgttctgtatcggggacaggcgggcgccgtcccagcccgacatccagcccgtgaggtcccgttcacgccgtcatacccgttttgccaccctgcggaccaacgggtcgtaaagatagcgactttcgaccagcggctctgcatattgggtccgcgtgtagtgcaccaaacggtgctgactgtcgtaatggtacccgtgggtgcgctcatcatccgtgcggataaccccttccgggatgagggtataaacggggttaggtcatataggccgagattgcccttttttcccgacgaattcgagctcggtacccgtcagacggtgcattatccgcagacgaatgaactgctctggcagcatgagaccagacatgcgtacaacgcacagggactggcgaaccgctgtataccggacagcctgcccgccgtggaatggctgacctacggcagcggctggctggcaggcatgaaactcgccgacacaccggtggtggagtacacccgcgaccgcctgtaccgggaaacgctgcgcagcttcggccgctatgaactcaccaccgcttatacccctgccgggcagatacagagccagcacctgaacagtctgctgtctgaccgcgagtacacctggaacgacaacggcgaactcatccgcatcagccgcccgcgccagacccggagttacaggtacagtaccaccggcaggctgaccggcgttcacaccaccgcagggaatatggatatccggatcccgaataccacagacccggcaggtaaccgtctgctcgacccggagctgcacccggacagcgccctcagcatagggccggataaccatatcgcnccttgacgcgcactatctttaccggtatgaccgtcacggcaggctgacaaagaaaaccgacctcatcccggaaggggttatcccgcacggatgatgagcggactcaccggtaccattacgacagtcagcaccggctggtgcactacacgcggacacaatatgaagagccgctggtcgaaagtcgctatctttacgacccgctggggccgcagggtggcaaaacgggtgtggcggcgtgaacgggacctgacgggctggatgtcgctgtcacggaaaccgcaagtgacctggtacggctgggacggcgaccggctgaccacaatacagaacgacagaacccgcatccagacgatttatcagccggggagcttcacgccactcatcagaaggatccccgtattgggcggtggcgatacgacaatggattgtttgcggacttccatccgcctcaatgccgccagcgtgacctgcgcgtatcgtcgtgatcaaatcagtatgccgggctcgcgcaaagaggtggttaatgcgcgcgaggaaggtgtcgagtttcagttcaattttcaaccgcaatatatcgcttgtgacgaagatgggcgtttaactgcggtgggcctgattcgtaccgccatgggtgagccggggccggatggtcgccgtcgtcctcctccggtagcgggttcagagtttgaattgcccgccgatgttctgattatggcctttggtttccaggcgcatgcaatgccgtggttgcagggcagcggaattaaactcgataaatggggcctgattcaaaccggtgacgtcgggtatttacctacccagacgcatctgaaaaaagtctttgctggtggtgatgcagttcatggcgcggatctggttgtcactgcaatggccgcaggaaggcaggcggcgcgcgatatgttaactctgtttgatacgaaggcatcgtga

SEQ ID NO: 132467 - DNA, 2880 bp, Homo sapiens
tgctgtgacgcctgctgaaacaggttttcccacatatcggtcaccagcgcctggtcacgcggcgacaattcaccagcaccaatggctttttccagactctggctaacggtcgtatgcaccgcctgagcggagtggtcatcaccactttccagttctgcgatggctaatgtcaggtggccacgcaaatacccactggcaaacaactcatggaacaaccccagtagtacatgatacaatcgagctcggtaccggcaatttgtctgtggcaggtaatcacttgctgtctttgtatccatccctggatactgggaatcatcctgtggcgtacaagtcagatttggttttacccacttcctgcaatacagtgtgtagtcgtaagggcttaatgctctgaagaatgttttgaaaacattaggcgcactactggcctggtcaataggatatggcagtcttaattgtttcgctatgtccggcaatttacttggatcgggcgtaggcggtttgttgggtctcgctccatatccgccattatttaagtgtccatattttgatgccagtcccattgaatctatatactgaaccggattcaacggatactgataaaaattccatccccccttcagcccaatcggatcctgagtgatataccgcccctgcagcgggtcataatagcggtggcggttgtaatacaggccggactcctcatcatactgctgccccggcaggcggataagctgctgcagctgatgcgggttctcttcattcagcaggttgccccattcatcgtattctgcgcaccattctgttgtcccttccttgctgataagggccagcggcaggccgcgatggtcgcagtggtacaggtggatttttcgcgccggcgtgtacaccgggtccatctggttttgcatctgctccaccgtcaggccgcacgatgccagccagcggcggctttcctcactcacccggtcagccaggatttcactttccagccggtcgagcatctgcaccagcaccggcgggaacaccacactgccaccgtcttcgccgccggactgctgaagggtatccgccaggctgcggcgctgcgttttcgccagctcaccggtggcggtttcaaccctgatgagtggcgtgaagctccccggctgataaatcgtctggatgcgggttctgtcgttctgtatcgtggtcaggcggtcgccgtcccagccgtaccaggtcacttgcggtttccgtgacagcgacatccagcccgtcaggtcccgttcacgtcgccacacccgttttgccaccctgcggcccagcgggtcgtaaagatagcggctttcgaccagcggctctgcatattgtgtccgcgtgtagtgcaccagccggtgctgactgtcgtaatggtaccggtgggtgcgctcatcatccgtgcggataaccccttccgggatgaggtcggttttctccgtcagcctgccgtgacggtcataccggtaaagatagtgcgcgtcacgggcgatacggttatccggccacatgctgagggtgctgtccgggtgcagctccgggtcgggcagcgttacctgccgggtctgtggcatacggatgcggatatccagattcgctgcgtggtgtgaacgccgtcagcctgccgtgtgctgtactgtactccggtgaccggtgaccgataactcttcggtgagtctcgctctggagtgctcttcctgggccccgcatttcttcccgctgtctttgtggggaccaccttcttgaatagagctgcacggtctttccggcacatggtaatccgccaatgccgcaaccatgcagcttgctgctgctggtgactctagaggatccccgttgttgcgcccagtcagccagcgtgaggtcaatacgcgtggaaggtggttgctggcgcagcatcgcttccgcttctgcctctttgccgctttctcgcaggcggttagcggtttccagcacctgatcgctttgcagtcgattaaccagctcctgaatattgctgttccactgcgcacgcggcaggctattgatatgcgccagcgccgctctgtcctggtcatgaccagagaggtacagcccgtaagcgtaaacctgctccgggtcgttcgacttctgctgcgccagattgcgcattaacgtatcggcctggctgcgttgtccggcctgccagagatcctgcgaaagtcggtaagtaatccatacgctgccggggtccagcgccagtcgttgccgctgaagtgctgccgcctgcgcccatttgccctggttttccagtgccacactgctccggcctaccacatcatcaacccgtgtaggccggataagacgcatttgcgtcgcatcccggcgtgatgtgcttgccaccgatcccaggcgcacgcggtcatcttcttcgcgacgcagagcgatgtacgcatcaattgcttcgtcagtgaacacgccaccggctttcaggaactcgcggtccagatccagttcgttcagtgcttcttccagagagcctgcaacctgtgggatctctttcgcttcttctggcggagtgacttcagccaactgccagcctacacgctccaggcaacggcgggtcgcatacaccggcgcaattcccatcaatgccggatctacaccaacgctggcaaatgcgcgaatgcgggccagcacgggtaaattcaacgctcgtgctttggcttcgctcatcatcattaccgcagctgcgccatcgtttatggatgatgcattacccgctgtcacagaaccgagactatcaaatgaaggatttaaacgggctaagccttctgcgctggcgtcagtgcgtggctgttcatcggtatcaacaaccaacgtctgcccgttactttgggtcat

SEQ ID NO: 132468 - DNA, 5057 bp, Homo sapiens
  misc_feature (1)...(5057): n = a,t,c or g
atgggcgtacttaataactggttgagcgaagaagaaagtctatggatccagtcgcgcattcatctacgggctctacgttattatagtaactggcggcaatactttgccggttatacctttggtcggcaatattggcagtctcccgaagatgatcatctgcctttattacgcgaattcttagcgcgatatgagcgacctatgaaaaattgctggaagatcctcgatatagaggaaacgactgacgtcgatattatccgccgcgcttatctggcgctgttaccgtcctttcatccagaaaccgatccgcaggattttaaacaacttcgtcaggcgtatgaggaggcgctacaggattgcgcaagcgcctgctaaatctgtttggcaaccagaagaatatgaggaagcagaacatgaaattctgctcgcctttcgtgcgttacttgcctctgatagtgaacgatttctgccctccgcctggcagcgattcattcagcaattaaattattgctcgatggaggagattgacgaattacgctggtcgctgtgcacaatcgccatgaacactgcccatttatccttcgagtgcgtggtgttattagcagaaagattgcggtggttacaggaggaaaataccggggaaatagacgaagaagaactgggatcctttttatatgccattgcgaaggggaatttagttaacgttccaggccattctgcatctgcccggtgccgtgcaaaatgccaccatcgatttttaccaaatgatcggtcggatttggtcatcgcatccacaatggctgacattgtatttagcgcaacatcgcgcagtgattatccccgatgatgcaaagctgcacagaaatttactccgctggtatagcgcaggtcgcctggatatccccgaacttctggattacgcccagtcatggcgggaaactgaacctgataatgaagatgcgccttattatgaatacgcgcaacgcgtctattgtggagaaggcgaaagcctgttggcagaactttgtgactactggcgcgagtatccctccacccaggcggatgctttaatgttgcaatggtgccgtcagcatcgggtcgattattacccattatctggtggcaaacgggtgtggcggcgtgaacgggacctgacgggctggatgtcgctgtcacggaaaccgcaagtgacctggtacggctgggacggcgaccggctgaccacgatacagaacgacaggagccgcatccagacgatttatcacgacggggacgccttacacgacccnaacgacacagacacgacacctgcgctggactgccacttcagacagatcccggctggcgaagacggtggcagtgtggtgttcccgccggtgctggtgcagatgctcgaccggctggaaagtgaaatcctggctgaccgggtgagtgaggaaagccgccgctggctggcatcgtgcggcctgacggtggcgcagatgcaaagccagatggacccggtatacacgccggcgcgaaaaattcacctgtaccactgcgaccatcgcggcctgccgctggcccttatcagcacggaagggacaacagcgtggtacgcagaatacgatgaatggggtaacctgctgaatgaagagaacccgcatcagctgcagcagcttatccgcctgccggggcagcagtatgatgaggagtccggcctgtattacaaccgccaccgctattatgacccgctgcaggggcgatatatcactcaggatccgattgggctgaaagggggatggaatttttatcagtatccgttgaatccgatctcaaatatagatccattaggattagaaacactaaaatgcattaagccactgcattcaatgggcggaactggtgaaagaagcggtccagatatatgggggaatccgttctatcatcaatatctttgtgtcccagactggtacaaggggacttatatcttgttgcgtttgcggccaaaaggaaaccaaacgggggggaagaaattcaaaaagggagatactactgaccatcgaccagaagaccctagtgctgtggtcctatgtgtcagggagcggatactgctgttgggaagacgtctccacatccccctggcacagcagctggtcggcgtcaaaagcggctttttgcagattatccaggtcacggcgacggcgatccggcatgtggcactcaatgcggattttcacaggcatagccaggccgatatccagcattgcgtttttaatgattcgggcgacgttatcgcgacggttgttgcagaatatgcaaggatgttgtttttcgttaacggagctgccatgaatctgcctgtaaaaatccgccgtgactggcactactatgcgttcgccattggccttatattcattcttaatggcgtggtggggttactgggatttgaagcaaaaggttggcagacctatgccgtcatcgtgcccctggagtttgtaaccgaagggcctttggaaatgtaccgagcggaggttgagatcgtagatgtgaatgatcacgccccccgatttccgcggcagcagttggacttggaaatcggggaagcagctccgccaggacagcgtttccccttggaaaaggctcaggatgcagatgttgggagcaattccattagcagctacagactaagctccaatgagcactttgccctggatgtcaagaagcgcagcgacggcagcctggtcccagagcttcttctggagaagcccttggatcgtgagaagcaatccgactaccgcctggtgctgactgctgtagatggagggaacccccctagatctggaaccgcagagctccgggtgtcagtgctggatgtgaatgacaacgccccagccttccagcaatccagttacaggatcagcgtgttggagagcgcgccagcgggcatggtgctcatccagctcaatgcctctgacccagacctgggacctagtggtaacgtcaccttttcttttagtggtcacacccctgaccgtgtgagaaacctctttagccttcatcccactactggaaagcttacccttcaggggcctctagactttgagagtgagaattattacgaatttgatgtaagggctcgtgatgggggttctccagctatggagcaacactgcagccttagggtggatcttctagatgtgaacgacaacgccccccatatcacagtgacctctgagcttggaactctaccagagagtgcagaacctggcactgtggtagcactaatcagtgtgcaggaccctgactcggggtcaaatggggatgtgagcctacggattcccgaccacttaccatttgccctcaagtctggcttcaggaaccagttctccctcgtgacagcaggacccttggaccgagagggccagatccagttacgacctcatggaggtcgctacagtgtcgtcctgacaaacacgccccagggacgtgtggtcctgcagcctctgccacatctggctaagcgcatcccaccccttacgccaacggctacgctcctatttgaccgagggggtgtacactccaaccccactggggactggcccctagacggtatcacagacggattgtctcgctctcatcttnntgtttataactcccgcgagccgcgcgacatgacagccagagacaggacagcagacacgcgacacacagtacaggcaaatgcgcctgccttcaatcagtctttgtatcgggcgcgcgtccgggaggatgcacccccaggcacgcgcgtcgcccaggttcttgcaactgacctggatgagggcctcaacggagaaatcgtttactccttcggcagccacaatcgtgctggggtgcgggaactattcgctttagacctcgtaaccggggtgctgacaatcaagggtcgcctggacttcgaagacaccaaactccatgagatttacatccaggccaaagacaaaggtgccaatcccgaaggagcgcattgcaaagtacttgtagaggttgtagacgtaaatgacaatgccccggaaatcacagtcacctctgtatacagccctgtccctgaggatgctcctctggggactgtcattgctttgctcagtgtgactgatctggatgctggagagaacgggttggtgacctgcgaggttccacccggtctcccctttagcctgacttcttccctcaagaattacttcactttgaaaaccagtgcagccctggatcgtgagaccatgccagaatacaatctcagcatcacagctcgagactcgggaatcccctctctctcagctcttacaacagtgaaggtccaagtgtccgacatcaacgacaatcctcctcagtcgtcccaatcctcctacgacgtttatgttgaggaaaataacctacccggcgttcctatattaaacctaagtgtctgggaccccgacgccccgcccaatgcccgcctttccttctttctcttggaaccaggagcggaaactgggctcgtgagtcgctatttcacaataaatcgtgacaatggagtcttgactaccttagtacccctggactatgaggatcagagagagttccaactaacagctcatataaacgacggagccaccaacatcagcgtgaacgtatttgtcactgactgcaatgacaaggcccccaaggtcctgtatcccgggctgggcagagtccggggggatgtgctcgaggtcagtgcgggcacgtggtccccgcgggtagctggacccaatctgggccagctgggtccaaaagcttgggagcccacaaagtgttgcgggggatcacgggtacatatagcagcaaagagaaataacgcgaatacacagtctaaggacattttacacaccctggtaatagatacaaggactattatccagaaacacctctttgttcgtcgggattatggacatatgctgagccacatgagtgcctggtgcccatggagttcagaagatgacaatggatccctggaactggagataaggatagttgtgagctctgttgaggaccgtcggatgtggaggcaggagatctga

SEQ ID NO: 132469 - DNA, 271 bp, Homo sapiens
ttccggatggctattgagcagcaaggcaacgttagtttgcggtccggtagacacaatggtgacaggttccgcactttcacgcagcgttttcgccatcagctctaccgccgtacagttttgcggtgcgaatgtcggttccgatcacccgattcgccactttacggcaaagcccatttcgtgggtcaccaccatcatggtcattccttcgttcgccagttccaccatcacgtccagtactcgttgatcatctccggatccagcgccgatgtcg

SEQ ID NO: 132470 - DNA, 591 bp, Homo sapiens
gccccggaggcccagctggccgtccgcccgtgcggacacccgggagccaacactgacccgaagacagcatcacccgcaaagggcttcgggaggagcaaagagtccgccatatctatcgtccatgccgctgcaccagatgaaatcaccaccgcctggccggtgaatgtcgggccactaaacccgcacctttacacgcctaaccagatgttcgcccagagcatggtttatgaaccattggtgaaatatcaggcagacggttcggtgatcccgtggctggcaaaaagctggactcattcaatcacttccaacatgatgtacaagccgactcaggaagtgacggatggctgtggtttctccatcggtcaccagcagcagtttgcatcatggattgcctataaagtcgcgccgttcctcggcaaaaaagaggagagcgttgaagacctcaaattgattatgggtggcgctatggggctgggtaactggacgcctgcggctgaatttaatatttacgttgacccggaagcggcagaaattgtcttccagtcagggatcccggtggtgatggccggtctggatgttactcacgagtag

SEQ ID NO: 132471 - DNA, 2469 bp, Homo sapiens
ctaaataacccccagacggcggaaaatcggcccggcaggccagaaattcaggttgatcccggcggcgatatgcggcggcaccagcccctggtgatacagcacgtaagaaagcagcaggtagtccatgtgactgcggtggcaaggcacatataccagctcatgaccgtcgtgggccagctggcgaacgcgctcagcgttatggacgttgatgccctggtaaagtcggttccaggtgaagcccagaatacggtcagtcaggcgaatcatctcgtaagagaaattcgccgcaatctcttccatcagtgcaatcgcgttctgctgcgctttttcatgggagatttttttgctgcgcgcttcatcttctaccgctttggcaatggcgcgggaggcgagcagcttattaaacagatcctgacgagcaggcaaacgtgggcctacggcagccagacgttgacgggcaaagtgcatacgcgccacgcgcgccagtttctgagcgatagttttatccgtgccgtgttcatccgccatacggcgcagcgaaactgacggcgagaaacgcacaaaactgtcgcgaccgagccacagtacagcgaaaaatttctgtacgccgttaagcatacgcagcggcgggttcacttcgcctttttcacgccccggcgcgcgaccaaacatcaccgacactggcaccatctgcacatccagatttgggttgctacggtgcaaatcgagatagtcgtggaacagcttaatagactcttctttcggcgtgtaataggtgaacacacgcggcccgccgtgaatgaacacatagcgcggcagtagcgtgccgtcgatttccagcggctctaacgggtcaggcaagtcatgtgccagacactgggcgcgcaacgtcagcaaatatgcatatgcgccgatgctgacaccagggtcgcactttgcgcaaccagtcgcgatcgtgcccgcatcaaggcaaagttgttgtttaatcgccggattaacaaaaatgcgcgtgacgtctttgtcctgggcggcgagtttgatcaagctgaaaatttctggcttccacagcgtggagacaacgtgtttaccgtcgcgggaaactaagtccagtgcttgcgggcgcaagagctgcgcggaggtccagcgagttttcggcagttgcagaaagatatcgacatccagtccggtctggtggctggcatgaccgccgttgaaacgcccaccagcgggcatccccatatcgccaatcagcaccgtacccatgcccagattgctcacctggctactcagacgctggataaacatcaccagatccgggtgaccgaaatagcgacgctgatcggtacgcatgacctgataatgttcggactgtatcggcagcgtgtcagcgccgacaatacagccattagaaaaactgcctatcgattgtgcgcagcgtggaatatcagtcttcacatcggcattttgcgcccgttgccgtaacaggtgatccattaaaacgatcgccagcatcgcttctgcgatcggcactgcgcggatcccgacacagggatcgtgacggcctttggtgatcatctcaacttcttcgccaaagcggttaatggtacgacccggcacgtcaatgctggaggtcggtttcagcgccatatgggcaatgatttgctgcccgctgctgataccgccgagaatgccgcccgcatggttgctctggaaaccgtctttggtgatttcatcgcggttctggctgccgcgcagccaccacgtcaaagccgtcgccaatttcacgctttcaccgcgttgatgctcatcagcgcatgggcatgtcagcatccaggcggtcaagagccgctcgtaagtccgcagaacgccactcgtagagtcaccaggcagtgcgcctttattgttgatggtgccgagagtgttagtcagttttacgccaaagccgagtgatttttcttttgccagtgccatcaggcgttccagcatttccagtgcttgcgtcagcttgaggtcgtgatcaaatgactcttcttttaagcctatgtaaccgaaaccgcagacatcgaggatctcacgaacacgcgcgtaccccagtaaggtcgggttaagtttcacaaaggtgttgagccctttttcttccagcatgtagcggcaaatggcttcgatttcatgcggaggacagccgtgcatggtggagagggtgacgccatgcaccatactggtggggatgcgagcgggtaaggcttgcaagctttcgcgtttttcctgcaatccgtggcgagctaaaaatgcgtcatcctggagtaatttattcagcgtatcgcgatattgagcgaatttcggatggtcagatgcgtccatcatattgtcgatgaactgttgcatcggcggttgcttaataccttcgaggttgtaaccgacgctcatattaaagatgaacgatttaccggaatcagaaggctggaacat

SEQ ID NO: 132472 - DNA, 345 bp, Homo sapiens
ctggaagagctcggagtcatcggggctgtactggttgggttcagtctctgagttctctgggcaccactgcagctccccaaagcaggtggccgagtcaaagtcgctggcatccagctgggagaggtcgagttctggaaagtcagcatagagttgctcctccccggaccctccacctggtgtaatggcagcaaaaatttcgatttcacaggcgttgcagccgccgcaatcgacgcgataaacgtaagccgagcgacggatatcctgtagcaaatgccgcttcatcttttgcgtttgctcgtccagcgtgatgggctggctgacatgttgtgtaagcactggactcat

SEQ ID NO: 132473 - DNA, 2721 bp, Homo sapiens
atggtggcgctcggctgtaaatatctacgtatttgccatctgaacaactgcgcaacgggtgtagcaactcaggatgacaaactgcgtaagaaccactatcacggcctgccattcaaggtgacgaattactttgagtttatcgcccgtgaaacccgcgagctgatggcacagcttggcgtaacacgtctggtggatctgattggtcgcaccgacctgctgaaagagctggacggtttcaccgccaaacagcagaagctggcgctgtcgaagctgctggagactgccgaaccgcatccaggtaaggcactctactgcaccgaaaacaacccgccgtttgataacggcctgctgaacgcgcagttgctgcaacaggcgaaaccgtttgtcgatgagcgccagagcaaaaccttctggttcgatattcgcaacaccgaccgttctgtcggcgcgtcgctttcaggctatatcgcccagacgcacggcgatcaggggctggcagccgatcctatcaaagcgtacttcaacggcaccgcaggccagagcttcggcgtgtggaacgcgggcggcgtggaactgtacctgaccggtgatgccaacgactatgtcggtaaaggcatggcgggcggcttaatcgccattcgtcctccggttggttccgccttccgcagccatgaagcaagcattatcggcaacacctgcctgtatgggcggaccgggtgccaatacaactgtacccgcctggattacgacagtgcgctgaatatccgcgaactgaaaaaagtcgcgctggaaaaaggttgggatgaatataagcaacgctggcacaaaccagccggttctggttcacgccatccggttgccgtgattggtgcaggtccggcgggtctggcagcaggttacttccttgccagagcgggccatccggttacgctgtttgaacgcgaagccaatgcgggcggcgtggtgaaaaatatcgttcctcagttccgtattcctgcagagttaattcagcacgatatcgattttgttgccgctcacggcgtgaaatttgagtatggctgctcacccgatttaaccattgagcagttaaaaaatcagggcttccactatgttctgattgccaccggcactgataaaaatagcggtgtgaaactggcgggcgacaaccaaaatgtctggaaatcactccccttcctgcgtgaatacaacaagggtacagcgctcaagctgggcaaacatgtggtcgttgtcggggcgggtaacaccgcaatggactgcgctcgtgcggcgttacgcgttccaggcgtagaaaaagcaacgatcgtttaccgtcgttcactacaagagatgcccgcatggcgcgaagagtatgaagaagcgttgcacgacggcgtagagttccgtttcctgaataatccggaacgtttcgatgctgatggcaccttaaccttgcgcgttatgtcgcttggcgaaccggatgagaaaggtcgtcgtcgtccggttgaaaccaatgaaacagtaacactgcttgtagacagcctgatcaccgccattggtgaacagcaggatactgaagccctgaatgcgatgggcgtgccgctggacaaaaacggctggccagacgtcgaccataatggcgaaactcgtctgactgacgtctttatgatcggcgacgtacagcgcggaccatcctccattgtcgctgctgtcggaaccgcgcgtcgggcgaccgatgccatccttagtcgggaaaatatccgttcccaccagaacgataaatactggacaacgtctatccagcgaaaggtccgagcctatgatagtggtgatggtaaagtacagacgctgggcgcggtagagcatagcccgttgtatacctcggtagatccgctgcaaagcatgagccgtgaagagaagctggatatcctgcgtcgcgtcgataaggttgcccgcgaagcggacaagcgcgtacaggaagtgactgccagcctcagtggtgtctatgaattaattttggttgcggccaccgacggcacgctagcggcggatgtccgtccgctggtgcgtctttccgtgagcgttctcgtcgaagaagatggcaaacgcgaacgcggtgccagtggcggcggcggtcgttttggttatgaattcttccttgccgatctcgacggcgaagtccgtgcggatgcatgggcaaaagaagcagtgcgtatggcgctggtcaatctttctgccgttgctgcaccagcgggcaccatgccggtagtacttggcgcaggcgattttttcgatagtgtcagctttcgtggtgtgcagctggcgtcagatgacaacatgctgccagacagcctgaaagggtttgcgcctgtggtgcgtggtatcgccaaaagcaatgcccagataacgattaagcaaaatggttacaccatttaccaaacttatgtatcgcctggtgcttttgaaattagtgatctctattccacgtcgtcgagcggtgatttgttagttgaaatcaaagaagcggacggcagcgtcaatagctacagcgtaccgttctccagtgtgccattactccagcgtcaggggcgaatcaaatacgcggtgacactggcgaaatacagaaccaatagtaatgaacagcaggagagcaaatttgcccaggccacgttgcagtggggcggaacgtggggaacgaactgtatggtggtgactatatgctga

SEQ ID NO: 132474 - DNA, 1031 bp, Homo sapiens
ccctgcatcccagtacggccatcaccatccccactttgttgcgcaactctgccagcacgcagcgtataatgccgcggcaggtatcttccttctttgaactttcgatcgactctagctcggtacccgcctgctctggaaataaatttcaccgggtcctggttataaccggcacaagctatatagccaacatttgcactgccgggagtgtaatcctgagtcgcaaatacccgcggacatctattcggaaatgcaatcggaaaataggttactgtgtcctgagacgtcagcggaacatcaattggcccccattgaataattaaaccggatggcaatttttgatatccaggaactgaagcagaaagcataaaactacccatatcaggtatctgattcgcccctgtccctacatttcttttagccgcttctcccaaaccaaggttttcgagagccttttgcaccgtgccgtccaatttgatatcgccaaacggattcttgcggcttaacagcagcgcacgaagcgcggtaagcagctggtcatgccgccccttctccaggctggcaccggaggcctccacaacgctgcaaagctcctcctgcaacatgtcaaagtagtcatcatccagatcggtggcaggcgtgccggtctgggggttaccacgggtacgggggattaccaaaggcagcacctttaagctccgcaagacgttctgaccagtcatgcgccagcgcggtgtctttcgcagtgtaatactaataaaaatacgctcagctcgttgctgccagatgatccaaccgagagtcatatcccatgccatgtattcgttatcgccgttttttgctctccgacgatctactaagtcaccgaaacgcttttccatgaataattcataggcttcgcgttcatctggctctacttccagagatacgagtgcgatttcataagcacggcgctcaatatcgtctcgaacctctaggctgctgattcgttctttgatttctttaatcagttctttattggtaaatgtggtcat

SEQ ID NO: 132475 - DNA, 1782 bp, Homo sapiens
atgattcgtgttgcttgtgtaggtataaccgtgatggatcgcatctattacgtggaagggttaccgacggagagcggtaaatacgtggcgagaaattatacggaagttggtggcgggccagcggcgacggcagcggttgcggcggcaaggctgggggcgcaggtcgattttattggtcgcgtaggtgatgacgacacgggcaacagcctgctggcagagctggaatcctggggcgttaacacccgttacaccaaacggtataaccaggcgaaatcttcgcaatccgccatcatggtggataccaaaggcgagcggataatcattaactaccccagcccggatctgctgcctgacgcagagtggttggaggaaattgatttctctcagtgggatgttgtgctggcagatgtacgctggcacgacggcgctaaaaaagccttcacctggcccgtcaggcggcgtctcatccgcgttgaactgcaggcgctgaccaccagcgacttcgagcgtattctgaccgagccgaatgcctctatcccgtgcagtacaagcctgatggcgactgaaggcgtaaatatcgagtttaccgactccggtattaaacgcatcgcggaagcggcatggcaggtgaacgaatctaccgaaaacatcggtgctcgtcgtttacacactgttctggagcgtttaatggaagagatttcctacgacgccagcgatttaagcggtcaaaatatcactattgacgcagattatatcctttctaacctcgccaatgattacggcgatgcggtaaaaggcagcgataaacctgaccgcattgggccgctacgcggcatgcaaaaaggggtcattacccagcaagagatgaaacgggcgctcattattaccgtcgtgctcatctgtctctccgggctggcactggttgcagtggcatgccatacgctggccgattttgtcggtttcctgattcttggcgggttgtcgatcatgccgctatcacctacaccgtggcaatcatccttatgtgaggatccctgcttaccaaatgtcagccagcccatcacgctggacgagcaaacgcaaaagatgaagcggcatttgctacaggatatccgtcgctcggcttacgtttatcgcgtcgattgcggcggctgcaacgcctgtgaaatcgaaatttttgctgccattacaccagtattcgacgcagaacgttttggcattaaggttgtttcatcaccgcgtcacgccgatattttgttatttactggcgcagtcacccgggcgatgcgtatgcctgcacttcgggcgtatgagtctgcccccgatcataaaatttgtgtttcctacggcgcgtgcggtgtcggcggcggtattttccacgatctctacagcgtctggggcggtagcgacaccattgtccccattgatgtttggatccccggctgcccgccaacaccggccgccaccattcacggtttcgccgtggcgctcggtttgctgcaacagaagattcacgctgtggattatcgcgatcccaccggggtgactatgcaaccgttgtggccgcagatcccgccatcacagcgtatcgccattgagcgagaagcgcggcggctggcgggctatcgtcaggggcgagaaatttgcgatcggctcctgcgccatttaagcgacgatcctacaggaaatcgggttaacacctggttgcgcgatgccgacgatccacgtctcaatagtatcgttcagcaactctttcgcgtactccgggggttacatgactga

SEQ ID NO: 132476 - DNA, 921 bp, Homo sapiens
ttgatgcctgtgcggcgctctagtaggatccctgactggttacaatttctgccgcttccgggctaatagtaaatattaaattcagccgccgtgccagttacccagccccatagcgccacccataatcacgatacgggcaattttgctatgccgttccggatgcctattgagcagcaaagcaacgttagtttgcggaccgttagacacaatggtgacaggttccgcactttcacgcagcgttttcgccatcagctctaccgccgtacagttttgcggtgcgaatgtcggttccggtaatgccgggccgtcgagaccgctttcgccgtgcacattgtccgcgataatcaactcacgcattaacggttttaccgcgcccgcctgctaccggaatatcggtgcgattaagcaaggtcagcatacgcagaacattgcgtaaggttttttctggtgtctggtttccggcggaagacgtaattgctttgacatcaagctctggtgaggcgagggcgagaactattgcgatagcgtcgtcatgacctgggtcgcaatctaacagaattggcagtgccattgttgctccttgttgtgtgcttctttgcgacaagggtaacgccaggatgtaacagatacgaggggcgaaacgataaagcgtgagatggcgcgcaattgggtatgcgcgccagagtgattaatgcaggattttcgcgaggaagtcttttgcgcggtccgatttcggatcatcgaagaaagcgtctttcggcgagtcttcgacaattttaccctcgtccataaagatcacccgattcgccactttacgggcaaagcccatttcgtgggtcaccaccatcatggtcattccttcgttcgccagttccaccatcacgtccagtacttcgttgatcatctccggatccccgggtc

SEQ ID NO: 132477 - DNA, 3657 bp, Homo sapiens
ttacgcagagaatcgccatttcctcaagccctgggagccagtgcgcggcacgatcccactggcgaggatcgtttcatcgaaagcctgtaactgatccgccgaacgaacatgaaggagaactcgatcggctcggtgataccggtccaggaacgaggtcagcgccgcggagatcataataccgcccactttcgcgcggttttctggtttagcagagtgccagatagcaattgcggcagctggcagaccgtacattttgaacaggaagccaccagacagtttacccgcagtcgggtcacccgccatataacgcggaatgtcgccgtggaaaacctgaatctcgaacagcgagtgcaggaaggtaagttccgtgaggatctgttccaccgcctgaacgttatccgcgttcatctgccgccgctgcggaacgtcgggaagatattccccgtctggcgcgccattttttacaggttgccgcgcgcgaactgggcgatgcagggcatgagcgaccagttctttaccggtgccggattcgccgttaatcagcacgctaatagaagaacgcgaaagccgaccgataatacggaacacgtcctgcatggctggcgcttcgccgatgatatcggtcgttgggccgttaagctgaacattacgcggctgctgctgttcctggtaatgactgatagcgcgctcaaccagcgccactgcttcgtcgatatcaaacggtttgggcagataatcaaacgccccttgttgataggcgctgacggcagcatccagatcggaatgtgcggtcataatgatgaccggaaggacctcttgttgtgacattgttgaaaaatggataccagctcgttgctgccagatgatccaaccgagagtcatatcccatgccatgtattcgttatcgccgttttttgctctccgacgatctactaagtcaccgaaacgcttttccatgaataattcataggcttcgcgttcatctggctctacttccagagatacgagtgcgatttcataagcacggcgctcaatatcgtctcgaacctctaggctgctgattggctggcgttctctctggtacactatcttgataaacagcatcccgcccacgaacagagcgaagtcgatgaagccggaaccctcaccgaacgcgtgttcaaaagtaaagagatgctgctgatcaatcttgtgcctgttaccgctgggaaagaacagccacctttggctcattccttcctgaagatttgcaaaaacctcctggccttccaataaggcgtcagtagctgaacaggagggacagctggttagaatcggcgtattcctgacgcacggccgcttagccgacatgaaccgctttgtgatgccggaaagcttaacatcaactttgaaggccggttgatgtttttcacggcgctttggcggtggcgctggcaacaagtgggatttagcggagctcatgaatgccccgcaggtgacaaccaccagcaggatcaccaccgctttgaggatggtcagcaggatctcaaggactcgttccgcgaggcgcaccatattgttggtgaagcggtggtggaagccattcgtcaggcaaaccgctggaagatctgccgctgactcatagaggatcccacgggtacgcgcgcatgacccgctattaactctgtcaggaagcggaatttttgagttctgcctcgagtttatcgatagccccacaaaaggtgtcatattcacgactgccaatacggctttcatcatcgccaccggatggtcagactggaaaatattacgccccatatccacaccagaagcgccctgatcgatagcctgccagcacatttccagcgcctcgcgctccggtaattttttaccgccagcaataacaatgggtaccggacatccggcaacaatccgttcaaaacctttttcgacataataggttttgataatttgcgcccccatttcagcggcgattcgagtcgcgagcgagaaagtaacgctgatcgcgcaccatatgccagtcacggccatggtcggcattcccactttcattccggcatcaaccagctgaataatatttttgatcgactgatgttcatattcgctgccgatataaacctgcgccgccacggcgcagctgttcgggcgcacgggggagctgcaggcatggcagcttggcgcctggcctcgttttccaaggtcggggctgggggaaaccagcgacaccagctcatgactttttaaatcttcatgctgctcgatcgtaaaagtcaggccgctgtcctgatacgtttcccgtacataggcaatgtcgttagcgataatcgataatacgtcgcgcaaattaccttcataacgtggataaaaacgtacggacgatgccccagttttcaacgcgatggcgacggcttcgtcaatagatgccttatctgaggcgctggtttcaatatgaatatcaaggttcagacggcgggctttatccccaaaggcagagagttctttatcgtccatattaccaagagaaaaacgctcgccatcgagaacatggattttgacgccacgtagattattttcacttgcgatatcaagtaaatcagcaggcaacactctttccagccgcatatttaaatgaaaggcataagcatgtaaataaagaggaagagtgtcgacacgttgtagaatctgtcttgcggacgtacaggtcagtacctgactaaggaactggctaaagcgtccgtatctcgtatcgttatcgagcgtccggggagacggccagctcggttcgccctctttcgacatcttccacagaacgaagtccattgggttgcgtttgtcgtcgaccacgtcaacgcgcgcgcctgcctgcagctggtcgagatcctgacgcgacagcacgccataagttggatcggtcgggacgtcgagcaccttttcttccggcaataacgtcatgccatttaccaaaccgaatattgtgatcaaacccaatgccaatagccgccgaccgggataccacgactctagagatccccggaaccggatgagtatactcatcacgcagtagtagataaagcccagcgcgataccttcggtaatcgagaaggcgaccggcatcatcacggcggtaataaacgccgaaccagattcagtaagatcctgccagttcacgcgtgccagactggaagtcatcagcacgccaacgtaaatcagcgcaccagctgcagcgtagcctggcaccatccccgccagcggcgacagaaagataaccagcaggaacagcagaccaacaaccactgccgtcagaccggtacgaccgccaaccgatacgccggaagaggactcaatataagccgtaacggaagaagtaccgataaacgaaccggtcacggaagagatactgtcgacatacagcgcctgcttcatgcgcgggaatttccccttctcatccgccagacctgctttatcggtcacgccaatcagcgtaccggaggagtcaaacaagttgaccaacatgaaagagaaaatcacccctgccagcccgaggttaaacgacccggctaaatctacatgacccacaactgtcattacgctcggcggcgcagaaacgatgccattgtagtgcacatcatgccggcatcgattacacctgccagacat

SEQ ID NO: 132478 - DNA, 708 bp, Homo sapiens; identical to SEQ ID NO: 131847

SEQ ID NO: 132479 - DNA, 2439 bp, Homo sapiens
tcgcactctagaggatccccgggaaaagccgtcgattttactctcgtcagccatgctgcctggttcggtctgccacatttttccactcctgcttttaatggtcaggcaatgatgctgattgcgcccgtggcggtgattctggtggcggaaaacttaggtcatctcaaggcagtcgccgggatgaccggacgcaatatggacccgtatatggggcgggcattcgtaggcgatggtctggcaacgatgctttccggctctgtcggcggtagcggcgtgaccacctatgctgaaaatatcggtgtgatggccgtgaccaaagtctactcgacgctggtgtttgttgctgctgccgtcatcgccatgctgttgggcttttcaccgaaatttggtgcgctgattcataccattccggccgcggttattggtggtgcatcaattgttgtgttcgggctgattgccgtcgcaggcgcaaggatatgggtacaaaaccgtgtcgatttaagccagaacgggtgtaatcctgcatacgcggagcatcatcaacatccgggttatagcgataaattgaaaactcgagtctcattttcctgtctccgcattataagtacgaatcttcggcgggaatgccgggcgcagtttcggttccatgttgacgcttcggcgcgtcatggattccgactctggcagatacagggagtggcacagccagttttcatcatcacgatccgggaagtcgaagcggctatgcgcgccacggctttcggtacggaagttggcagaaacagccgttgcatacgccgtttccatcaggttatccagttccaggcactcaacgcgctgggtgttgaactcgctggaatcgactctagagatccccgtcttaaggtgctggaggaaatgaagcgtacatttcactggggaagacagacaataagtaaacacattaaaatctggcttggcttgatgttggggagggccatgacgccgctcatgctggatgccacttctggcaagctgaccgtctgggatggtgctcatgctggcgcggcaatgggcatcctggctgtaaccgcagaccagaacagcgcggaactggcatattacaaatctggctctttccgtattgaagatgtcctctggccatctgccgtcaccgacgacaacattaaacgtaacgcgttcgccgcggacggcagcgtcaatagctacagcgtaccgttctccagtgtgccattactccagcgtcaggggcgaatcaaatacgcggtgacactggcgaaatacagaaccaatagtaatgaacagcaggagagcaaatttgcccaggccacgttgcagtggggcggaccgtggggaacgacctggtatggtggtggacaatatgctgaatattaccgtgccgccatgtttggtctgggatttaacctcggcgatttcggagcaatttcgttcgatgcgacccaggcgaagagtacgctagcagatcaaagcgaacataaaggtcagtcatatcgttttctgtatgccaaaacgctcaaccacttgggcactaactttcaattgatgggctatcgctattcgacgtcgggtttctacaccctttccgacaccatgtataaacatatggatggctacgaatttaatgacggtgatgatgaagatacgccgatgtggtcgcgttattacaatttgctttacaccaaacgtggcaaactgcagtcattaatcagtaaaacccgactgctcagcgagaatcgtcgaaaaggacgagtagttcaggcggaaacgctggaagcagcgggccatgtgctattgctaacatcattaccggaagatgaatattcagcagagcaagtggctgattgttaccgtctgcgatggcaaattgaactggcttttaagcggctcaaaagtttgctgcacctggatgctttgcgtgcaaaggaacctgaactcgcgaaagcgtggatatttgctaatctactcgccgcatttttaattgacgacataatccagccatcgctggatttcccccccagaaaggatcccctctgcgcggaaatggacgaacagtggggctatgtcggggctaaatcgcgccagcgctggctgttttacgcgtatgacagtctccggaagacggttgttgcgcacgtattcggtgaacgcactatggcgacgctggggcgtcttatgagcctgctgtcaccctttgacgtggtgatatggatgacggatggctggccgctgtatgaatcccgcctgaagggaaagctgcacgtaatcagcaagcgatatacgcagcgaattgagcggcataacctgaatctgaggcagcacctggcacggctgggacggaagtcgctgtcgttctcaaaatcggtggagctgcatgacaaagtcatcgggcattatctgaacataaaacactatcaataa

SEQ ID NO: 132480 - DNA, 3021 bp, Homo sapiens
ttattcagcgtcgcagcggtcgccagaatcgccttcacgccaggcgcggtagatgccgacggagagttccggagcaaagttagcgctggcggttatcgcaccgtcgccgcccagcagcatcgtattcagcaaatgatcatcgtaaccgcagaataccgaaaacgacgggcgtaccgacttaactgtgttgatcatcgtacgcaagtgaccaacgctgtcgatggtgtctttgatgccaacgatattctcgttttgcagagccagacgcgtcacggtttccggggttaagtcctgacccgtcagatccggaaagttgtacaggatcaccggtagggtgacgctacgggcgatctgctggtaatagtcgtcaagatttcgtggtgcgactttccagtagtaggggttgatggcgacgataccatcagcgccgtaggcttgcgcatgctgcgccagtttgaccgcttcgtcagtggaaggggaaccgacgccaatcaataccggcactcgcccgtcgacaatggttacagcttcttcggcgagtgccatgcgctgggctgtattcatttggctaaattcaccaccggtacccagataaaacagcccgtcgacccctttattaatcaggaagtcggcaacttcgcgcattgcctttttatcaagggttccgtcacgatgaaacgtgctggataccggtggaataatgccgctgaattttttcattacctcagtttccttttcgtaagtgctcattttcgtttccgcgtaatagttgccgccaaccggaacacgaccgtagcgcggattatggtactgtttcagttcgtcgatattagggtcaacaggggcccggccggtttttgccttaggggcggtgcagcttgctgctgtggtcactctagaggatcccccgaagctgggatggtcgacgtaggcgtcgcccgtgacgatgatgacgtcgcagctgtcccagccgagctgctccatctccgcccggctcatgggcaggaagggtgcggggccgaaacgcttggcccagaaggggcggtaagcggtcagggccttcggggcggcaacgggcagtgcggacataagaggtggattgtcgacggcaggcccagaaagcacaaagcccgcgcagggcgcgggctgggcgccttcggccagagtgcggaagccgccgttgttcttgatttcgctgtgatgggcgaacaggtccttgccgccgtcggcgggggtgatgaagccgaagcccttgccgtcgtcaaaccacttgacgatgccggattgcatggtgctcatgaaaatttcccaacaatcttctcgctgggcattaagaatctcggccaggacaccaaatatggttcgtccttcatcgttatgaccattattggcggcggtattgtcactccggtcatgggttttgtcagtgacgcggcgggcaacatccccactgctgaatttttcttcgcaagcagcggcttcagccatacccgcgatacaggtatcggaaatgacacactcgacggcagctccgcaggcatggcgcagtttctcggtcagctcggtaccatttctcgtttgctctgagtatatttccgggtggaaaatatggggaatactatgctgtgctacagagtcaatagctaagaccagtaatatctcttcgtgtagaaacattcctttgtcagatgtcgtgcgtttcatctctactagggttgaaacattcatgtcattgagcagtttggaaagtcttatttgtagaataccgcttctcaacccggtacgcaccagaaaatcattgatatggccatgaatggcgttggatgccgggcaaccgcccgatccttccagcacatccagactgcggttgattttctcccgctggcgtaacaattcatcttcagactgctgcgccgctggacgcgcctgttcacgcaccgataccagcccggcatccataatgccatccgccagtgcctcaattttgcgcacccgcaacgactccagcggatcgcgcggcaacatcgccggagcgacattcattaattcaatatattcagcgatgatcggcgaatcaaaccagcattcgccctcttcggtcaccagcaccggcacttttcctaacgggttaaattgcgccacgccgttgtccgcgttatagggcagttcattaataaattcgaaagttatgcccttttctaacaacagaatagaaagtttgcgtacaaacgggctggtgtagctaccgacgagtttcatgccgagtcctttgtgcgaggtcgtgctccaatgaaaagaaaactttaactctttatgcagctcggtggcgatgtaattcagccattcgatggttttatagcgggaaatactgtttaccggtgccagcaactggcggtcggggacgctgtcggcaagatactgcataatcgctacgccttccgtcagcaaagtaccgtcatccagcagcaatgcaggcacctgcccctttaattcgtacaagatgatgcgctggcgcagccgcacgtggacgtccccgcagagaccgaagtcccaggccgagaacacccggtggctgtagctggtcagagcctcggactccgccagcagtgtctgcttcagcccagacaccgagcagcttttggtactgagcctgtatatagttgaattagtaatgtgatcctccagcttgttctttggctcaggattacttcgcgatgcggctcctttttggttccatatgaactttaaagtagttttttccaattctttgaagaaagtcattggtagcttgatggggatggcattgaatctataaattaccttggccagtatggccattttcacgatattgattcttcctaaccatgagcatggaatgtacttccatttgtttgtatcctcttttatttccttgagcagtggtttgtagttctccttgaagaggtccttcacatcccttgtaagttggattcctaggtattttattctctttgaagcaattgtgaatgggagttcactcat

SEQ ID NO: 132481 - DNA, 2502 bp, Homo sapiens
tcagaactgcatcagttctgcttctttgtctgccagcgccgcttcaattttcttgattgcagcatcagtcagtttctgtacatcgtcctgagaacggcgatcgtcgtcttcgctgatctctttatctttcaacagtgctttcactttgtcgttcgcgtcacgacgcacgttacgtactgcaacacgcgcttgttctgcttcaccacgaacgattttggtcagatctttacgacgttcttccgtcagcggcggcagcggaacacggatgtcgctacccgcagagttcgggttcaggccaagatcggacgccataatcgctttttcaacggccggagacattgaacgatcaaacacgttgattttcagtgtacgggaatcttctaccgttacgcttgccagctgacgcagcggcgtcggcgtgccgtaatattccacgacaatgccatccagcaggctgggagaagcacgacccgtgcgtattttgctgatttgggttttgaacgcttctacgcatttgtccatgcgtacttcagcatcttttctgatatcgctaatcacgttacgaatccttgaaaagctgcggctggtgaattgatcctgatgctggtcgtagtagttctggatatccgcatcgctaaccggttgctgcatcgttgcggcatccagcttgatgtaactcacgcggaattgttccggcgtcatgaaattgtttttgttttgttcgtagtagctggcaatctcctgttcggtcacaggctgcttcgccgccagcgcgttaacatcgatagtcgcctcacgcaccacgtgttgttgcgcgaccagtgccgccagctcgtcggtttcacctttcagcataaaatcggtaccggcaacgccgttaatcagctgttgggtagtgagctggttacgcagcgcctgggcgtactgatcggcggtcatccccatctggttgaggataccgttatagcggctgttatcaaatttgccgtcaacctggaaggctggggtcgcgaaaatcgcctgtttaacctgctcatcgctgatacccagtttcagctcacgtgcgtactgatccagcagcgcctcgtcgatcagacgattcagcacctgttgacgcagggttttcatatagccttcgttcgctgccagctcggagtattgatcgcccagctgttgctgcatgcgattacgctcgctgttgaaggcgttctcgaattgcccacggctgatttcctggtcattcacttttgcggcgtagttattgcctccgccaatcaggtaaccacttggtacattggggatcctgtacaggggccgcgcttctcgctcaatggcgatacgctgtgatggcgggatctgcggccacaacggttgcatagtcaccccggtgggatcgcgataatccacagcgtgaatcttctgttgcagcaaaccgagcgccacggcgaaaccgtgaatggtggcggccggtgttggcgggcagccggggatccaaacatcaatggggacaatggtgtcgctaccgccccagacgctgtagagatcgtggaaaataccgccgccgacaccgcacgcgccgtaggaaacacaaattttatgatcgggggcagactcatacgcccgaagtgcaggcatacgcatcgcccgggtgactgcgccagtaaataacaaaatatcggcgtgacgcggtgatgaaacaaccttaatgccaaaacgttctgcgtcgaatactggtgtaatggcagcaaaaatttcgatttcacaggcgttgcagccgccgcaatcgacgcgataaacgtaagccgagcgacggatatcctgtagcaaatgccgcttcatcttttgcgtttgctcgtccagcgtgatgggcagcagtacatctgtatcgtcgttgatcggcgtcgcgcgttgtttgcattcccggggacctgcaggcatgatatcttcgccgccacagtccggcatacgacagatataggggaaaaaatcggcatccccgataacatatgagaaataatagatggcaaagccgttaataatgttgcgggctacattataagcaagagccatacccaagaggcatgaaagctgatcgtttttataaattagggcaacgatggctttaagtgtcagatggcttccttcagcagacggttgattgtctgacgaaaagacttcatgcacattgcgcagagtgatgatggttgaaacaataaaaaaggcgatcagtaccagagtgaacatctgaaagccaaatccccgatcgccaccgccgacataattaacaaatggtagcgtcacacctgccgtaacaaagcctgccagactggcaaaaaaacgcggataaggaaccagttgttcgcgctcacgtttatcgagcgtgatggttggaaccagcgaccagaagggaatatccataatggtgtaagtcatgccccagaggatgtaggtcacgcaaacaaagacaatctgagtagtaccttcaaacagatgcgcacccat

SEQ ID NO: 132482 - DNA, 2154 bp, Homo sapiens; identical to SEQ ID NO: 131960

SEQ ID NO: 132483 - DNA, 3273 bp, Homo sapiens; identical to SEQ ID NO: 124943

SEQ ID NO: 132484 - DNA, 1131 bp, Homo sapiens
atgaaaacatgttggcaaatcctcgaaattgaaagcacgacgcaaatagacattatccgccaggcttatcttgctcgcttaccgttgtgtcatcccgaaaccgatccgcaagggtttaaagcattacgccaggcctatgaagaggccctgcgactggcggtaaatcctgtcgaggaagcagatgatgaagaaaaagatgctgccgctgaacatgaaatactacgtgcattcaggacattactggattcagaaagtgatcgttttcagccttccgcctggcagaaatttattcagcaattaaatacctggaacatggaggatgtcgatcaattacgctggccgctgtgtgcaatcgccatagaagcgcgatatagagcccttttttgcttacgcgtggggatcatgcgccaccatgcggtagggcggctgaaagtgatcctcgtcggcattaaaatgatgatcctgttattgctgattattgccggtgtttggtcgctgcaaccggggcatatttcagtctatgcgccccccagctccggtgcgttcttctcatgtattgggataactttccttgcctatgcgggctttggcatgatggcgaacgcggcggataaagtgaaagatccgcaggtcattatgccacgggcgtttctggtggcgattggcgttaccacgttgctttatatctcgctggcactggttttgcttagcgatgtatcggcattagagttagaaaaatatgccgataccgccgtagcgcaggctgcttctccgctgctcgggcatgtgggttatgtgatcgtcgtcatcggcgctttactggcgacggcttcagccattaacgcgaacctgttcgccgtgtttaacatcatggacaacatgggcagcgaacgcgaactgccgaagctaatgaataaatccctgtggcggcagagtacgtggggcaacattattgtcgtggtgttgattatgctgatgacggcggcactgaatttaggctcactcgccagcgttgccagcgccacctttttgatttgcgactctagaggatcctggcttcagaaaacgccacgagtgtatgatcatgattattatctggttgtggttctagcttacaacgtaaaaatgtaa

SEQ ID NO: 132485 - DNA, 1275 bp, Homo sapiens
tgctgggattacaatacccgctatttaatattactgattatttttattgttaccgccgttaactacgccgatcgtgcaacgctgtctattgctggtaatgtgtggcgacctgcccgagcgcgtgaagaagatggcatcgtcctgatcgaccaggataaatgccgtggctggcgtatgtgcatcactggatgcccgtacaaaaaaatctacttcaactggaagagcggtaagtctgagaagtgcatcttctgctatccgcgtattgaagcgggtcagccgaccgtgtgctcagaaacctgtgtcggtcgtatccgttatcttggcgtgctgttgtacgatgccgacgctattgaacgtgcagccagcaccgagaacgagaaagatctttaccagcgtcagctggacgtgttcctcgatccgaacgatccgaaagtcatcgagcaggcgattaaagacggtattccgctgagcgttattgaagccgcacagcagtcgccggtttataaaatggcaatggaatggaaactggcgctgccgctgcatccggaatatcgcacactgccgatggtctggtacgtgccgcctctgtctccgattcagtctgcagcagacgcgggtgagctgggtagcaacggcattctgccagacgtcgaaagcctgcgtattccggtacagtatctggcgaatctgctgaccgccggtgataccaaaccggtactgcgcgcactgaaacgtatgctggcgatgcgtcattaccaacgtgctgaaaccgttgacggtaaagttgatacccgtgcgctggaagaggtcggtctgaccgaagcccaggcacaggagatgtaccgttatctggcgattgctaactacgaagatcgctttgtggtgccgagtagtcatcgtgaactggcacgggaagccttcccggagaaaaatggctgcggctttacctttggtgatggctgccacggttcagataccaaattcaatctgttcaacagccgtcgtatcgatgccatcgatcatcaacaagagatgtttgaggcgattgccgcgtcgaaaaatctgccaaaagaggatgcccatgcgctgggcattttcctgcgcgatttaacgacgatggatccgctcgatgcccaggcgcagtacagcgaactgttcgaccgtggccgcgccacgtcactgttgctgtttgaacatgtgcacggcgaatcccgcgaccgcggccaggcgatggtggacctgctggcgcagtacgagcagcacggcttgcagtaa

SEQ ID NO: 132486 - DNA, 883 bp, Homo sapiens
gtggccgctcaggcggtcaccgtattcgataataaatgggtctggaaaaagtgcagcatctggcagcgtaatgcaggtagcccagttcaactctcactaccagtatgatcccaagttcgagcgcggaatgtatctgtatgagcatcgtcgctgtttcaataacatcatcgactactgtaactcactttgctatcacgcatggctggtggcacataaggatgatatagagcgcaattaccggggaccactggtacaagttgttgggtggtgtgacgccattttcggcgcagaagaattagggatctcccgcgctcagtttgaccagtttttgcgcatgatgcagggcggtgcacagtttggcggcggttatcagcagcaaactggcggtggtggccgccctggcggtcacttctttgagaaaaggcgtttactcagaatggtggacaggctcaatgcacggtttacgggaggggttctggtttcctttaagggtccattattggaaggatttgggccctggcaagggcttagcccttgggtcattggcccggatttgggtctacccggggtctgggggcctggggggccgtttccgtgtgtcactgtccgtgggtgtgtaaaaccggttccccatttcggtgggttccacatcggcggtttcaccctcccccgggttgaaaatttccggaaaattggatggggttttgctcttcccgcacttgttcgggccttttttcccatccacattccccaaccatggcgtttaaaaacttcgaattgggtcacgggacccccccccgaggtacccggaatcgacccaccatgtcatcgaacacctatcgcccacaccgtttccaataatatgccgaagccagaatattaa

SEQ ID NO: 132487 - DNA, 2586 bp, Homo sapiens
atgacaaccgaaacgcgttccctctatagtcaacttccggctattgatcgcttattgcgcgatagctccttcctttctttgcgtgatacttatggtcacacccgcgtggtggaattgttgcgtcagatgctcgacgaagcgcgagaagtgattcgtggcagccagacgctgcctgcgtggtgtgaaaactgggcgcaagaagtcgatgcccggttgacgaaagaacggcagagcgcgctgcgtccggtgatcaacctgacgggaaccgtgctgcataccaaccttgggcgagctttacaggcggaagccgcggtggaagccgttgcgcaggctatgcgttcgccagtgaccctcgagtatgatctggacgacgccggacgcggacatcgcgatcgggacgtggcgcagctgctgtgccgtattacgggggcggaagatgcctgtatcgtcaataacaatgcggcggcggtgttattgatgttggcggccactgccagcggaaaagaggtggtggtatctcgcggcgaactggtggagattggcggcgcgtttcgtattcccgatgttatgcgtcaggcaggctgcaccctacacgaagtagggaccaccaaccgcacgcacgcgaatgattatcgtcaggcggtgaatgaaaataccgcactgttgatgaaaggggcggaaagggcgattgttctcttttctcctgtctactcaaaacatgaagatggcaggtttcttgatagcaacagcactatcctcaatgttgctgtctcacgcgctaaagatagttttctggtatttggcgatatggaccttatcgagatgcagcccgcattttcgccgcgagggttattggcaaaatatctcttttcttcagataataatgcgttgcaatttgagtttcagaaacgacaggatttaatttccgcacatacacaaatttcaacgctgcatggtgtggagcagcatgatgaatttttgaacaagactcttgccggagctcaaaagaaaataacgattatttccccttggttatcctggcaaaaagtggagcaaacgggatttctggcatcaatggctttggcccgttcccggggcattgatattaccgtggtgacggataaaaactgcaatatagcgcatgtcgatgatgataagcgtcaggagaaacaacatctgctgaatgatgctgttgaaaagctcaataagatgggtatcgctacgaaattggttaatcgtgttcacagcaaaattgtgattgaggatgaagaactgctgtgtgtcggatcttttaactggttcagtgctacacgggaagataagtatcaacgatacgatacgtctttggtgtaccgtggtgaaggcaatccgtcgacttataatcgccagaacggcatatcaggacggtgctgcgaacgctgtggcccaaaacgttccagtaaactgtgtagatgttcaccgaaccggtcgatggatgcacatttaaagcgatatggtaaacctgtgtacgactatttggcatccgaccgtgatctgccgtccgtttacgccgcgtttgaaagtacgataagcaatccggaagtcttacaggcgaaacctcagcgaagagagatgcgagtttggcgtcacattaacgacacgctggtttcttccatcaaaatcattgcgatgatgctgttgatcatcggtggtggcggtgcgttcaagcaggtgctggtagacagcggcgtggacaaatacattgcttccatgatgcacgaaaccaacatttctccgctgctgatggcctggtcgattgctgccgtactgcgtatcgcgctgggttccgcaaccgttgcggcaatcactgcgggtggtatcgcggcaccgctgattgcaacgacgggtgttagcccggagctgatggttattgcggttggttccggtagtgtgattttctctcatgtgaacgatccgggcttctggctgttcaaagagtactttaacctgactatcggcgagaccatcaaatcctggtcgatgctggaaaccattatctcggtgtgcggtctggaaattgacagcaaccgccccattgctgtgccagtcgttggtgatattgcatccagtatgcaaggtatgctggcagaactgaaacaaaacacatttacgactccactggtatggcgcgatattttaaatatccacaagcagcaaaatgcacaaaaaatgcatgaaaaattaagtacagatactcaaccattaaattactttaatgcattaagtgctgtgcgcgacgtattgcgcgagaaccaggatatttatttagttaatgaaggtgcaaataccctggataatgcacgaaatattattgatatgtataaaccacgtcgtcgtctggattgtggtacctggggtgtcatgggcatcggtatgggctatgccatcggtgctagcgtgacttctggttctccggttgtcgccattgaaggtgatagtgcttttggtttcagtgggatggaaattgaaacgatttgtcgatataacctgccggtgacgatcgttatttttaataatggcggcatctacagaggagacggtcgttga

SEQ ID NO: 132488 - DNA, 831 bp, Homo sapiens
atggatgagaaaaagaatcctaacttgggagtggtggtggacacctttaatcgcagcatgggatgtgagcgacctatgaaaacatgttggcaaatcctcgaaattgaaagcacgacgcaaatagacattatccgccaggcttatcttgctcgcttaccgttgtgtcatcccgaaaccgatccgcaagggtttaaagcattacgccaggcctatgaagaggccctgcgactggcggtaaatcctgtcgaggaagcagatgatgaagaaaaagatgctgccgctgaacatgaaatactacgtgcattcaggacattactggattcagaaagtgatcgttttcagccttccgcctggcagaaatttattcagcaattaaatacctggaacatggaggatgtcgatcaattacgctggccgctccgtcttccagcagctgctactttctgtgatatcgatgataaagccacgattccactattgattaatctgttaaaagatccaaatggagatgtcagaaactgggccgcatttgcaataaatatcaataaatatgataatagtgatattagggattgttttgtggagatgcttcaggataaaaatgaggaagtccgtattgaagcaataatcggactttcctacagaaaagataaaagggttttatctgttttatgcgatgagttaaaaaaaaatactgtttatgatgatatcattgaagctgcgggtgaattaggtgataaaacgctacttcctgttttagatactatgttgtacaagtttgatgacaatgaaattataacttccgctattgataagctgaagcgttcatag

SEQ ID NO: 132489 - DNA, 1092 bp, Homo sapiens
gttcgaaggttgaaccgattccgcaaaatggaccgtgcggtgacaacagcctggtggcgcttaaattgcttagcccggatggtgataatgcatggtcggtgatgtataaactaagccaggcgttaagcgacatcgaagttccatgttcggtgctggagtgtgaaggatgtgagcgacctatgaaaacatgttggcaaatcctcgaaattgaaagcacgacgcaaatagacattatccgccaggcttatcttgctcgcttaccgttgtgtcatcccgaaaccgatccgcaagggtttaaagcattaccgccaggccttgaagaagcccctgcgactgccggtaaatcctgtcgaggaagcagatgatgaagaaaaagatcttcccgctgaccatgaaatactacgtgcattcaggacattactggattcagaaagtgatcgttttcagccttccgcctggcagaaatttattcagcaattaaatacctggaacatggaggatgtcgatcaattacgctggccgctgtgtgcaatcgccatagaagcgcgatatctttcattaaattgtgcttctttgctggcagagcgtttgaactggcattcatttaatgacagcgaaggaatggatgaggaagaaagggaggcttttcttgaggccattcaggctggtgattgtttcgatttccttagccttctggaatatcccattgcgttgcagaaccagactgttgagtattacttcgcgctggaacgttgctgccgttaccatcctgactatgtcactgcgtttttggcgatggaaagtccgtggttaattcctgatgatgcaaagttacatcgcaaactgttgcgctggtacagctcggtgcaaacaggtatggcggaactcattcctgtcgctcaacagtggcaaacggaagaaccagaaagcgaagatgcccggtattacttgtgtgcacaacgtttgtactgcggcgagggggaaagcctgcttgccgatctctgcgcgtactgggaaagttacccatctacacaagctgataatttgttgttgcagtggagcaagcgtcattgccggattattcgcgtataa

SEQ ID NO: 132490 - DNA, 1737 bp, Homo sapiens
atgaagccaaatggagggagccgtcataaccctcttgaagctgaaacaatagcagcatggctggtggcacataaggatgatatagagcgccattacggggaaccactgtacaaagttgttggtgttgtgacgccattttcggcgcaggttaatgctatcaaaatgtcattgcgtaacgtggaaattaatggcaaagacgagcagggtttactgacagtggggactgtgcactccttgcagggggcggaaagggcgattgttctcttttctcctgtctactcaaaacatgaagatggcaggtttcttgatagcaacagcactatcctcaatgttgctgtctcacgcgctaaagatagtttcctggtatttggcgatatggacttatcgagatgcacccgcattttcgccagcgagaacgacagatttatttcgcacatcacaatttcacgctcatggtgtgagcacatgatgatttcagaggatcccggctggatccgtaaaatcaacggcaaactgcagccgcgcatgggtaaccgtgccatgctgctgggtaaaatcttcgctaacccgcatctgccggggatcgacgattattacgagccgttcgattttgactatcagaacctgcataccgcgccggaaggcagcaaatcgcagccgattgcccgtccgcgttcgctgattaccggggaacggatggcgaaaatcgaaaaagggccgaactgggaagatgacctgggcggtgagtttgacaaactggcgaaagacaagtacttcgacaacatccagaaggcgatgtatagccagttcgaaaacaccttcatgatgtatttgccgcgcctgtgcgaacactgcctgaacccggcatgtgtggcgacctgcccgagcggtgcgatttacaagcgtgaagaagatggcatcgtcctgatcgaccaggataaatgccgtggctggcgtatgtgcatcactggatgcccgtacaaaaaaatctacttcaactggaagagcggtaagtctgagaagtgcatcttctgctatccgcgtattgaagcgggtcagccgaccgtgtgctcagaaacctgtgtcggtcgtatccgttatcttggcgtgctgttgtacgatgccgacgctattgaacgacgtctctactggcaatcttctcagtgcgaagacaacacttcgctacgcgaggcgctaaccctgtacaaatacgatagcgccgggagtcgtatgttcgaagagctggcagcgggaagcgatcgtttctatgccacgcttccctggcagccattaactgtccagtctgaatgcccggtaacgcttaaggatgcttatcttgctcgcttaccgttgtgtcatcccgaaaccgatccgcaagggtttaaagcattacgccaggcctatgaagaggccctgcgactggcggtaaatcctgtcgaggaagcagatgatgaagaaaaagatgctgccgctgaacatgaaatactacgtgcattcaggacattactggattcagaaagtgatcgttttcagccttccgcctggcagaaatttattcagcaattaaatacctggaacatggaggatgtcgatcaattacgcttggcgctgtgttgcatcgccatagaagcgcgatatctttcattagattgtgcttctttgcgtgcagaccgtttgaactggcattcatttaatgacagcgaagaatggattaggaaaaaggaaggtttttcttga

SEQ ID NO: 132491 - DNA, 2205 bp, Homo sapiens
atgaaaactcgcgactcgcaatcaagtgacgtgattatcattggcggcggcgcaacgggagccgggattgcccgcgactgtgccctgcgcgggctgcgcgtgattttggttgagcgccacgacatcgcaaccggtgccaccgggcgtaaccacggcctgctgcacagcggtgcgcgctatgcggtaaccgatgcggaatcggcccgcgaatgcattagtgaaaaccagatcctgaaacgcattgcacgtcactgcgttgaaccaaccaacggcctgtttatcaccctgccggaagatgacctctccttccaggccacttttattcgcgcctgcgaagaagcagggatcagcgcagaagctatagacccgcagcaagcgcgcattatcgaacctgccgttaacccggcactgattggcgcggtgaaagttccggatggcaccgttgatccatttcgtctgaccgcagcaaacatgctggatgccaaagaacacggtgccgttatccttaccgctcatgaagtcacggggctgattcgtgaaggcgcgacggtgtgcggtgttcgtgtacgtaaccatctcaccggcgaaactcaggcccttcatgcacctgtcgtggttaatgccgctgggatctgggggcaacacattgccgaatatgccgatctgcgcattcgcatgttcccggcgaaaggatcgctgctgatcatggatcaccgcattaaccagcatgtgatcaaccgctgccgtaaaccttccgacgccgatattctggtgcctggcgataccatttcgctgattggtaccacctctttacgtattgattacaacgagattgacgataatcgagtgacggcagaagaggttgatattctgctgcgtgaaggggaaaaactggcccccgtgatggcgaaaacgcgcattttgcgggcctattctgcgtgcgcccgctggttgccagcgatgacgacccgagcggacgtaacgtcagccgtggcatcgtgctgctcgaccatgctgaacgcgatgaacccgctgaagttaccttgcgtaaagtcatctccctgcctgccccgctgcggttctgcggtttatcgtcatggcgatcgcacgcctgcctggctgagcgaaggccgtctgcaccgtagcctggtatgtgagtgcgaagcggtaactgcgggtgaagtgcagtacgcggtagaaaatttaaacgttaatagcctgctggatttacgccgtcgtacccgtgtggggatgggcacctgccagggcgaactctgcgcctgccgcgctgccggactgctgcaacgttttaacgtcacgacgtccgcgcaatctatcgagcaactttccaccttccttaacgaacgctggaaaggcgtgcaacccatcgcctggggagatgcactgcgcgaaagcgaatttacccgctgggtttatcagggattgtgtgaaatagagctgccggaactggatgtgctgcgcaataacgccaccgaatttcgcgcggtgaatatcgcccgtttccttgataatgaagaaaactggccgctgttacttgatgcgcttattcctgtcgccaatacctgcgaaatgatcctgatgcccgcctgcttcggtctggccgatgacaaactgtggcgttggttgaatgaaaaactaccttgttcactgatgcttttgccaacgctgccgccttccgtgctgggcattcgtctgcaaaaccagttacagcgccagtttgtgcgccagggtggcgtgtggatgccgggcgatgaagtgaaaaaagtgacctgtaaaaatggcgtagtgaacgaaatctggacccgcaatcacgccgatattccgctacgtccacgtttcgcggttctcgccagcggcagtttctttagtggcggactggtagcggaacgtaacggcattcgagagccgattctcggccttgatgtgctacaaaccgccacgcggggtgaatggtataagggagatttttttgcgccgcaaccgtggcagcagttcggtgtaaccactgatgagacgtacgcccgtcacaggcagggcaaaccattgaaaacctgtttgccatcggttcggtgctgggcggatttgatcccatcgcccagggatgcggcggcggtgtttgtgccgtcagtgctttacatgccgctcaacagattgcccaacgcgcaggaggccaacaatgaatga

SEQ ID NO: 132492 - DNA, 5301 bp, Homo sapiens
atggcctggctgttgattatttacattctgccgttagtcggaattattgcctatcttgccgttggcgagctccatttaggcaaacgccgcgctgaggcccatttgcgattgtggccttccaccgcaaaatggcttaacgaccttaaagcctgtaagcatatcttcgccgaagaaaatagcagtgtcgctgcgccattattcaagctttgcattgcgtcgtcaggggattcgctggaggtcaaagggaatcagctacaactgatgaccgagtcagatgatgtgatgcaggcgttaatccgcgacatccagctcgcgcgccataatattgagatggtgttttatatctggcagcccggcggcatgggcggaccagttcgaataccgcgtctgtcgtggtgctatgtacggcaccagatgaagcgacagccaggatttagccgccaaagtgctggcggaaaaactggcggcctgcgcgaccttgatccccggcgctacctctctctattactgggaagtctcatcatccatatcaaaccccggaacttctggttttacctgttacacacggagacacagattacctctcatggctcaacgcatctttacgctgatcctgctactttgcagcacttccgtttttgccggattattcgacgcgccgggacgttcacaatttgtccccgcgatcaagcctttgcttttgattttcagcaaaaccaacatgaccttaatctgacctggcagatcaaagacggttactacctctaccgtaaacagatccgcattacgccggaacacgcgaaaattgccgacgtgcagctgccgcaacgtcctggcatgaagatgagttttacgcaaaagcaagatttacccgcatcggctgacgcttcccgtcaccatcaaccaggcaatgccggagcacgttttttaagtaaaacgctttatggcgcgctggagcataactttactgatgcctggagcggctttgtgcgcggctatggctatgataaccgtaccaattatgacgcgtattattctcccggttcaccgttgctcgatacccgtaaactctatagccaaagttgggacgccgggctgcgctataacggcgaactgattaaatcacaactcattaccagctatagccatagcaaagattacaactacgatccccattatggtcgttatgattcgtcggcgacgctcgatgagatgaagcaatacaccgtccagtgggcaaacaatgtcatcgttggtcacggtagtattggtgcgggtgtcgactggcagaaacagactacgacgccgggtacaggttatgttgaggatggatatgatcaacgtaataccggcatctatctgaccgggctgcaacaagtcggcgattttacctttgaatgcgcagcacgcagtgacgataactcacagtttggtcgtcatggaacctggcaaaccagcgccggttgggaattcatcgaaggttatcgcttcattgcttcctacgggacatcttataaggcaccaaatctggggcaactgtatggcttctacggaaatccgaatctggacccggagaaaagcaaacagttggaaggcgcgtttgaatgcttaaccgctggggtgaactggcgtatttccggatatcgtaacgatgtcagtgacttgatcgattatgatgatcacaccctggaatatttacaactaagaactcaccccggaagggtttctacggtcaaggttttttactgtcggaactttgaaaaaaactgcgcggaccttacgaacatcatccgaaaaggaggaactatgaaggctgcagttgttacgaaggatcatcatgttgacgttacgtataaaacactgcgctcactgaaacatggcgaagccctgctgaaaatgcagtgttgtggtgtatgtcataccgatcttcatgttaagaatggcgattttggtgacaaaaccggcgtaattctgggccatgaaggcataggtgtggtggcagaagtgggtccaggtgtcacctcattaaaaccaggcgatcgtgccagcgtggcgtggttctacgaaggatgcggtcattgcgaatactgtaacagtggtaacgaaacgctctgccgttcagttaaaaatgccggatacagcgttgatggcgggatggcggaagagtgcatcgtggtcgccgattacgcggtaaaagtgccagatggtctggactcggcggcggccagcagcattacctgtgcgggagtcaccacctacaaagccgttaagctgtcaaaaattcgtccagggcagtggattgctatctacggtcttggcggtctgggtaacctcgccctgcaatacgcgaagaatgtctttaacgccaaagtgatcgccattgatgtcaatgatgagcagttaaaactggcaaccgaaatgggcgcagatttagcgattaactcacacaccgaagacgccgccaaaattgtgcaggagaaaactggtggcgctcacgctgcggtggtaacagcgttgatgctgtccgtgcaggcggtcgtgttgtggctgtcggtcaccgccggagtctatgagcctggatatccacgtcttgtgctggactgtattgaagtcgtcggtctaattctatgcaatatgatgtctatacccagacggaggtctgtaatggcaaaccatcgaggcggttccggcaattttgcagaagaccgcgaaagagcatcagaagcaggtaaaaaaggtggacagcacagcgtgggtaatttcaagaatgacccgcagcgcgcatctgaagcagctcgtcaaaaagccatcaccgccggttacccggtggttgatactgatgacaaatgtgtcaggcgttacgccacaaaccggaaacacctttccaaacatcacttcaatcccgcccttttcggtcctatgcttccgtatccgggattcttaaattcccattttcagcttacatgcctgcagtacaaaaatgattatccggacgactataacgaaaaagcggaacaggagctgacggcgaacgaaatcttcatgcagtacgtactgccgaacaaactgctgtggtatatcgccatcgccaacgtgttcgtttatctgctgcgttacggcatcctcgactggtcaccgacttatctgaaagaggttaagcatttcgcgctagataaatcctcctgggcctacttcctttatgaatatgcaggtattccgggcactctgcttcttccgtggcaaccgtggggcaaccggcgttttctttatgacactggtgaccatcgcgactatcgtttactggatgaacccggcagtaacccaaccgtcgatatgatttgtatgattgttatcggcttcctgatcaacggtcctgtgatgctgatcggtctgcatgcgctggaactggcaccgaaaaaagcggcaggtacggcagccggctttaccgggctgtttggttacctgggccgttcggtggcgccagcccgatttgttggctacacgtggacttcttcggccgggatggccgctttatggtccatttacaacgtgccgctggttaccatcatcattatgggctttttcttcccgcgcatcccggcgctggcggcaaaagtagcgatggggattggcataatcagctacatcaccatcaactatctggtgaagttcgacttccatttcctctatgtgctggcctgtacgttctgcatcaacgtggtcgtgatgctggtgatcggttttatcaaaccgcgcgccacgccgttcaccttcaaagatgcgtttgcggtggacatgaaaccgtggaaaaacgtcaagatcgcgtcaattggcatcctgttcgcgatgattggcgtctatgccgggctggctgaattcggcggctacggtacgcgctgcggtaaaccgcggaatacgcaaaatattgataatctggccgccgaaggtattcgcttaattccgcctacaccgttcaccggttgtacgcctgaacgggccggactattaccggtatcaagcctaacagttccgcccctggacaacaacttcgcgcagcaaaaacatccccatatggggccctatttaagaaggccgactgaccatcctgcgctggaaaacgtcaatttcgccctgaaacccggtcagatgctgggtatctgcgggccgactggttccggcaaaagtaccctgttgtcgctcattcagcgtcatttcgacgtcagcgagggggatattcgctttcatgatattcctctgacgaagttacaactcgatagctggcgtagcgcctggcggtatgttagccagacgccattccttttttctgacactgtggcgaataacatcgcgctgggttgcccgaatgccacccagcaagagattgagcatgtcgcgcggttagccagcgtacatgacgatattttgcgtctaccgcaagttacggatacagaggtgggcgagcgcggtgtgatgccttccggcgggcaaaaacagcgtatctccattgctcgtgcgttattagtcaacgcggaaatcctcatccttgatgatgcgctttcggcggtggacggacgcactgagcaccagatcctgcataacctgcgtcagtgggggcaaggaagaacggtaatcatcagtgcccatcgcctttctgcactgacggaagccagtgaaattattgtgatgcagcacggacatatcgcccagctggcaatcatgatgtgctggacaacaaagcggctgttccggatggctattgagcagcaaggcaacgttagtttgcggtccggtagacacaatggtgacaggttccgcactttcacgcagcgttttcgccatcagctctaccgccgtacagttttgcggtgcgaatgtcggttccgatcacccgattcgccactttacggcaaagcccatttcgtgggtcaccaccatcatggtcattccttcgttcgccagttccaccatcacgtccagtactcgttgatcatctccggatccagcgccgatgtcgtgcgccggaaacttattggcgtgagcagaaagcccgacacgctccagcagtttcagggctttttcacgagccggcgctttatcgcgtttaagcactttcacctgcgccagggtcaggttttcgataatcgacagatgagggaacagctcgaaatgctggaataccatcccgacgcgggaacgcagctttgccagatcggttttcttgtcgttaaccacgataccatcgacggtgatttcaccttgctgcaccggttcgaggccgttgacggttttaatcagcgttga

SEQ ID NO: 132493 - DNA, 990 bp, Homo sapiens
cgggccacccggcggcaaattaggaataagatggggaaccaactctcccaaatttgtcccccccggttttaaaaaaagggggaaaccttccttccctaaaaaaaaattcctcaaaaacaactggcgcccaaaccctataaaggcgtcggcggggcctggtttcaccctgaatccgccaccctggaaataatggaaaagccatataacccacaagatatcgaacagccgctttacgagcactgggaaaagcagggctactttaagcctaatggcgatgaaagccaggaaagtttctgcatcatgatcccgccgccgaacgtcaccggcagtttgcatatgggtcacgccttccagcaaaccatcatggataccatgatccgctatcagcgcatgcagggcaaaaacaccctgtggcaggtcggtactgaccacgccgggatcgctacccagatggtcgttgagcgcaagattgccgcagaagaaggtaaaacccgtcacgactacggccgcgaagctttcatcgacaaaatctgggaatggaaagcggaatctggcggcaccattacccgtcagatgcgccgtctcggcaactccgtcgactgggagcgtgaacgcttcaccatggacgaaggcctgtccaatgcggtgaaagaagttttcgttcgtctgtataaagaagacctgatttaccgtggcaaacgcctggtaaactgggatccgaaactgcgcaccgctatctctgacctggaagtcgaaaaccgcgaatcgaaaggttcgatgtggcacatccgctatccgctggctgacggtgcgaaaaccgcagacggtaaagattatctggtggtcgcgactacccgtccagaaaccctgctgggcgatactggcgtagccgttaacccggaagatccgcgttacaaagatctgattggcaaatatgtcattctgccgctggtaaccgtcgtattccgatcgtggcgacggaccgagtga

SEQ ID NO: 132494 - DNA, 2617 bp, Homo sapiens
atgttcctggactattttgcactgggagtgcttatttttgtatttctggtgatcttctatgggatcattattttacatgatattccctacctgattgccaaaaaacgtaatcatcctcatgccgacgccattcatgttgctggttgggtgactggtgtggtgattgaagtgacggataagaaaaatacgctgattaaaaaagatagaactcgagcttgtacccttctggacaatgacaccaccgtcgatggcttaagcgccgttgagcaactggtgtgtgaaattgccgcagaacattggcgcagcggtaagcgcgtgctcatcgcctgtgaagatgaaaagcaggcttaccggctggatgaagccctgtgggcgcgtccggcagaaagctttgttccgcataatttagcgggagaaggaccgcgcggcggtgcaccggtggagatcgcctggccgcaaaagcgtagcagcagccggcgcgatatattgattagtctgcgaacaagctttgcagattttgccaccgctttcacagaagtggtagacttcgttccttatgaagattctctgaaacaactggcgcgcgaacgctataaagcctaccgcgtggctgatatcgaacagccgctttacgagcactgggaaaagcagggctactttaagcctaatggcgatgaaagccaggaaagtttctgcatcatgatcccggcgacgaacgtcaccggcagtttgcatatgggtcacgccttccagcagaccatcatggataccatgatacgcgaatgcaagggcttttacaccctgtggcaggtcggtactgaccacgccgggatcgctacccagatggtcgttgagcgcaagatggccgcagaagaaggtatatacccgtcacgactacgcccgcgaagcttgcatcgacaaattctgggaatggaaagcggaatctggcggcaccattacccgtcagatgcgcccgtctcggcaactccgtcgactgggagcgtgaacgcttcaccatggacgaaggcctgtccaaatgcggtgaaagttcgatgtgggcacatccgctatccgctggctgacggtgcgaaaacctcagacggtaaagattatctggtggtcgcgactacccgtccagaaaccctgctgggcgatactggccgtagccgtttaacccggaagatccgcgttacaaaggagctgattggcaaatatgtcattctgccagctggtaccgcgccaggtgtgcgccagggtcctgtgtggatgccgggcgatgaagtgaaaaaagtgacctgtaaaaatggcgtagtgaacgaaatctggacccgcaatcacgccgatattccgctacgtccacgtttcgcggttctcgccagcggcagtttctttagtgtcggactggtagcggaacattgcccaacgcgcaggaggccaacaatgaatgacaccagcttcgaaaactgcattaagtgcaccgtctgcaccaccgcctgcccggtgagccgggtgaatcccggttatccagggccaaaacaagccgggccggatggcgagcgtctgcgtttgaaagatggcgcactgtatgacgaggcgctgaaatatggcatcaactgcataacgttgtgaagtcgcctgcccgtccgatgtgaagattggcgatattatccagcgcgcgcgggcgaaatatgacaccacgcgcccgtcgctgcgtaattttgtgttgagtcataccgacctgatgggtagcgtttccacgccgttcgcaccaatcgtcaacaccgctacctcgctgaaaccggtgcggcagctgcttgatgcggcgttaaaaatcgatcatcgccgcacgctaccgaaatactccttcggcacgttccgtcgctggtatcgcagcgtggcggctcagcaagcacaatataaagaccaggtcgctttctttcacggctgcttcgttaaaaacaaccatccgcagttagcggaacaggagctgccggcgaagcaaatcttcatgcagtacgtactgccgaacaaactgctgtggtatatcgccatcgccaacgtgttcgtttatctgttgcgttacggcatcctcgactggtcaccgacttatctgaaagaggttaagcatttcgcgctagataaatcctcatgggcctacttcctttatgaatatgcaggtattccgggcactctgctgtgcggctggatgtcggataaagtcttccgtggcaaccgtggggcaaccggcgttttctttatgacactggtgaccatcgcgactatcgtttactggatgaacccggcaggtaacccaaccgtcgatatgatttgtatgattgttatcggcttcctgatatacggtcctgtgatgctgatcggtctgcatgcgctggaactggcaccgaaaaaagcggcaggtacggcagcgggctttaccggactgtttggttacctgggcggttcggtggcggcgagcgcgattgttgggtacaccgtggacttcttcggctgggatgtcggctttatgctatcacatgaattatgggagtctgagttcactaaactaaaatacgaatataataattcttgtcctgccagcgtctcaggatggttgtga

SEQ ID NO: 132495 - DNA, 1309 bp, Homo sapiens
atgaacgacgtttccttcatgatttctggagatgcaatgaagattattacttgctataagtgcgtgcctgatgaacaggatattgcggtcaataatgctgatggttcattagacttcagcaaagccgatgccaaaataagccaatacgatctcaacgctattgaagcggcttgccagctaaagcaacaggcagcagaggcgcaggtgacagccttaagtgtgggcgtgatctctagctcagacagcacgcagggctgtcagcacccaattttcggcatcttcttgcatgaggtcgcgatgatgtcgcatctcccagtcgccaaaaaacatttcgttgagttcaggtatgatttgcacggggagctggcggtcactgagaaccagtcgcgcgataaattttaccggcaggctgaaggtgaagatcttccgggttatgtgtcaaatgatcttccagccattgctggtattgcggttgcgccatttcaagtgggtaacctggacgccgacagacgatcaaatgtgcattgtcgagtatcgtttcgtattcgtaccaggtcggaaaggtcatctctgccggagctacctgcgctgctttctggcgcggccaatgagagcgatgaagcaccgactccggcagaggaaccacaccagccattcctcgactttgccgagcaaatattgccccagtcggtttcccgcgccgcgatcaccgcggcctatcgccgcccggaaaccgaagcggtttctatgctgctggaacaagcccgcctgccgcagccagttgctgaacaggcgcacaaactggcgtatcagctggccgataaactgcgtaatcaaaaaaatgccagtggtcgcgcaggtatggtccaggggttattgcaggagttttcgctgtcatcgcaggaaggcgtggcgctgatgtgtctggcggaagcgttgttgcgtattcccgacaaagccacccgcgacgcgttaattcgcgacaaaatcagcaacggtaactggcagtcacacattggtcgtagcccgtcactgtttgttaatgccgccacctgggggctgctgtttactggcaaactggtttccacccataacgaagccagcctctcccgctcgctgaaccgcattatcggtaaaagcggtgaaccgctgatccgcaaaggtgtggatatggcgatgcgcctgatggagattaagtacctaattctgcgccatggattcggagaaatgctgagaaagctggtgaccgatatctgcgagttcatgacaattacagcccacttgatgcgaaaatacgataccatggtcg

SEQ ID NO: 132496 - DNA, 371 bp, Homo sapiens
cctcgtcagtgtggatttatgaaaaaacgtctcgaaaacggtgacgattactttgccgttaaccctaggggcaggtgcctgcattgctgctggatgacggtactttgctgacggaagcgtagcgattatgcagtatcttgccgacagcgtccccgaccgccagttctggcaccggtaaacagtatttcccgctctgtttcgccctatacaccggaagagtacaaaccgacagttcgcgcgcagctggagaagaactgcaatatgtgaacgaggcactgaaggattgagcactgggatctgcggcaaagatttacaattgctgatgcctatctgtttacggttctgcgctgggatacgcggtgaaactgaat

SEQ ID NO: 132497 - DNA, 489 bp, Homo sapiens
gcggtcgttcccgtacggagctttgctggatccgaaaactggtacgctgtcgatgaccattcaggcgatgtgcgtggcggcaccgttccgagttacgctgattccgatctatatcggtttgagcacgtcatggaagtgggtacttacgccaaaggaactgcgcggcgcacgaaagagaaagagagcctgccgcagatgctgcgcgggtttaagcaacgtccccgaccgccagttgctggcaccggtaaacagtattcccgctataaaaccatcgaatggctgaattacatcgccaccgagctgctaaaggtttcacacctctgtttcgccctgatacaccggaagagtacaaacgacagttcgcgcgcagctggagaagaagctgcaatatgtgaacgaggcctgaaggatgagcactggatctgcgggcaaagatttacaattgctgatgctatctgtttacggttctgcgctgggcatacgcggtga

SEQ ID NO: 132498 - DNA, 3810 bp, Homo sapiens
atgacctaccggaacaaccaccagactggtgtagcctttctctttcagaccaaattctgcatcgaggatggcggcgtcaaaaccttcgatgggtaccgcgtccagacccagagccgccacgccgagcaggaagttaccgacgttgagataaacctgttttgccatccactctgcatcatcatgcagatctttacggtgcatatcagcgaagaacttgcgacctttatcgttcgcggctttcgcttccggcgtggcaaagcggccatcggcatcttcctggtcaacaaccagcttcagccagacatcgtccatcgcggtttttgcacagaacaccacgacgtgcgaggcatcaagcattttacgctcgttgaacacgtaattaccggcagcggatttggcaacacgcgctttaccttcttccgtgctggcaacaataaaatgccacggctgggagttggtgctggatgggctgtattgcaaggcgtcccggtgcgcttcggggtatggcctttgccggaatatccagcgtacgcctgcggaaaattcaatggcgccatacgggcaggcgatgccgcacagcttgcagcttacgcacaggctttcattcaactgcacggccccatcgacgcgggtgatggcgttaaccgggcagaccaccgcgcaggcgattttttcgagatagtgttccagaacctgttcgcgatcgcggatgttgaccttgccatcaatcatgccgtcaatgctcagttgcgcctgcgcaatccgctgtttgtcttcgccatcttttgtttcgacgtaatactcgatggtgtggctgttaaagccatccgccagggtgacccgtttaacccgctggcgcagtttatcttcctgatgctgctgtggggggtagcgctgatcgtacggcggatgccggggcgcttctcggcgctaatgttgattgtgctgtcgctgaccgtttcttgccgttatatctggtggcgttacacctctacgctgaactgggacgatccggtcagcctggtgtgcgggcttattctgctcttcgctgaaacgtacgcgtggattgtgctggtgctcggctacttccaggtagtatggccgctgaatcgtcagccggtgccattgccgaaagatatgtcgctgtggccgtcggtggatatctttgtcccgacttacaacgaagatctcaacgtggtgaaaaataccatttacgcctcgctgggtatcgactggccgaaagataagctgaatatctggatccttgatgacggcggcagggaagagtttcgccagtttgcgcaaaacgtgggggtgaaatatatcgcccgcaccactcatgaacatgcgaaagcaggcaacatcaacaatgcgctgaaatatgccaaaggcgagttcgtgtcgattttcgactgcgaccacgtaccaacgcgatcgttcttgcaaatgaccatgggctggttcctgaaacgaaaggagggcgggggaaaaaggaagcagaagaagcgccaactgggccccgggactcgggcgaatgcctccgaaagcgcgttacgccgtgtactacacccgcgcatccaactcgtggaggggcgtccgaacatagcactcgaagagcgacccgaaaggcacaccgcgacctgcaagagccggaatgatgcgaaacgcccggacgattttataaggcacgattgcggacagatcgcccaggagatgcagaaaaacggtggcttgatcactaaagaagatttagcagcctataaagcggtcgaacgcactccgataagcggcgattatcgcgggtatcaggtttactccatgccaccgccatcctccggcgggatccatatcgtacaaatcctcaatattctggaaaacttcgatatgaagaaatacggctttggcagcgccgatgcgatgcaaatcatggcagaagcggagaaatacgcctacgccgaccgctcggaatatcttggcgacccggattttgtcaaagtaccgtggcaggcgctgaccaataaagcctatgccaaatctattgccgatcaaattgatatcaataaagcgaagccatccagcgaaattcgccccggcaagcttgcgccttatgagagtaatcaaactacccattactcagtggtggataaagatggtaacgcggtggcggtgacctatacgctgaacaccaccttcggtacgggcattgtcgcgggcgagagcggtattctgcttaataaccagatggatgatttctccgccaaaccgggcgtaccgaacgtttacgggctggtgggcggtgatgccaacgccgctcgggccgaacaaacgcccgctgtcgtcgatgtcgccgaccattgtggtgaaagacggccaggtccagcgcttgatgatactttcgcgcggcggcgtaatggtgcccgcccagaccgtctcaatgctgccaacaatcgtcgctccgaccagaatctgcgccattgggccaaattcggtatcgaaaaggcaaatcacgcgttcgttacgggcaaacagattcggcacgttctgagccgtgagatggttaacggagaagagatcgcccggcacgtagatcatctcacgcagaataccgttgcacggcatgtgtacgcggtggtagtcacgcggggagaggtaagtggtcacaaacgtaccgttgcggaacaggtccgccatcagatagttgcctgccagcagggcttcgaggctgtagttgtggcctttggcttgcaggattttatcttcttcgattttacccaactggctgataacgccatcggcaggcatgaccagtacattcggatcggtatcgattgggcgtacttcgtcacgcagcggacggacaaagaattcgttaaaggtgcggtagctggcggtgtccggcttttgcgcctctttcatgtcgaccttgtagtatttaacgaacagatcgataaccagttttgtcagccatcctgcccgcttgcttgcgccccaacccgccaggcgagtaagccattgcgtctggataaaattaccagctttagccacccggaaatcggtacggtggtgcgttttctgccagacaaaacttacgccattctcaccttcagccacaccttcttgcgtcacaaatacccctgccgccgcaatcagcgtttcgccataaaacagcagtggtcgctttcataccctccaattgaccagatgttaaaacatcgttatgcaaatacggaagtgaaagttactcacagcacattgaataaacgaaattgcaaacaacacaacaaggagccacgcatggaaatgctcgaagagcaccgctgttttgaaggctggcagcaacgctggcgacacgactccagtaccttaaactgcccgatgacgttcagtatctttctccctccacctcgtgatcacactccgccaccagtgctgtactggctttccggattaacctgcaatgacgagaacttcaccaccaaggcgggtgcccagcgggtagcggcggaactggggattgtactggtgatgccagacaccagcccgcgcggcgaaaaggttgccaacgacgatggctacgatttaggccagggcgcaggcttttatcttaatgccacgcaaccgccgtgggcgacgcattaccggatgtatgattatctgcgcgatgaattaccggcgctggttcagtcgcaatttaatgtcagcgaccgctgcgccattagcggtcactcaatgggtggtcacggtgcgctgattatggcgctgaaaaatccgggtaaatacaccagcgtttcggccttgcgccaattgtga

SEQ ID NO: 132499 - DNA, 2196 bp, Homo sapiens
atggataaaggcatcgacgccctctttcatcgagatagagttaacaatgcctttgccctggatacacttcagacctttttcaatgatgcgttggctttcagcgcgacgctcggctgtttctggatgatcctggcctggatttttattccgctggagcacccgcgctggcagcgtattcgcgcagaacataaaaacctgtatccgcatatcaacgcctcgcgtccgcgtccgctggacccggtccgttatctcattcaaacatgctggttattgatcggtgcatcgcgcaaagaaacgccgaaaccgcgcaggcgggcattttcaggtctgcaaaatattcgtggacgttaccatcaatggatgaacgagctgcctgagcgcgttagccataaaacacagcatctggatgagaaaaaagagctcggtcatttgagtgccggggcgcggcggttgatcctcggtatcatcgtcaccttctcgctgattctggcgttaatctgcgttactcagccgtttaacccgctggcgcagtttatcttcctgatgctgctgtggggggtagcgctgatcgtacggcggatgccggggcgcttctcggcgctaatgttgattgtgctgtcgctgaccgtttcttgccgttatatctggtggcgttacacctctacgctgaactgggacgatccggtcagcctggtgtgcgggcttattctgctcttcgctgaaacgtacgcgtggattgtgctggtgctcggctacttccaggtagtatggccgctgaatcgtcagccggtgccattgccgaaagatatgtcgctgtggccgtcggtggatatctttgtcccgacttacaacgaagatctcaacgtggtgaaaaataccatttacgcctcgctgggtatcgactggccgaaagataagctgaatatctggatccttgatgacggcggcagggaagagtttcgccagtttgcgcaaaacgtgggggtgaaatatatcgcccgcaccactcatgaacatgcgaaagcaggcaacatcaacaatgcgctgaaatatgccaaaggcgagttcgtgtcgattttcgactgcgaccacgtacctacgcgatcgttcttgcaaatgaccatgggctggttcctgaaagaaaaacagctggcgatgatgcagacgccgcaccacttcttctcaccggacccgtttgaacgcaacctggggcgtttccgtaaaacgccgaacgaaggcacgctgttctatggtctgcgccagtcgtgggagttcaatgcgcgtggcctggagctggtgaaagaaggtcgagcgcaagcctgtgtcagtgccggtaataccggggcgctgatggggctggcaaaattattactcaagcccctggaggggcaaaatcaccgcatgttgctgcgttgggaagcgaagctggcggcacttgtacggttgcaggaaaacaccgcgcagccagtgcctttcgcaccaaataatgcgcgtccgctgacgctggaagacgatcgtttgagctgcaccgttcgcggctacaacttcgcgatcaccttctcaaaaatgagtggcaaaccgacatcctggcagctggttgccagtgcgctagccaccaaaatcgcccatgaggttaacccgcaaaatcaggtgggctgtatgctggcgggcggtaacttctacccttacagttgcaagccggaagatgtctgggcggcgctggagaaagaccgggaaaacctgttttttatcgatgtgcaggcgcggggcacgtatccggcttactctgcccgcgtattccgcgaaaaaggggtaaccatcaacaaagcaccgggcgatgatgaaatcctgaaaaacaccgtcgattttgtctctttcagctattacgcctcgcgctgcgcctcggcggagatgaacgccaacaacagcagtgcggcgaacgtggtgaaatcgctgcgtaatccgtatctacaggtgagcgactggggctggggaattgatccactcggtctgcgtatcaccatgaatatgatgtacgatcgttatcagaagccgctgtttctggtggaaaacggcctgggcgcaaaagatgaatttgctgccaatggcgagattaacgacgactatcgcatcagctacttacgcgaacatatccgctgcaatgggcgaagcgattgcagacaggcattccgctga

SEQ ID NO: 132500 - DNA, 1878 bp, Homo sapiens
tcaaaggcagttggccgagagcacggaggcgcccaggcacagcacccgcggagtggccaacagagggccagggcagaagcgccaaagcttaagtccccctggaactcgctgcctgcggtcatctttgaggattttcacatcacgggtggtggacatgccgctaccgtagctggaggcggtcataaagtcgacttcatgagatacctgaacttcacggcacaggtccgccataaacataaatgagccacgcagcagacccaccagcaccatatcgctgccgctgtctttgtaacgctcagtaatctgacgacccagttcggcgatacgcgctttaatctccgcttcggggatcattacttctacagtatgtttcatatctctaaccatatgatttaaaaacaaatcacttcgcacgggcaggttttggcaccgcaacaaagcgcaagacacgcagtataccagtaaaagcttcgagaaggtgcaggcaaaccaggctttgaggtatacatcccaggctttaagcagggtaaactcggtagaccattcggtgttaaagcactcgtcttcggcatcgatacagggcttttccagctccaggcggtcaagaatttggacggtttttagttcgatgaagcgtccgccagtcagccaggaagtgacaatattttgcgcgagctgatccgaagattctctaggcagatcagcattggacaggtactggccttttcgacctttttttagcccttgatgaaatattttgttgaaataatacgtagcaccgacgtcgatataattgaccagatcttcatcaccgataccttcaatatctttccctttcgataagacataacccagcgatggacgcagaccaaagtcaaactggtattgagcgaccgcttcaaagttctgtgtcttattggcaaagccgccagttattggcgtcattttgcgtgtttcagaatagaaagttgccagataaatattattggcatcgtatttcagacctgttgcccatgcttctgcacgcttgcctgtgccacggctttgcaggttctgctcgttggtgcgatctgagttggtataggccccactaatggcgaaatcgctgccgccaaagtcatatgtcaatgacgtgccgaagccatcgccgttttgctttttaacgtcgcggttttcgtttttcccttgatattgcagggttaagttcaggccatcgataacgccgaagaagtcggtgttccgatacgtcgccagaccgctggcgcgtttggtcataaagttgtcggtctgcgccgaggaatcgccaccaaattccgggaacatatcggtccaggcttccacgtcatacaacgcccccaggttacgaccataatcgaaagaacccaaatctttatatttcaacccggcaaaagcgagacgcgttttttgctgtgcagtatcactctctgctttattaccggcaaactctgcttcccaacgaccataaccagtcagttgatcgttaatttgtgtttcgcctttgaaaccaaaacggatataactctggtcgccatctttactggcgttatcactcatataatgcatggctttaactttgccatagacatccagtttattaccgtctttattatatatttctgcagcctgtacagatgcagatgccacaatgcccatcgccactaatgccagagtgctctttttcattttcattcctgattttaattaacgcgcgaatattcagcgggagagtcccgttgaaaacaggaaagtttttaacctgagattgttaaagatatattacagattaataatattcttaaaatgtggtaatttattaaatctgtaataaaagcgtaaacaactgccgctaggcttgct

SEQ ID NO: 132501 - DNA, 2106 bp, Homo sapiens
atgggcattgtggcatctgcatctgtacaggctgcagaaatatataataaagacggtaataaactggatgtctatggcaaagttaaagccatgcattatatgagtgataacgccagtaaagatggcgaccagagttatatccgttttggtttcaaaggcgaaacacaaattaacgatcaactgactggttatggtcgttgggaagcagagtttgccgcctggaccgatatgttcccggaatttggtggcgattcctcggcgcagaccgacaactttatgaccaaacgcgccagcggtctggcgacgtatcggaaaacgacttcttcggcgtatcgatggcctgaacttaacctgcaatatcacagatgcacatctgcggcgcgcgccatgctgctctccgggcgaccggtgatgcagattaacgagaggacagcagtgcgccgacagatgactgtgtatctgcgcgtagagcggatccacgagatagatccgttagtatctttgtcacacagcatgagtgtgatccccatagatgtggagcggccaatcgccgccgccccctgcacccccgggctctggcgaacaaaaacgccgctgcgcgtgccctcgacttatcccttacggctaccgggtcgggcgcgagtagtgtgtcatcgcacatttcgacttcatctttgcaaggactgggttttcatgttttctgggctgttaatcattctggttccactgattgtgggttacctcattccgcttcgccaacaagctgcgttaaaagttattaatcagctattaagctggatggtttaccttattctcttttttatgggtatcagtctggcgtttctcgataaccctcggccatatcttgccgacagcgtccccgaccgccagttgctggcaccggtaaacagtatttcccgctataaaaccatcgaatggctgaattacatcgccaccgagctgcataaaggtttcacacctctgtttcgccctgatacaccggaagagtacaaaccgacagttcgcgcgcactcggagaagaagctgcaatatgtgaacgaggcactgaaggatgagcactggatctgcgggcaaagatttacaattgctgatgcctatctgtttacggttctgcgctgggcatacgcggtgaaactgaatctggaagggttagagcacattgcagcatttatgcaacgtatggctgaacgtccggaagtacaagacgcgctgtcagcggaaggcttaaaaggatcccgtcatttgagtgccggggcgcggcggttgatcctcggtatcatcgtcaccttctcgctgattctggcgttaatctgcgttactcagccgtttaacccgctggcgcagtttatcttcctgatgctgctgtggggggtagcgctgatcgtacggcggatgccggggcgcttctcggcgctaatgttgattgtgctgtcgctgaccgtttcttgccgttatatctggtggcgttacacctctacgctgaactgggacgatccggtcagcctggtgtgcgggcttattctgctcttcgctgaaacgtacgcgtggattgtgctggtgctcggctacttccaggtagtatggccgctgaatcgtcagccggtgccattgccgaaagatatgtcgctgtggccgtcggtggatatctttgtcccgacttacaacgaagatctcaacgtgacgccagatgaactgaaacaagtactggacgttgccgcagcattaaaagcactgcgtgctgaaaacatctcaaccaaagtctttaatagtggattaggtatttccgtattccgcgacaactccacccgtacccgcttctcttatgcttccgcgcttaacctgctcggccttgcacaacaagatctcgacgaaggcaaatcacaaatcgctcacggcgaaaccgtgcgtgaaaccgccaatatgatctccttctgcgccgacgctattggtattcgcgacgatatgtatctgggcgcaggcaacgcctatatgcgtgaagttggcgctgcacttgatgacggttacaagcagggtgtactggcacaacggcccggctttagggaacctggaatggcggaattgacc

SEQ ID NO: 132502 - DNA, 1401 bp, Homo sapiens
tcagcctctctctgagggtgaaataatcccgttcagcggtgtctgccagtcggggggaggtgactgacagactgctttgatgtgcaaccgacgacgaccagcggcaacatcatcacgcagagcatcattttcagctttcgcatcagctaactccttcgtgtattttgcatcgagcgcagcaacatcacgctgacgcatctgcatgtcagtaattgccgcgttcgccagcttcagttctctggcatttttgtcgcgctggactttgtaggcgattgcgttatcacggtaatgattgaccgcccatgacaggcagagcggagataccgatgctgctttcggctctgctggtaaattatcgcccggtatgcagtaacgaaatttaccgccctgatttacgcgaatcagacgacctttgctgattgccattgccagcgttgaagccactttgcgtgatgtggtaccaaacaatgtagccagctcatcagccgtttgtggtcctcgttgttcaatcgtcgcggttaaataggggagactattatccgaaggatctgatgatgacatcgaagaatgcgtaaaattttgtgaagatgcctctatgctgttctggtgcctgagcttgggctggtgctccttaagccgggccgtgaatccatacagatatttcataatcctcgagtgctggtggaaccggaaccaaaaagcatgcgtaatctgccatccggagtcgttcctgccgttcgccagccgctggcggaagacaaaacattgctgccgttttttagtaacgaacgggtgattcgtgctgctggcggcgttggcgcattgtccgactggcagtaaatgttcgcgcagggaagtatcgccagccagggatcggtgagcttccagaatcgcgctggtagcaccgtcgctatccagcagacgaaactcaatgtttttcagtaccagcgtcaggccgttttccagtgcggattgctcggcgtcaacgcctttggctgcgggaagattacccagcgcattgagatctaaagaagagatcggcgtcagaatgccgcctgcactaccgctgcacacggtgcgggcgcggataatttgcggattcagattggtcagtgaaaccggcagtggttccagttcgtcagatttaacttccgccagcggcgcatcgcagtgggggaattcatcgcgcagccattggcttaaacgctggtgcgcttcctgttcgtcggccccggaaatcagtaactggcagttatcgcccgccagcgtatcggtgccaatcagcgcaagggcgcttttggcgttgcccttgcggtcagtgcgcaggttatgccactcaatttgtgatgggatcctcatattcccggcatgctgcagcagtctccccccgaaggcagtcat

SEQ ID NO: 132503 - DNA, 1608 bp, Homo sapiens
atgatgggctttgacggtacggtccaatatatggcctcgttgggcgcgccaatgccgatgctggcagcgattattgcggtagttatggaagtgcccgccgcgatattaatcgtgcttggctttttcacccgtccgctggcggtgctgtttattttctacacgctgggtacggcggtgattggtcaccattactgggatatgaccggcgatgcggttgggccaaatatgattaatttctggaagaatcgcaatgagatcacccccttccgggcgatgatgatcatccggcgcatggctcatcggttccagacagaagaaatcaaacgcatatcctttatcaaacgcagggtcggaaacaaagatgaaataacacggtgcaggtggcgtcgtttccatgatgatggcattaacttcctgcggctgctcgatgcggcgctggacatatcagtccgggaaaccatgtgtaaccaatggggcggaaaagggcggggtgacgcacgatgcctttttgacgccaaagcccggccaacggagcgctggcacacgattgacgccgtgctggaaaaacagggcagcaataaatcgagcattctggatgccaccattttcctggccgataaaaacgacttcgcggcgatgaataaagcgtgggatgcttgggttgtcgcgggtcatgcgccggtgcgctgcacggtacaagcgggtttgatgaacccgaagtataaagttgaaattaagattgtggctgcggtgatttcacaggatactggtacgcatgttccactgagacggttgaacgtcgccatgccagctgcatcctcagtgaacttagagatcccgaccaacgcgtatcgcttggacaactggcgctggcatttgccgaggctttcaacgacccaacacaaagccggatttgatgctaacggcgatgccggtgaagatttctttgctatcggtaagcccgcggttctgcaaaacacgaaaaacaaaggtgacgttgcgatcggtgccacggtaactgatgcctccgcggtactggcgacagattacaaaatctcgttcgataataatcagtggcaggtcacccgccttgccagcaataccacttttacggtgacgccggatgccaacggtaaagtggcatttgatggtctggagttgacgtttacaggaacgcctgccgttaacgacagcttcacgctgaaaccagtaagtgacgccatcgtcaacatggatgtattaatcaccgacgaagcgaaaatagcgatggcgagcgaagaagatgcgggtgatagcgataaccgcaacggtcaggccctgctggatctgcaaagcaacagtaaaacggtgggcggtgcgaaatcctttaacgacgcttatgcctcgttagtgagtgatatcggtaataaaaccgcgacgttgaaaaccagtagcgccacgcaaggtaatgtggtgacgcagctttccaatcagcagcagtcgatttccggtgtcaatctcgatgaggagtacggaaatctgcaacgttttcagcagtattacctggcgaatgcgcaggttctgcagacggcaaacgcgatttttgatgcgctgattaacattcgctaa

SEQ ID NO: 132504 - DNA, 2155 bp, Homo sapiens
atggacaaccccacgggggatcaacacctcttctcgaagcgtcaaaccccccaacggaagaatttacacaggtttggcaagttaagctgtggcaccagcacgcacatttacggcctggtcaataatcctttcgggatcaaaattaccacgttgaaaattatttcagtcaacaactggtgtaactggcaaaggaagctgcccagcacctcattgttccattcgagcccaaacccccccaattcctccttacacgcaactacaattacgcctcaatttttgaaagtccctatagtggcaaggccggtaggtggaagctacgagatatggccagttcgtgggtccaccgtaagcggaaattaccaagcccggtacgtgtacgtcaaagtagtccgtggtgtgtggtcacggttagggcataaaacgaaggtctgtggagataacgatggcagtatgtgtacgtcaagggctatccccaacaccgggtaccccacggacaaccgccgtatccccctaacggtgccccacggaaccccgcaccgggctaaacaccggagcccccagcgcaccgccatgcccactggtgaccccggagaccccgcttggccaacggctccccggcacccgcacggccaacgcgcctccaccacgccgacggacacccagggccacgacaacaccaggcctacgcgacccgcccgcagagacaccccagcacccacccgacagcacccatcaacaacccccatcctctcatttgtcaaacctggaggctttcgcacttctttgctgttgagcacggtcgcgtggtctccaccaccatcccaccatggcgaagctccgcggctggggcccgccaaagaaagggttagcgcggaaccgggcgatccccggtttggtttacaatcaccacagttcatgttaaacccggcaaatttaccgcagaatgtgggggcggtgcaccgcggtagccccgcgctataccgcatacactccccggcaccacgctacaggaagcgatggcccatggcagcacacatcgcctatgttacgcgtgtgcgcgcgcatcctcggtacacgtgctatcaatgtgcaatccgtcctatcatcgcgcacatcgtgccgctaccccttatccgctcatcggcaccttcatcttcttattgccgctatagggcctggtcacacgtatgcgttcaggtcacacgcctacgcacccaatgcagctcccctgtatactggtctttccatacacgcgtcttttttgtatttaagaccagcctgtcccgcaataagcatattacggtgaacagtggtagcgcccctttacacagcatgcgtctcacgtgctctacggtatataactgtctggggatcagcgtcatgccagctaacgaagcaggctgttgtggcgcggtggactatcatcttaatgcgcaggagaaagggctggcacgggcgcgcaataatattgatgcctggtggcccgcgattgaagcaggtgccgaggcaattttgcaaaccgccagcggctgcggcgcgtttgtcaaagagtatgggcagatgctgaaaaacgatgcgttatatgccgataaagcacgtcaggtcagtgaactggcggtcgatttagtcgaacttctgcgcgaggaaccgctggaaaaactggcaattcgcggcgataaaaagctggccttccactgtccgtgtaccctacaacatgcgcaaaagctgaacggcgaagtggaaaaagtgttgcttcgtcttggatttaccttaacggacgttcccgacagccatctgtgctgcggtcaggaagaggcgcagaaaaataactggtctgtttccattgctgttgccgatgacggcggtcatctgctggcgttaagtcgcatggacgattgcgcgccgattgcggcttatatctccccaggagaaagcgcgtaccgccgcgctggggcgtcgtgaaactaagggctatgaagagatggtgaacaacggacgtaccgcgttcgtgactgcgccgttattaacgtcgctggaaggcggcgtaccggttgttgtggatgggcaaattattggtcccgtgggcgtttctggtttaaccggagcacaggatgcgcaggtcgcgaaagcggcagcagcggtgttggcgaaataa

SEQ ID NO: 132505 - DNA, 1866 bp, Homo sapiens
atgcgcaagggtttccctctcctgcgcgatgctggtatcgacggtaaagtggtgatgcccaaaggtgcgccaaaatccaaagtagcggcaacgtgcgactactccgcagaagtcgttctgcatggtgataacttcaacgacactatcgctaaagtgagcgaaattgtcgaaatggaaggccgtatttttatcccaccttacgatgatccgaaagtgattgctggccagggaacgattggtctggaaattatggaagatctctatgatgtcgataacgtgattgtgccaattggtggtggcggtttaattgctggtattgcggtggcaattaaatctattaacccgaccattcgtgttattggcgtacagtctgaaaacgttcacggcatggcggcttctttccactccggagaaataaccacgcaccgaactaccggcaccctggcggatggttgtgatgtctcccgcccgggtaatttaacttacgaaatcgttcgtgaattagtcgatgacatcgtgctggtcagcgaagacgaaatcagaaacagtatgattgccttaattcagcgcaataaagtcgtcaccgaaggcgcaggcgctctggcatgtgctgcattattaagcggtaaattagaccaatatattcaaaacagaaaaacccattttcaatcgcggcaaacgctttcgcccaacaccaacgcggcaactgcgcgagtgctggatcgtctggggatcagcgtcatgccagctaacgaagcaggctgttgtggcgcggtggactatcatcttaatgcgcaggagaaagggctggcacgggcgcgcaataatattgatgcctggtggcccgcgattgaagcaggtgccgaggcaattttgcaaaccgccagcggctgcggcgcgtttgtcaaagagtatgggcagatgctgaaaaacgatgcgttatatgccgataaagcacgtcaggtcagtgaactggcggtcgatttagtcgaacttctgcgcgaggaaccgctggaaaaactggcaattcgcggcgataaaaagctggccttccactgtccgtgtaccctacaacatgcgcaaaagctgaacggcgaagtggaaaaagtgttgcttcgtcttggatttaccttaacggacgttcccgacagccatctgtgctgcggttcagcgggaacatatgcgttaacgcatcccgatctggcacgccagctgcgggataacaaaatgaatgcgctggaaagcggcaaaccggaaatgatcgtcaccgccaacattggttgccagacgcatctggcgagcgccggtcgtacctctaacaagcccttgaaaaggaataacaaaatgaaaactaaagtcattcttagccagcaaatggcgagtgcaattattgccgcaggtcaggaagaggcgcagaaaaataactggtctgtttccattgctgttgccgatgacggcggtcatctgctggcgttaagtcgcatggacgattgcgcgccgattgcggcttatatctcccaggagaaagcgcgtaccgccgcgctggggcgtcgtgaaactaagggctatgaagagatggtgaacaacggacgtaccgcaacactgaactcgcacccggtacctccgggccttatacgagaaagacggcgtggcatgaaaccagcggaccgacgcggcctcaagacgctgaaacgggagtccttgaggcggaaccttaaaacacgtttaccctaccccaattgcctacactcacgtattgccctgccctacaccttgttgcccttgccgtcgcccacgccgcccccgcctgatgttatgcctgtggcgacgagcccctgctgggctgtatttgatgttgcggagtga

SEQ ID NO: 132506 - DNA, 831 bp, Homo sapiens
atgccccgggctgccctgcaggacgccccccgcgcagtgcatggcgacaaatacgcaggtcaggaagaggcgcagaaaaataactggtctgtttccattgctgttgccgatgacggcggtcatctgctggcgttaagtcgcatggacgattgcgcgccgattgcggcttatatctcccaggagaaagcgcgtaccgccgcgctggggcgtcgtgaaactaagggctatgataatgacatgatacaatcgatgctcgatcgcattgaactaaccgtgtttgtcgataacgccccggcaattaaggtctataaaaaatacggctttgaaattgaagggactggtaagaagtacgcattgcgtaatggtgaatatgtcgatgcatattatatggcgcgggtgaacaaaatcagactccacggacatgtaattttgataacgaacaaacccacgctcacgggcagtctggaaaaagtacgcgagcaggtacaggcggcgcacgcgctggggctgacggcggtgatcagttcttccattgaatcgagcttaggcttaacgcaactggcgcggattgccgcctggttaacgccggacaccattccagggctggacacgctggatctgatgcaggcgcagcaggccatgtgtctcctgatctgtgccgagatgtaccaagtgtccagactgcagcacatctgtgagctgttcatcattacccagctgcagagcatgccaagcagggaactggcatccatgaaccttgatatagttgacctgcttaaaaaggccaaggtcttcaagacaggggaccttatcatgggcatgcatgactga

SEQ ID NO: 132507 - DNA, 3024 bp, Homo sapiens
atgatgcaaaagcctgctactgtagatgaggaagagagtcccagggaaacgcaccgctacagtgttagacggcgaggcgagttgattgttgaagctggcggaagagccgaaaataccgtggtcacgggggctggctggttgaaagtggcaaccggtgggatcgccaaatgcacacagtacggtaacaatggcacgctatcggtcagcgatggtgccattgccacagatattgttcagtccgagggaggcgcaattagtctctctacgctcgctacggttaatggccgccatcccgaaggtgaattcagcgttgataaaggttatgcctgcggtttgttgctggaaaatggcggtaacctgcgtgtactggaaggacatcgcgcggaaaaaatcattctcgatcaagagggcggcctgttggttaatgggacaacctcagcggtcgtggtagatgaaggtggtgaattgttggtgtatccaggtggggaagccagcaattgtgagattaatcagggcggcgtttttatgctggccgggaaagccagtgatacgttgcttgctggtggcaccatgaataatctcggtggtgaagactctgacactattgttgagaatggatccatttatcgtctggggacggatggccttcagctctacagttccggtaagacgcaaaacctgtccgtgaatgtgggtggtcgggctgaagtgcatgccggggaagttaccggggatatacacgttgagataacagatgccagtcggcaaactctgtgtaacgctctgaaattacagccagacgaagggggatcctctagagtcattcccacgtgcaaagcgagccgtttacgcattgacgccaattttaaacgttttgtggatgaagaagttttaccgggaacagggctggacgctgcggcgttctggcgcaattttgatgagatcgttcatgatctggcaccagaaaatcgtcagttgctggcagaacgcgatcgcattcaggcagcgcttgatgagtggcatcgcagcaatccggggccggtaaaagataaagcggcctataaatctttcctgcgtgaactgggctacctggtgccgcaaccggagcgcgtgacggtggaaaccacgggcattgacagcgaaatcaccagccaggcggggccgcagctggtggttccggcaatgaacgcccgctacgcgctgaacgcggcgaacgctcgctggggctcactgtacgatgcgttatacggcagcgacatcatcccgccaggaaggggcgatggtcagcggctacgatccgcaacgcgaagcgatggagtgcccgtgagatgcataagcgccggtgttagacagaacatccagactataacctttcaatgttccgtcacggttcacgcccatttgcccgtcaatggtaaaagcgtgccgggtacgggttgcgaggaaacactcttcacggctaagggaaactttcaccggaatgcccccaagcttgtctggtcaggaatgccgccattggctcattccagtacatcactgtttattaccaaaaccgccaccgacaaatggtttgatgacgtcgtacgcatgaccagcgtgcgctgcccgatggaactttccacctattttcgcattaacgcagaaaaaaccgggcagtttgagcgcaccattctggtggccgacgaagacagctacgtcagctacattgaaggctgttccgctccggtgcgtgacagctatcagttacacgcggcagtggtggaagtcatcatccataaaaacgccgaggtgaaatattccacggtacaaaactggtttcctggcgataacaacaccggcggtattctcaacttcgtcaccaagcgtgctttgtgcgaaggcgaaaacagcaaaatgtcatggacgcaatcagaaaccggcgtgacagcgggcctgggcttcacctacaacgttggcgcattgggcggtgcactggccccaatcatcggcgcgttgatcgctcaacgtctggatctgggtactgcgctggcatcgctctcgttcagtctgacgttcgtggtgatcctgctgattgggctggatatgccttctcgcgttcagcgttggtcgcgcccggaagcgttgcgtactcatgacgctatcgacggtaaaccattcagcggtgccgtgccgtttggcagcgccaaaaacgatttaggaagatgtatgtcgttacttgcacaactggatcaaaaaatcgctgctaacggtggcctgattgtctcctgccagccggttccggacagcccgctcgataaacccgaaatcgtcgccgccatggcattagcggcagaacagcgggcgcggttgccattcgcattgaaggtgtggcaaatctgcaagccacgcgtgcggtgtttgtctggattttggttgccggttttcggccgcatcgtgcgccgggccttcgctgccgtggcagcttccgttatctcgttttctccttgtcctctgtctgcggtcagctctggttcttctgctggtcgccctcggtttgatcttttccgctttattccagcgacagctgcatttctggtcgttgcctgcagttctcctacgccgccgcgtggcgtgaccgtagtaaataatttcgacgccaaacgttatctcggtacctggtatgagattgcccgttttgatcaccgctttgaacgtggactggaaaaagtcaccgcaacatacagcctgcgtgatgacggcggcctgaatgtcattaataaaggctataaccctgacagaggaatgtggcagcagagtgaagggaaagcgtactttaccggcgcaccaactcgcgctgcgctgaaagtgtcattctttggtcctttctatggcggttataacgttattgcactcgatcgggaataccgccatgcgctggtttccggcccggaccgcgactacctgtggatactctcccgcacgccaaccatttctgacgaagtgaaacaggagatgctggcagtcgcagacccgggaaggctttga

SEQ ID NO: 132508 - DNA, 4995 bp, Homo sapiens
ttacaccgcagccacaatcttaatttcaactttatacttcgggttcatcaaacccgcttgtaccgtgcagcgcaccggcgcatgacccgcgacaacccaagcatcccacgctttattcatcgccgcgaagtcgtttttatcggccaggaaaatggtggcatccagaatgctcgatttattgctgccctgtttttccagcacggcgtcaatctgtgccagcgtgttggcggtttgctcaaaggcatcggcgtcgaggttttccggtacaccagtgtagtagagcgtgttgttgtggattactacatcagaccagcgggcttcagcatcgatacgaacgataggggtagtgtgacggacgattttgcaccagacggtcagctggcgaaagcgataccaggctttaagccgcgagaaccacagcgacagatggcggtagccgtcacccaggcgatagaaaaaggccagccgctggtggtggaagcaggaaccggtacgggcaaaacctacgcttacctggctcctgcgctgcgggcgaaaaagaaagtcattatctcgaccggctcaaaagcgttgcaggatcagctctacagccgcgatttgccaacagtctcaaaggcattgaaatatacgggcaacgtggcgctgctgaaagggcgctcaaactacctctgcctcgaacgtctcgaacagcaggcgctggcggggggcgatctgccggtacaaatcttaagcgatgtgatcctgctgcgctcctggtctaatcaaacagtcgatggtgatatcagcacctgcgtcagcgtggcggaagattcacaggcgtggccgctggtcaccagcaccaacgacaactgtcttggcagcgactgcccgatgtataaagattgctttgtggtcaaagcacgtaaaaaagcgatggacgccgatgtggtggtggtaaaccatcatctctttctggcggatatggtggttaaagagagtggatttggcgaactgatcccggaagcggacgtcatgatcttcgacgaagcccaccagctaccggacattgccagccagtattttggtcagtcactctccagtcgacaactgctcgacctggcaaaagacatcaccatcgcctaccgcaccgaattaaaagacacccagcagttacaaaagtgcgctgatcgtcttgcccagagtgcgcaggattttcgtctgcaactcggtgagccaggttatcgcggtaacctgcgtgagctgttagctaatccgcaaattcagcgggcatttttactgctcgatgacaccctggaactttgttatgacgtggcgaaactgtcactggggcgttccgccttgctggatgcggcatttgagcgcgccacgttgtatcgcacacggctgaagcggctaaaagagatcaatcagccgggctacagctactggtacgaatgcacttcgcgccattttactctggctctcacgccgctcagcgtggcggataaattcaaagagttaatggcgcaaaaacccggtagctggatcttcacctcagcaacgctgtcggtgaacgacgatctgcatcatttcacctcgcggcttggcatcgaacaggccgatagctgttctataggaaacagctatgtttttagactagtcattggagaacagatgattgatgtcttagggccggagaaacgcagacggcgtaccacacaggaaaagatcgcaattgttcagcagagctttgaaccggggatgacggtctccctcgttgcccggcaacatggtgtagcagccagccagttatttctctggcgtaagcaataccaggaaggaagtcttactgctgtcgccgccggagaacaggttgttcctgcctctgaacttgctgccgccatgaagcagattaaagaactccagcgcctgctcggcaagaaaacgatggaaaatgaactcctcaaagaagccgttgaatatggacgggcaaaaaagtggatagcgcacgcgcccttattgcccggggatggggaacgaaccgatgaaagtcgccatttttgctccatgtgtgggccgaaattctgctcgatgaaaatcagccaggaagtgcgtgattacgccgccacgcaaactattgaaatgggaatggcggatatgtcggagaacttccgtgccagaggcggagaaatctacctgcgactgtacccggtggtggacagcgtacagtggatcgaacgtctgttggatgcaggcgtacgtactctccagctacgcatcaaagatcggcgcgatgaagaggtggaagccgatgtcgtggcggcaattgcgctgggccgccgctataacgcgcgattgtttatcaacgattactggcggctggcgatcaagcatcaggcgtatggcgtccatttggggcaggaagatttgcaagccaccgatctcaatgccatccgcgcggcaggcctgcggctgggcgtttcgacacatgacgatatggaaatcgacgtcgcgctggcagcacgcccctcttatatcgcgctgggacatgtgttcccgacgcaaaccaaacagatgccttctgcaccgcagggctggaacagctggcacggcatgttgagcgactggcggattatcccaccgtggcgattggcgccgccaaatcctgctcgacgatatcgctctggacgggcagcaaaactgctcgacagccaggagaaaagcggtaccgccgcgctggagcgtcgtgaaactaagggctatgaagagatggtgaacaacggacgtaccgcgttcgtgactgcgccgttattaacgtcgctggaaggcggcgtaccggttgttgtggatgggcaaattattggtgccgtgggcgtttctggtttaaccggagcacaggatgcgcagagccgtttacgcattgacgccaattttaaacgttttgtggatgaagaagttttaccgggaacagggctggacgctgcggcgttctggcgcaattttgatgagatcgttcatgatctggcaccagaaaatcgtcagttgctggcagaacgcgatcgcattcaggcagcgcttgatgagtggcatcgcagcaatccggggccggtaaaagataaagcggcctataaatctttcctgcgtgaactgggctacctggtgccgcaaccggagcgcgtgacggtggaaaccacgggcattgacagcgaaatcaccagccaggcggggccgcagctggtggttccggcaatgaacgcccgctacgcgctgaacgcggcgaacgctcgctggggctcactgtacgatgcgttatacggcagcgacatcatcccgcaggaaggggcgatggtcagcggctacgatccgcaacgcggtgagcaggttatcgcctgggttcggcgtttcctcgatgaatctctaccgctggaaaacggcagctatcaggatgtggtggcgtttaagctgcaaatcgatgccaatgggcggattggcaaaaacgatccggcgcacatcaacgatgttatcgtcgaagctgctatcagtaccattctcgactgcgaaaattccggtcgcgcggttaatccggagataaaatctgttgtaccgcacctgctgggcctaatcaagggactcttcaagagaaatggggaaaaacgttcgccaatcgtcggtaaactgattacgatcgccataaacataacttgccgtagcttccaaaattgctctggcttcgcaactatgatccgttcatggtctttcggtgaagttaaaaagccggaaaccatcaactaccgtacgttcaaaccagaacgtgacggccttttctgcgcccgtatctttgggccggtaaaagattacgagtgcctgtgcggtaagtacaagcgcctgaaacaccgtggcgtcatctgtgagaagtgcggcgttgaagtgacccagactaaagtacgccgtgagcgtatgggccacatcgaactggcttccccgactgcgcacatctggttcctgaaatcgctgccgtcccgtatcggtctgctgctcgatatgccgctgcgcgatatcgaacgcgtactgtactttgaatcctatgtggttatcgaaggcggtatgaccaacctggaacgtcagcagatcctgactgaagagcagtatctggacgcgctggaagagttcgatgggggcggaacaatccaggctctgctgaagagcatggatctggagcaagagtgcgaacagctgcgtgaagagctgaacgaaaccaactccgaaaccaagcgtaaaaagctgaccaagcgtatcaaactgctggaagcgttcgttcagtctggtaacaaaccagagtggatgatcctgaccgttctgccggtactgccgccagatctgcgtccgctggttccgctggatggtggtcgtttcgcgacttctgacctgaacgatctgtatcgtcgcgtcattaaccgtaacaaccgtctgaaacgtctgctggatctggctgcgccggacatcatcgtacgtaacgaaaaacgtatgctgcaggaagcggtagacgccctgctggataacggtcgtcgcggtcgtgcgatcaccggttctaacaagcgtcctctgaaatctttggccgacatgatcaaaggtaaacagggtcgtttccgtcagaacctgctcggtccatacctgcgtctgcatcagtgcggtctgccgaagaaaatggcactggagctgttcaaaccgttcatctacggcaagctggaactgcgtggtcttgctaccaccattaaagctgcgaagaaaatggcatttgaaccggtaatgatcgaaggtaaagctatccagctgcacccgctggtttgtgcggcatataacgccgacttcgatggtgaccagatggctgttcacgtaccgctgacgctggaagcccagctggaagcgcgtgcgctgatgatgtctaccaacacaacttgggggccagagctagatcctgacttcaaaccaaccaaccaaccaaccaattatccataa

SEQ ID NO: 132509 - DNA, 3574 bp, Homo sapiens
atggccagaaaacgcaaatcaagaaataacagtaaaattggtcacggagcgattagtcgcattggtagaccgaataatccttttgaaccgtgccgcaatcgctacgcacaaaaatacttaacgttggcgctaatgggcggtgccgcttttttcgtattgaaaggttgtagcgatagtagcgatgtcgataacgacggcgacggaacgttttacgcgacagtgcaggattgtattgatgacggtaataatgccgacatttgcgcgcgtggctggaacaacgccaaaacggcattttatgccgatgttccgaagaatatgactcagcagaactgtcagtctaagtacgaaaattgctactacgacaatgttgaacagagttggatcccggtcgtttctggatttttgttaagccgggttattcgtaaagatcgcgatgagccgtttgtttataacagcggcggttcctcttttgcttcgcgcccagtctgggtaccgagctcgattgtaatcatgtcatacggtttagcctcgtatgtgatcgccgtggccttcctggaacgcgatcgcattcaggcagcgcttgatgagtggcatcgcagcaatccggggccggtaaaagataaagcggcctataaatcgttcctgcgtgaactgggctacctggtgccgcaaccggagcgcgtgacggtggaaaccacgggcattgacagcgaaatcaccagccaggcggggccgcagctggtggttccggcaatgaacgcccgctacgcgctgaacgcggcgaacgctcgctggggctcactgtacgatgcgttatacggcagcgacatcatcccgcaggaaggggcgatggtcagcggctacgatccgcaacgcggtgagcaggttatcgcctgggttcggcgtttcctcgatgaatctctaccgctggaaaacggcagctatcaggatgtggtggcgtttaaggtggttgataaacaattacgcatccagttgaaaaatggtaaagaaaccacgttacgtactccagcacagtttgtcggttaccgtggcgatgccgctgcgccgacctgcattttggtgaaaaataacggcctgcatattggagtgcaaatcgatgccaatggccgaattgtcaaacaagatccggggccacataaacgatggtatcgttgaaaccgctatcagtaccattctcgactgcgaagattcggtcgcggcggttgatgcggaagataaaatcctgctgtaccgcaacctgctgggcctgatgcaggggactctgcaagagaaaatggagaaaaacggtcggcaaatcgtgcgtaaactgaatgacgatcgtcattacaccgccgccgatggctctgaaatttctctgcacggacgctcgctgctgtttatccgcaacgtgggtcatttgatgaccattcctgtgatttgggacagcgaaggcaatgaaatcccggaaggcattcttgatggcgtcatgactggcgcgattgccctctatgatttaaaagtgcagaaaaactcgcgcactggcagcgtctatattgtgaaaccgaaaatgcacggtccgcaggaagtggcgttcgccaacaaactgtttacccgcattgagacaatgctcgggatccgggatctctttctgttccagccattgcccaaacagcattgtcttcccgcggacctcgggagcaattgcggtaacctgagcaatatgttccgactccattgccagaatcagatcgtaatttcgtgccatctcagcagtgagcttacgtccggcatgtccttcaagagatacgccatgattagcggcaacatctgccgctgtcgcatctgcagggtgttttaccagaccatgaacacctgccgatttgacttttacgcccggcagacgtttacgcagcaagcgctcgccaatgggcgaacggcaaatgttgccggtcatgcaccccggaaatcgtcggtaccagcagagaaatcacacggttccaacgagccagcggcgcggaatattggtaatcggctgctgacccgatttgctgacttcgccggtgacgtacgctttttgcgatcggaacgccgcgacgctgacatcgacttgcgggctttcaatgactgcggagacgtggtaatcaccgtgatatttttggcggtcattaatccttcggcgataagcattgtcgtacttccgctgtcgagaataacgcattcgcctgaatttcgcagtgaagccctgaagcttgctgaacgcatcggtgttactgccgcagcccgtgaactcagcctgtatgaatcacaactctacaactggcgcagtaaacagcaaaatcagcagacgtcttctgaacgtgaactggagatgtctaccgagattgcacgccgcgacatacttcgcgaagcgcctgaaatgaagtatgtctttattgaaaaacatcaggctgagttcagcatcaaagcaatgtgccgcgtgctccgggtggcccgcagcggctggtatacgtggtgtcagcggcggacaaggataagcacgcgtcagcagttccgccaacactgcgacagcgttgtcctcgcggcttttacccggtcaaaacagcgttacggtgccccacgcctgacggatgaactgcgtgctcagggttacccctttaacgtaaaaaccgtggcggcaagcctgcgccgtcagggactgagggcaaaggcctcccggaagttcagcccggtcagctaccgcgcacacggcctgcctgtgtcagaaaatctgttggagcaggatttttacgccagtggcccgaaccagaagtgggcaggagacatcacgtacttacgtacagatgaaggctggctgtatctggcagtggccccttctttggaaaagtttgaaagctcctgggatttagcacgggccttccagccaacaggcaaaagccacccgtataccgggaacccccgggaaggcccgacaaaggccaggaaggttacaaaaggttgggaagaccgacactttctgttatttttccgcgctgatatcaatggtaatcggatctttgtcgccgccttgttgaatggtgagtttactgtcgctggtggcgatcgccgttttcgtatcgtctctggtggtgcgcgtggtcagggtttgcgcctgcgccagatgggtgacgctgatggtgtatttcccggcgatggcgttacccgcagtggtggcactgaactgcgcgcgaaggatgacgcagcgggtcagtcgattgctaaccgtttcacctctaacattaaaggcctgactcaggcggcccgtaacgccaacgacggtatctccgttgcgcagaccaccgaaggcgcgctgtccgaaatcaacaacaacttacagcgtgtgcgtgaactgacggtacaggccactaccggtaaaacagaagcagaggcgggtggcaagtgcagatccaaatgtgcttctatagtattgtacaaggctttattcaattcggataagtgttccagcgcagttcattcacgtcgttcatctatcgatttagttcatggtcgtaggcaatcacgatggctgtccttatag

SEQ ID NO: 132510 - DNA, 2277 bp, Homo sapiens
cctaaagggttatgcctggcgcgatttttgaagatcaccaagcggattaagttgggtaccaaaagggtatcgcctatggggccatttaaaaagaagcactcggaatatgttgtaaaccaaccactgttaataataatggagctgttcatgtataaaattaccgccactattggaaaggaaggtggcactcctactaactggacaagatattcaaaatctaaactaacgaaatcagaatgcgaaaaaatgctctcaggtaaaaaagaagcaggcgtttccagagagcagaaagtaaaactgataaattttaattgcgagaaacttcagtcctcgagaattgcattgtattcaaattaaaacttcatagctgattattaataatcaacatcgggcgtcaatttcagtctaacattggcgcctgcatgaactgatgcaatggcacaagtaatctttaatgaagagtggatgcttgcatacggcctgatgcttcgcactggtctgggggccaagacaaattgaagcataccgccagaactgttgggtggagggcttccacttcaaacgagtatctcctttaggtcaggaagaggcgcagaaaaataactggtctgtttccattgctgttgccgatgacggcggtcatctgctggcgttaagtcgcatggacgattgcgcgccgattgcggcttatatctcccaggagaaagcgcgtaccgccgcgctggggcgtcgtgaaactaagggctatgaagagatggtgaacaacggacgtaccgcgttcgtgactgcgccgttattaacgtcgctggaaggcggcgtaccggttgttgtggatgggcaaattattggtgccgtgggcgtttctggtttaaccggagcacaggatgcgcagagccgtttacgcattgacgccaattttaaacgttttgtggatgaagaagttttaccgggaacagggctggacgctgcggcgttctggcgcaattttgatgagatcgttcatgatctggcaccagaaaatcgtcagttgctggcagaacgcgatcgcattcaggcagcgcttgatgagtggcatcgcagcaatccggggccggtaaaagataaagcggcctataaatctttcctgcgtgaactgggctacctggtgccgcaaccggagcgcgtgacggtggaaaccacgggcattgacagcgaaatcaccagccaggcggggccgcagctggtggttccggcaatgaacgcccgctacgcgctgaacgcggcgaacgctcgctggggctcactgtacgatgcgttatacggcagcgacatcatcccgcaggaaggggcgatggtcagcggctacgatccgcaacgcggtgagcaggttatcgcctgggttcggcgtttcctcgatgaatctctaccgctggaaaacggcagctatcaggatgtggtggcgtttaaggtggttgataaacaattacgcatccagttgaaaaatggtaaagaaaccacgttacgtactccagcacagtttgtcggttaccgtggcgatgccgctgcgccgacctgcattttgcggctgtcggtagcagccataacctgctcctccagttgtttgaccaacactgatggcgaggagtttttgtgcttcaacggcaaattccaacggcagctccgagaacacgtctttgcagaaaccgttaacaatcatcgagatggcgtcttcttcgctgatcccgcgttgcaggcagtaaaacagttgatcttcaccaataccgcgtacacctggcgtgtggctgataacaatgttcagcaggaacagccagcgcaggcagaaaactgccccggagaaatcaccacagcaacagtagcgaaaatctcagagtgcgatttaaccagcgacgattggaacaacgaggaccacaaacggctgatgagctggctacattgtttggtaccacatcacgcaaagtggcttcaacgctggcaatggcaatcagcaaaggtcgtctgattcgcgtaaatcagggcgcacgaaaatggaagtataatgaggaccaaatgatgactatcgttcgtatcgatgctgaagcccgctggtctgatgtagtaatccacaacaacacgctctactacactggtgtaccggaaaacctcgacgccgatgcctttgagcaaaccgccaacacgctggcacagattgacgccgtgctggaaaaacaggcagcaataaatcgagcattctggatgccaccattttcctggccgataaaaacgacttcgcggcgatga

SEQ ID NO: 132511 - DNA, 270 bp, Homo sapiens
atgcgtcgacagaacgcaccagggatgtgcgacaacacaatgaaaggatcgaaaaatgactacgcaacgttcaccggggctattccggcgtctggctcatggcagcctggtaaaacaaatcctggtcggccttgttctggggattcttctggcatggatctcaaaacccgcggcggaagctgttggtctgttaggtactttgttcgtcggcgcactgaaagccgttgcccccatcctggtgttgatgctggtgatggcatctattgctaa

SEQ ID NO: 132512 - DNA, 2226 bp, Homo sapiens
atgatgaggacgagcggaggaacacgagataatgagtcgagcagtgacgatgagagagagagagagaaccgtctctcggatgagaaatcgaacgaatatgccaacctggtcggtggtgagcgttacgagccagatgaagagaacccgatgctcggcttccgtggcgcgggccgctatgtttccgacagcttcctgcgactgtgttcgtcgctggagatcgtgaaggcacgtgaaacagtggcgttgattcaggggctgaaacacgatctgctggcggatgataccgcgctacgtgcactcatcccacaacggctgatcgctttcgatgacgcggtacgtagcacgttgaaagaggaggaaaaactggtcaactccagcgactggggctacgacgctcaggcctttgcccgctggcgaccggagtacggttattttgccaaacaggcggggtttaccgttaaaacgtccgccagccttgctgctttatggcaggtagtgaaccaaatcggcggtaaagagcgttatttctttggcaatattttgtggcagacacgggcgttgatggaccgcgcgatcggtcataagctggcgaaaggccgcccggagcgcgaatatttacagactggcgatgcggtggatagctggaaagtgattgtcgttgaaccggaaaaacaacttacgttgttatttggcatgaaagcgccggggctgggacgactgtgttttagcctggaagataaaggcgactatcgtactatcgatgtccgcgctttctggcatccgcacggcaaccgggctgaacgggaaaaaccaagattccagccttattctcgccggaagtcgtttatcggccagaacatgttgctcccaatgtccattatgccgcccgttttccgcagggtaatctgcccccttggcgtggcccggctcggcaagttccgggacccggtttacctcgtttgtgtcttcacccgtcagattttccgctactacacttcaggcgatgagtttctgcaaatcaataccaccggcggcgaagatattgatgacattgatgatatcaagctctttgtctatgaagagagctacggtatcagtaaagagagtcactggcgcgaggcgatcaacgccaaagcgatgggagcaatgaccttaaactggcaggaaaaacgctggcagcgattttttaacagcgaagaaccgggaaatatcgaacccgtctacatgctggaaaaagtagaaaatcaaaaccatgccaaatgggaggtccataattttaccatgggctaccaacggcaagtaaccgaagatacttacgaatatttgctgctaaatgtggtgggtgttccggttccggacaatattcacccgatgaccaaagacgaagcaggagtctggtcgtggcgcacacctatcctgaaaggcaacctgtacgagtattttttcaatgttgatggtgtacgcagcattgatacaggcaccgcaatgactaatcctcagcgccaggttaactccagtatgattctggtgccaggcagttatctggatacgcgttctgttgcgcatggtgatttgatcgccataacttaccactccaacgcattgcaatctgaacgtcagatgtatgtctggaccccgccaggatacaccggcatgggcgagcctttgccagtgctctatttctatcacggctttggtgataccggacgttccgctatcgatcaggggcgtatcccgcaaatcatggataacctgcttgctgaagggaaaattaaaccgatgctggtggtgatcccggatacagaaaccgatgcgaagggcattattcccgaagatttcgtgcctcaggaaagacgtaaagtcttttatccgctgaatgctaaagcggcagatcgcgaactgatgaacgatattatcccgctgattagcaagcgttttaatgtccgtaaagatgccgatggccgcgcgctggcagggctttcacaaggcgggtaccaggcgctggtttccggaatgaatcatctggaaagctttggctggctggccacattcagtggtgttaccacgacaaccgtaccggatgaaggtgtcgcggcccgactgaacgatccggcagctatcaaccagcaactacgtaattttactgtggttgtgggggataaagatgtcgtaaccggcaaggatatcgccgggctgaaaactgagcttgagcgagaaaaaaattaa

SEQ ID NO: 132513 - DNA, 756 bp, Homo sapiens
cggtgtattctgcttcgcctcgacagcggcgggactgtccgtctacggctgactgggcggctcctgcgggcgctgcgcggcctggctccccccacgccagctaacctcactcgtgtcacgacgcgccgctgcctcctgccactctaaatcacacgtcgggtggctctggctctccccctcaagctcggcctacacgcgctgtcactctgcgcctcggcgaccgactgggacggcttccccttcgaagtccaataaagtcgcccactcttgctgtcggtgctcaggctgaaatctgggggtaatggagcgtaatgaaaggaatattacgatgaatataaaaattgctgctttagcgctggctattgccagcggtatttctgctcagtgggccatagcagcggatatgccagccagcccggcacccactatcccggtgaaacagtatgtgactcaggtcaatgccgataacagcgtgacctttcgctactttgcccctggggcaaaaaatgtctctgtagtggtgggtgttccggttccggacaatattcacccgatgaccaaagacgaagcaggagtctggtcgtggcgcacacctatcctgaaaggcaacctgtacgagtattttttcaatgttgatggtgtacgcagcattgatacaggcaccgcaatgactaatcctcagcgccaggttaactccagtatgattctggtgccaggcagttatctggatacgcgttctgttgcgcatggtgattt

SEQ ID NO: 132514 - DNA, 424 bp, Homo sapiens
ttattgacgtatgtactggattattaacgataatatcgagttctggcctgagcaccgaaaattaatatcggtacataacgccgattttaacgtcgttctgacaacgccagccagtcgatgtttatcacttctacttgaagcttttcctgatgtggttgcacaacaagattttttcaccagagtagaatcatggaatatactcgtcaaccttgggaggacgacggtatggatgacatactcatgggcattcctcggttgttgtgtttgcgttgttgttgttattttaaaggtgacggtgtcacgtttttcgggatagggcagtgatacgggtgcgtgtccgttacttgctgaggctcttgttggcattcttggaatagccctgaatcaaggaagagattggctgcggttgctcgcataacttacc

SEQ ID NO: 132515 - DNA, 688 bp, Homo sapiens
ggagctcagctgttgtgttctctttgctcctggaggtgctaaactggtaggatgtgccctggggctgtcaaggtcttccacatggagagaagctgaccaagaaggaagtcaacacagggatgagtacagtcgagaggtggggggaagatacccatcccgctggaaagtggctgaatccaagaggctgcgcagtgacagtctgcaggccccacttccacagcatctcataggagaagacccacgggcttggaaatccagccagcccctggtagccgccttgcgcctccctgaaatggagctccctgggggagggtgtgacaatctaaaaacttgtcacacttcacatggatctgtcatggcggaaacagcggttatcaatcacaagaaacgtaaaaatagcccgcgaatcgtccagtcaaacgacctcactgaggcggcatatagtctctcccgggatcaaaaacgtatgctgtatctgttcgttgaccagatcagaaaatctgatggcaccctacaggaacatgacggtatctgcgagatccatgttgctaaatatgctgaaatattcggattgacctctgcggaagccagatacgagaggataattttcagggtaacttcaagttcttctcctgctgatcttgtcctacatcctctcaccagtgaagcctcatttgccaatttctag

SEQ ID NO: 132516 - DNA, 735 bp, Homo sapiens
atgtcatcagctgctgtcacgaacaatgtcttaacaccattgccgattgtaagtcaaccttgcaccaaaaactgtgatgccgggccactggataaacgctttgaactgctgaacatgctatacttcatgtacttgcctaaccggatatcattcatgagaattttgctctctttgacactgaagataaacgtgctagctgtgcactctcaccattttatgatgtaccatacagcgcaatggaggtgccccatcctcagagcgtacccgggtgtcagcaacatcattcacgccgcgcatcagaacgacgtgaacaaactgctgtttctcggatcgtcctgcatctacccgaaactggcaaaacagccgatggcagaaagcgagttgttgcagggcacgctggagccgactaacgagccttatgctattgccaaaatcgccgggatcaaactgtgcgaatcatacaaccgccagtacggacgcgattaccgctcagtcatgccgaccaacctgtacgggccacacgacaacttccacccgagtaattcgcatgtgatcccagcattgctgcgtcgcttccacgaggcgacggcacagaatgcgccggacgtggtggtatggggcagcggtacaccgatgcgcgaatttctgcacgtcgatgatatggcggcggcgagcattcatgtcatggagctggcgcatgaagtctggctggagaacacccagccgatgttgtag

SEQ ID NO: 132517 - DNA, 783 bp, Homo sapiens
gtgacaaggtgcttaagcaatcttcttgaaaccgaaattcaatttgcctccattggtgcaaccaccaaagaagatgctgccaagacacttgagccgttaagcgccaaatacaaaaacatcgcgggtgttgaagaaaaattaacctataccgatacctacgcgcaggaaaacgtgactatcgatatggaaaaagtggattttaaagccctgcaggtatttctaggaatcaacgtttctgctgaagatgccaaaaaaggtatcactatggcgcaaatggaactggctctatgtaaatttcagttacatgtatctggtaataaatacacaatattactgattcttacaagtataaacccaggaaaatccagaaaacgagaatgtccagtcctaagagagtctaacagcaccagcgaacgtattgaccaggtctatctggcggcggcgaaagtgggcggcattgttgccaacaacacctatccggcggatttcatctaccagaacatgatgattgagagcaacatcattcacgccgcgcatcagaacgacgtgaacaaactgctgtttctcggatcgtcctgcatctacccgaaactggcaaaacagccgatggcagaaagcgagttgttgcagggcacgctggagccgactaacgagccttatgctattgccaaaatcgccgggatcaaactgtgcgaatcatacaaccgccagtacggacgcgattaccgctcagtcatgccgaccaacctgtacgggccacacgacaacttccacccgagttaa

SEQ ID NO: 132518 - DNA, 435 bp, Homo sapiens
gttgctggaaccggttttatccgtgaaaaccatccggggcaggtgatgaataaattgcgccgtctgtttccccgtgcgcgcccggaaagccaggagttgaatatcctgcgcgggattctggcttctattgagcagcagaataaaggtaacaaggccgaataacagccgttgcctgatgcgacgcgtaatgcgtcttatcaggccaatccggttaaacggcaagcgcccaggaccatacccccagcgtaagacgtgcagcgcggcccattcaaaaaagccggactcatccagcagcaggctgatgataatgacggcgataaacgcagccgtcgcgttccagacgatatcccacaccaccggaatatcacccggatggaccacgcccgtaactaacgccagtactgcgcgacgaatttgttcgataaccgcagccat

SEQ ID NO: 132519 - DNA, 1752 bp, Homo sapiens
ctagtttggccccaagagttgttgccccaaagtttttcccccttttggggaaatcgcccccaaccgggaaaacgggggggctttaataagagcccgtttctttttgattcgaagcaggtttggaaacactgttgttggagaatcgagttgaacccttcttttgaagcgaccacgaccattaccacagcgtgagacgtgcagcgccgcccattcaaaaaagccggactcatccagcagcaggctgatgataatgacggcgataaacgcagccgtcgcgttccagacgatattccacaccaccggaatatcacccggatggaccacgcccgtaactaacgccagtactgcgccgagcgttgcactccagccgatgcctaaacctttcggctgccagataaccaggtgagacccataatgtggcggttgtgttcgttgtgcgggttctgaaatgggtgtaataagtctgtgttcgtccgtgtgtgtatgataaggtggaatgtctccaaaggggccgttaatttcgtcgcctaacgtggtcacctcttgtgctcccatgtagccaccatcgtatttgtcggtttgtaatgtccatagtgtctccctggtgagaattcctccatgcacgccggggccccaggttggccccaagagcctgtggccaatggccctcggcccagggtttcggaatttgcttaaggaaggaatgcccccccgaacccttccagagcctttgccttgggaaatttcacaaagtggaatcccctttgtctcctctccaagtctcttcttggaaagtatttctaagggaccactgtcgagtgtcggtaccgatcgagcgtttggtttggcgccggttctgcaggacagcagccgtccaccgcctgcggtcacgcgcgaattcggcagcggaatttcaaaggtgcagtggctgcgcatggcggcctcaggggtcctggcgattggtgccgaaggtctggcgttttccggtctgggtgagtcttcgccgctggtcgtgagtgcatcgttggcagccatcgcgctgggggggctggagacgctcaagaagggctggatcgcgctgcgaacccggtctctgaacatgaacctgctgatgacgatcgccgtcatcggcgccgcgctcatcggccagtggccggaggccgcggtggtgatctggctgttcggcatcgccgagatgattgaagcgctgagtttggaccgggcccgcaacatgcgagatcgtgggtgcgagtggttcatcgacggattcaccgggtagatctttaagtcggagagagggaatccgatggccggaaagatcgtcggtactattaagacgcggttcccgcagaaccgcgtccgctgccgaagttgattatcaaacgtaaacccgaatccatcttcgactaccgtttcgaagactttgagattgaaggctacgatccgcatccgggcattaaagcgccggtggctattggcaggacgggatggtgtttgcggtttattggtgagtgggctggctgccagacggaacgcggaaactgcttgcgttaaacgactcgcctgttcttccagcgcagcggcggcggcagctgattcctgcaccagcgatgcgttctgttgcgtgacgcgatccatttccgaaaccgccaatgcgacttgatcgatgccacggctctgttcatccgatgccgatgcaatctcgcccataatgtcagtcacgcgagtgacagcattgacgatattgttcat

SEQ ID NO: 132520 - DNA, 2182 bp, Homo sapiens
tgccagagtgaaaatgcctcagagctaactggataatcatacagtacatgcaggttataaaaccagcacgtccttgcaatagtttcagtatggtattagcattgatgcgttagatgatggctatctcactccagtcagagccaccaactcagggctggaaagtaaaaaaccgacgcaaagtcggtttttttacatccggattcggacaaggcttaatatgacgatgacccagtgaaagtatataaatcgtcactgcgatatataccgaagtgctccctccgccagctgaagaaatcgctaattcttgcaatgttagcactggctaatagtattgagctgttagataagaactctctcactccagccagagccaccaactcagggctggaaagtaaaaaaccgacgcaaagtcggtttttttacgtcctgattcagacctcctttcaaatgaatagccaactcaaaattcacacctattaccttcctctgcacttacacattcgttaagtcatatatgtttttgacttatccgcttcgaagagagacactacctgcaacaatcaggagcgcaatatgtcatttctgttacccatccaattgttcaaaattcttgctgatcccacccgtctgggcatcgttttactgctcagcgaactgggagagtctatgcgtctgcgatctctgcactgctctcgaccagtcgcagcccaagatctcccgccacctggcattgctgcgtgaaagcgggctattgctggaccgcaagcaaggtaagtgggttcattaccgcttatcaccgcatattccagcatgggcggcgaaaattattgatgaggcctggcgatgtgaacaggaaaaggttcaggcgattgtccgcaacctggctcgacaaaactgttccggggacagcgctatctttgtcctgaccatcgtattggttatctggcagccgaaaggtttaggcatcggctggagtgcaacgctcggcgcagtactggcgttagttacgggcgtggtccatccgggtgatattccggtggtgtggaatatcgtctggaacgcgacggctgcgtttatcgccgtcattatcatcagcctgctgctggatgagtccggcttttttgaatgggcggcgctgcacgtctcacgctggggtaatggtcgtggtcgcttgctgtttacctggattgtcctgctcggtgctgccgttgccgccctgtttggcaatgatggcgcggcgcttattttgacaacgattgtcatcgccatgctgctggctttaggggtcagtaaaggcactacgctggcgttcgtgatggcggccgggcggcagctcgaacagcgcggtgatgtggaactggtattacgcacccgcgacgagctgaacctgctggacagccgcgccgtgcatgatttctttgccagcgaacgtattgaccaggtctatctggcggcggcgaaagtgggcggcattgttgccaacaacacctatccggcggatttcatctaccagaacatgatgattgagagcaacatcattcacgccgcgcatcagaacgacgtgaacaaactgctgtttctcggatcgtcctgcatctacccgaaactggcaaaacagccgatggcagaaagcgagttgttgcagggcacgctggagccgactaacgagccttatgctattgccaaaatcgccgggatcaaactgtgcgaatcatacaaccgccagtacggacgcgattaccgctcagtcatgccgaccaacctgtacgggccacacgacaacttccacccgagtaattcgcatgtgatcccagcattgctgcgtcgcttccacgaggcgacggcacagaatgcgccggacgtggtggtatggggcagcggtacaccgatgcgcgaatttctgcacgtcgatgatatggcggcggcgagcattcatgtcatggagctggcgcatgaagtctggctggagaacacccagccgatgttgtcgcacattaacgtcggcacgggcgttgactgcactatccgcgagctggcgcaaaccattggcaaagtggtggatacggccaagcgtttcatagccaacacgatcgctatgcatcaaccagaccggagaagggattgcccgttcccacgggttaagcggcgagtcgatggccaactgattcgccggggctggtag

SEQ ID NO: 132521 - DNA, 1446 bp, Homo sapiens
gccgtcacgccgccgatatcaattaaataccggtgaatacccgcaatcacgccggtaatgatgcctacccacgggccaaacagaatcccgccggacatcaccgcgataatacgtacgttcaccagcgagccttctacgggaacgccggaccaggtgctgaacagggcgaacagcgagaaaatggcggtaacggcgagcaattcttttggggagtgcgccgacttgtgcaacagttcgcgaaacaggcggatacggatgagaaagaacaggcagataagcattaacgctgcccgatcgaagaccgccagcagcatgttgaatatttcgtgcacgggtgactctgaataaggattaaacctctatgataggtaacctgaaggctgatgaccagcaggccgtttttgaggaaaaaccacaattttaaaaggggattgatagataaatggtgtattagcaatgcatctcttgataatgcacttctggttagtaaatttattgaaattattatgttaataaaatgagtggtaattttcttgttagcgcagataaatttcctgtttttaaagcagagttcctcatttaacggcattaataaaaaggtttaaaacgctgggcagaccgaaattaattcggctatttttaaaacagccacccatcggggagcgtcgctttgacgggccggggcgctaacgtttatttggaggaaattatgggtggcacttcgcccctgaacgtcgctttacgcgcattgatcgtctcccgccctacgtttttaacatcaccgctgaactgaaaatggctgcgcgtcggcgcggcgaagatattatcgatttcagcatgggtaacccggacggtgcgactccgccgcatatcgtcgaaaaattatgtactgtggcccagcgcccggacacgcatggttactccacttcacgcggcattccgcggttacgtcgcgccatttcccgctggtatcaggatcgctacgacgttgaaatcgacccggaatcagaagccatcgtcactattggttcgaaagagggcctggcgcatctgatgctggcgacgctggatcatggtgacacggtgctggtgccgaatccaagttacccgatccatatttatggcgcggtgattgccggggcgcaggtacgctcagtgccgctggtggaaggtgtcgatttcttcaacgaactggaggtcgatgtgcctgcttccctttccgccatgatttttctcctccttcctcaactctgcttcctggccaaggccaccaaccctgtaatcaatccccttattccatattactcccctgccgatctcttccattcctttggaactcctgcctgcaggtcagctaaagagagagataagccccagtacaataataactggagacttcaacatcccactttcagcattggacagatcatcacagcagaaaattga

SEQ ID NO: 132522 - DNA, 320 bp, Homo sapiens
gacccacgcgattgtcgtctgaaggtcggcaaagagatgtttacattgtttgggccacagtttgtgcgcgaacttcaacagcgtggttttgatatctttcttgacctgaaattccacgatatccccaacactgcagcgcacgctgtcgctgctgcagctgacttaggcgtgtggatggtgaatgttcatgcctctggtggggcgcgtatgatgaccgcagcgcgtgaggcactggttccgtttcgccccgatgcaccgcttttgattgctgtgccagtatgacgcagcataaaagccagcgacctggtcgttcctctaga

SEQ ID NO: 132523 - DNA, 796 bp, Homo sapiens
ttatgggatgcagctgctgcctgcagttctgacaatatatgaattactcaatctctctgaatgtcgtttcctcttccgctggaatatccccattgcatagttggcgttaagtttgacgtgctcagccacatcgttgatggtcagcgcctgatcatagttttcggcaataaagcccagcatctggctaacataaaattgcgcatggcgcgagacgctgtttttgtgtgtgcgcgaggttttattgaccagaatcggttcccagccagagaggctaaatcgcttgagcatcaggccaatttcatcaatggcgagctggcgaatttgctcgttcggactgtttaattcctgctgccagcggcgcacttcaaacgggctaagttgctgtgtggccagtgatttgatcaccatgccgtgagtgacgtggttaatcaggtctttatccagcggccaggagagaaacagatgcatcggcagattaaaaatcgccatgctctgacaggttccggtatctgttagttggtgcggtgtacaggcccagaacagcgtgatatgaccctgattgatattcactttttcattgttgatcaggtattccacatcgccatcgaaaggcacattcacttcgacctgaccatgccagtggctgttgcaactcgcatgtcctcctttcttatggccactgtcaacttgggtgacaccaacttccggctgctgctggtccttagtatgccaccatcctctgttgattcccttcttggtgccaacatctctgcatattgcacctttatttagcttt

SEQ ID NO: 132524 - DNA, 756 bp, Homo sapiens
atgcatgaagtgggattagatcctgaaacacgccaccgttatccggcggagttctctggtggtcagcgacaacgtattgcgattgccagggcattaattcttaagccctcgctgatcatacttgatgaaccgacatcatcactcgacaaaacggtacaggcgcaaatattgacgctattgaaatcattgcaacaaaagcatcaactggcctatttgtttatcagccacgatttgcacgttgtccgcgcgttatgtcatcaggttatcatactgcgacaaggggaagtagtggaacaaggaccgtgcgcgcgcgtgtttgccacaccgcagcaggagtatacggttcatccaaacaaacacaattctgaaatcggttttgccaaagaaaatgccgcaggtatcccgatggatgccgccgagcgtaactataaagatcctaaccacaagccggagctggtttttgcgctgactgatccgacgctgaccgtacaggcgtataccgttaatcctcaaacagagcgggtgaaaatgtactggcaaaaagccaatggcgaagcgtggggaacgttacatgctctgctggcggatattaatagtcagggtcaggtgcagatggcgatgaacggcggcatctatgatgaaagctatgcgccgctcggtttgtacatcgaaaacggtcagcagaaggccccggtgtgtgatgttccccctcctgtgtccaagtattctcattgttcaattcccacctatgagtga

SEQ ID NO: 132525 - DNA, 1065 bp, Homo sapiens
atgggtcgcgagaatgcgtacgccagaagcgttagtagacgctattcgcatttaccaacagagcgcatcgacagaggtgtctacgacctgagcgtgcgcaaaacagttggcgttaagtttgacgtgctcagccacatcgttgatggtcagcgcctgatcatagttttcggcaataaagcccagcatctggctaacataaaattgcgcatggcgagaaatattgggatgaaggttcatccaaacaaacacaattctgaaatcggttttgccaaagaaaatgccgcaggtatcccgatggatgccgccgagcgtaactataaagatcctaaccacaagccggagctggtttttgcgctgacgcctttccttgcgatgaacgcgtttcgtgaattttccgagattgtctccctactccagccggtgcacatccggcgattcgctaaaaaccaggcgcggacgcccacagcatgggccacgttcacggcttcagcggtggacataatcgctgtcagtgtatccattgacgttttcttttcgccgttggcacgcagatcgcggaaggaccgagccgatagaaccacttctaatgacttcctgaaagactaccaggtgctgcgttttcggaagaagaatagcgttttccagagatccccgtaccggaagttcttttacctgtttcgcgccacttccggtgcccatcatcaagaaggtctggtcatgacgttaactgcttcatcttcttcccgcgctgttacgaattctcctgtggttgttgcccttgattatcataatcgtgatgacgcgctggcctttgtcgacaagatcgacccacgcgattgtcgtctgaaggtcggcaaagagatgtttacattgtttgggccacagtttgtgcgcgaacttcaacagcgtggttttgatgactctagagatccccgtaccgcaggtatcattaacgtttggagaactgcggacgacgacgtgtttacgcagaccgactttcttacgttcaacctgacgactctagagatccccggtaccggcgtgcatcgaacattatgtgtttag

SEQ ID NO: 132526 - DNA, 999 bp, Homo sapiens
atgtctcgtgttgctaaagcaccggtcgttgttcctgccggcgttgacgtaaaaatcaacggtcaggttattacgatcaaaggtaaaaacggcgagctgactcgtactctcaacgatgctgttgaagttaaacatgcagataataccctgaccttcggtccgcgtgatggttacgcagacggttgggcacaggctggtaccgcgcgtgccctgctgaactcaatggttatcggtgttaccgaaggcttcactaagaagctgcagctggttggtgtaggttaccgtgcagcggttaaaggcaatgtgattaacctgtctctggccatactgcagacgagtactcaagggtctgaggtgtgtggaccgtatctgggaatccaacggattgctccaacgtcgcagttcccaaagcctagcgcgactacagaagatgcagcatccaaaatagcactattaagtgttgaactttcaagtgctttggatagtattgatgttaacaaaactacaacggatgtaagtatccttaatcgaagtattatcacacctggtaataatgttctggttaataatactggaggtgacttaaacataatttcgtccgactctattctaaatggagcgactaaactcgtcagcggcacaaccacgctgaagctttcagaaaatacaatctggaatatgaaagatgactccgttgttacccatctgactaattcagacagtattatcaatctttcgtatgatgatggtcaaacatttacccaaggaaaaacattaaccgtaaaaggtaattatgtcggtaataatggtcagcttaatatccgcaccgtattaggtgatgataaatcggctacggacagacttattgttgagggtaatacttcgggttcaactaccgtctatgtgaaaaatgctggaggaagcggcgcggccacgctaaacgggatcgaactcataactgtgaatggcgatgaatctccagcagatgccttcagataa

SEQ ID NO: 132527 - DNA, 1006 bp, Homo sapiens
atgttaagggtctaccattccaatcgtctggacgtgctggaagcgttgatggagtttattgtcgaacgcgaacggctggacgatcctttcgaaccagagatgattctggtgcaaagtaccggtatggcacagtggctgcaaatgaccctgtcgcaaaagtttggtattgcggcaaacattgattttccgctgccagcgagctttatctgggatatgttcgtccgggtgttaccggaaatccccaaagagagcgcctttaacaaacagagcatgagctggaaactgatgactctgctgccgcaattgctggagcgcgaagactttaccctgttgcggcattatctgactgacgatagcgacaagcgaaaactgttccagctttcctcaaaagcggcggacctgtttgaccacgtgtcgggagcaagtgtgagcagcaaagtggaacaactgcgtgcgcagttaaatgaacgtattctggtgctggacggcggtatgggcaccatgatccagagttatcgactgaacgaagccgattttcgtggtgaacgctttgccgactggccatgcgacctcaaaggcaacaacgacctgctggtactcagtaaaccggaagtgatcgccgctatccacaacgcctactttgaagcgggcgcggatatcatcgaaaccaacaccttcaactccacgaccattgcgatggcggattaccagatggaatccctgtcggcggaaatcaactttgcggcggcgaaactggcgcgagcttgtgctgacgagtggaccgcgcgcacgccagagaaaccgcgctacggttgccggtgttctcggcccgaccaaccgcacggcgtctatttctccggacgtcaacgatccggcatttcgtaatatcacttttgacgggctggtggcggcttatcgagagtccaccaaagcgctggtggcaggcattgtgctcatgcctgcaatcccagcactttgggaggctgagccaggtggatgtgcttga

SEQ ID NO: 132528 - DNA, 1108 bp, Homo sapiens
atggaaggtcaacagcacggcgagcagctaaagcgcggccttaaaaaccgccatattcagcttatcgcgctgggtggcgcgatagggaccgggttattcctgggtagcgcctccgtaatacagtccgcagggccagggattatcctgggttacgccattgctggttttatcgcctttctgatcatgcgtcagctgggtgaaatggtggtcgaagaacctgtcgcaggctcctttagccactttgcttataaatactggggcagttttgccggtttcgcctctggctggaactactgggtactgtacgttttagttgccatggctgagctgactgccgtgagtaaatacattcagatctggtatccggaaatccccacctgggtttctgccgacgtattctttgtggtgattaacgccatcaacctgaccaacgctaaagcgacagttagcaacctgtgggatcagggtgttttcctgccgcacggcttcaccgggctggtgatgatgatggcgattatcatgttctcgttcggtggtctggaactggtggggatcaccgcagcagaagctgataacccggagcaaagtataccgaaagcaactaaccaggttatctaccgcatcctgattttctatattggttcgttagccgttctgctctcactgatgccgtggacccgcgttaccgccgataccagtccgtttgtgctgatcttccacgagttaggcgatacctttgtggcgaatgcgctgaacatcgtggtactgactgcggcgctctccgtgtacaacagctgcgtatattgcaacagccgtatgctgtttggtctggcacaacagggtaatgcgccaaaagcgctggcgtctgtcgataaacgtggtgtaccagtaaataccattctggtgtctgcactggtaacggcgttgtgcgtactgattaactaccttgccccagagtccgctttcggactgttaatggcgctggtggtatctgcactggtaatcaactgggcgatgattagcctggcgcatatgaaattccgtcgcgccaagcaggaacaaggcgtggtaactcgcttcccagctctgctttatccgctgggtaact

SEQ ID NO: 132529 - DNA, 3936 bp, Homo sapiens
atgaacatcgatgcaaaaatcctcaataaaatactggcaaaccgaatccagcagcacatcaaaaagcttatccaccacaatcaagttagcttcatccctgggatgcaaggctggttcaacatacacaaatcaatgaaagtaatccagcatataaacagaaccaaagacaaaaactacatgattatctcaatagatgcagaaaaggcctttgacaaaattcaacagcccttcatgctaaaaactctcaaaaaactagtggctggcatgatggcagtggctgctcctgacgacccgccaccgccatcggtatcatcttccaagccatcaacagtggcacctccgggccgcatctccccgtcggggcgcgccctctgcaccagcttacccagtgccttgagcagctcgtcgaaattctcgctgctgcgcatcttccaggtgccggcgaagttgggcatggtggcggtggcggcggcggcaggtgtgaacgccatgctgaggaaagtggccgtagcggctgcgtccaagccgcacgtggagatccgccaggacggggatcagttctacatcaagacatccaccacggtgcgcaccactgagatcaacttcaaggtcggagaaggctttgaggaggagaccgtggacggacgcaagtgcagggtgaggccccagagccactacagcgtccccgtgtccccgctcggtgcccatggcccactgctgctggaggaacctgtgtctccctttgcagcctgtggcgcgccttccttgcaggtgcctcaaggcgcgcagcgctgggcgcatagcgccagtctccgccttgcgagctcagagtgtgcccgctgcacctacgctgtcggtccctcacgcaacagcctctgcccccatgcccaatttcgtcggcacttgaataatgctcagcgagctgaaaatttctcctatctgctcaaggcactggggtacgaactggcaagaattcttccgcttcttaatgagcgcttttaccctgtgctttccattagaacccatactggggttagcttcgttttcattcagtgcctggcctctgtcctcgatatcagtttagccacttgggagaatgagaacaagatccgctgcacgcaaactcttcttgaaggggacggccccaaaacatactggacccgtgagctggccaacgatgaacttatcctgctgattgaatttggtgtggtcgccgcacctgagggccagcagtccacagctgtctaccactggtgcaataccgcggtgctggacccactggcatgtatgttactaattttgatgaatcttgccaaattgctttccacagagcttgggtaccgagctcgaagctttccctcaacccaaaaaaacctttttaaaaatacaagtcgacactgcatgttcactcagtgcggcagcgaaaatgacgtctactcaagcggtagcctcactcacggcacgcaggtgaataaactgctgcagaacatccgggagcgcgttaagacgaccattttcagccataacccgaatcaggttctgaccgttttcgtccagttgctcaccacaaactgcgataaacgactcggcgagcgtttctggcgcaagcgcgccagagagaagctctgccatttgttcgtttttggttacctcggcggcaaacgccagcatgtcctgccagcgttctacactttggtgttcgacggcaaagtcaaaagctgctttggcttcagcgacaagtttatccacgatgtcgctgttagcagcttcatccacggaacgttcgatgatcttctcggcgccagcaacagccaggatagcaacttgcttacgcagctcttcacgggcacgtttacgctcggcttcaatttccgcctgcgcctgggccacgattttactggtcggtcgcgctggcctttgcaaggtcaaggtccttatgtgctcgttctgcggaagcaaggccgtcagcaatttctttttgacgtttttcgatggctgccattaatggcggccatacgtacttcatgcagaacagaacgaacaggacaaacgcgatggcctggccgaggattgttgcgttcagattcaccacacaagggtctgagccaggagtcgtacccttatgcagaaaccatgcgcaaagtgattggtcaccttgcacacggtaatctggaatataagcacccttacctggaagaccgcgacgttaaacgcgtgggctacctggtggtgtcgaccgaccgtggtttgtgcggtggtttgaacattaacctgttcaaaaaactgctggcggaaatgaagacctggaccgacaaaggcgttcaatgcgacctcgcaatgatcggctcgaaaggcgtgtcgttcttcaactccgtgggcggcaatgttgttgcccaggtcaccggcatgggggataacccttccctgtccgaactgatcggtccggtaaaagtgatgttgcaggcctacgacgaagtccgtctggacaagctttacattgtcagcaacaaatttattaacgccatgtctcaggttccgaccatcagccagctgctgccgttaccggcatcagatgatgatgatctgaaacataaatcctgggattacctgtacgaacccgatccgaaggcgttgctggataccctgctgcgtcgttatgtcgaatctcaggtttatcagggcgtggttgaaaacctggccagcgagcaggccgcccgtatggtggcgatgaaagccgcgaccgacaatggcggcagcctgattaaagagctgcagttggtatacaacaaagctcgtgtaagaatgagtgcagaaccatcaccgccaccggttgccgcaagcgcgacacccaccgccgagcttacggtgctgacgctggtcgcggaggaactccccgccgaaaccgacgttgctgccgaccctgccgcttcgcccacctgtacaggcatgcggccgctgcactatgcggcctggcagggccggaaggagcccatgaagctggtgctgaaggcgggctcggccgtgaacatcccgtctgatgagggccacatccccctgcacctggcggcccagcatggtcactatgatgtgcaccagccctacctgcgtcagcgcacggaagaccgccggacgcggcactacctggcgcaatccttcgcgcagtattcgctccggcagtgggcgtttcactttctgctcgacaatatcacgcccgatatccagcaaattgtgatagcgcacaccagaaggacaggtggtttcacaattacggcaagtgaggcagcgatcgagatgctcctgtgttttaagcgtgacttcgttgccttacagcacctgtttaatcagatagatgcgcccgcgcgggccgtccagttcatcgcccagaagctgataggttgggcatgttgcgaagcagcgcgcaaaaatcagctgccacacaacacaacaaagcgaagcctactcatgagcatcttgtacgaagagcgtcttgatggcgctttacccgatgtcgaccgcacatcggtactgatggcactgcgtgagcatgtccctggacttgagatcctgcctaccgatgaggagatcattccttaccagtgtgacgggttgagcgcgtatcgcacgcgtccattactggttgttctgcctaagcaaatggaacaggtgacagcgattctggctgtttgccatcgcctgcgtgtaccggtcatggtattcccgggcctgcgtctgagccgtgaagccttcctcaccacggccgaatttgggacccaggagctccggcggcccgcccagctgcggctgcaggtgtaccggctcctcagcacagcaggcaggcaccacccggctcagaactcacccatccgggtcctggaagttgacattgatcttcttggtggaacccaggagctctggggatggaaggagactcactga

SEQ ID NO: 132530 - DNA, 1741 bp, Homo sapiens
ggcgcgaacctcctggatcttacatttagcgatgcgcagcaggacgctcagagcgctaaacggtcacgccagggccttcacagatgacgcgtacacccgcgaccagtccagctggtcctgcgcccgctcccctatagtggactcgcttgcgggcgggagaacattgcgctatgggcaaaatattctcttaaacgggccgatgagtcgggcagcataaattctcctgtaaaaaacggaatatcccgtacttttgggttgataaaaaatagtcatgagcgaactattagttatttccattggcttgaattcgttacctgctcaaatcactttccagaagcaatgtgcgacatcgtgagccatgtcagtaagtggttaaattcccagtggtagcatgcctcccgccatttctaactagccggagaagtaatggacctgcttttattgagtaactcgacgctgccgggtaaagcctggctggaacatgcactgccgctaattgctgaacagttgcagggtcgccgctcagcggtgtttatccctttcgctggcgtaacgcagacctgggatgattacacagcgaaaacggttgcggttctcgctccgctgggtatttctgtcaccggtattcatagcgttgtcgatcccgttgccgcgattgaaaatgctgagatcgtgattgtcggcggcgggaatactttccagttgctgaaacagtgccgcgagcgcgggctgctggcaccaattactgacgtggttaaacgtggcgctctgtatattggctggagcgcaggcgctaaccttgcttgcccaactattcgtaccaccaacgatatgccgattgtcgatccgcaaggtttcgatgcgctaaatctgttcccgctgcaaatcaacccgcacttcaccaacgcgctgccggaaggccataaaggtgatcctcgtttgtttcgttattcgcgaactgctggtcgtcgcgccagaactgacgattattggtctaccggaaggtaactggatcacagtgagtaaaggcatgctcgccaaatcccctgttgattctaactccacccagctcaaagaggctgaagaagagcgactaaaagctgcacagtatggtttacaactagtagagagtcaaaatgaattacagaatcaattggataaatgtcgtaatgaaatgatgaccatgactgagatgcagctgcgaaataaaaaacgccgccgtgaactgggcaatctgattaaacgctttcgtagcggcgcggagtcgctgcccgacgcggtggtgctgaccacggaagagggcggtattttctggtgtaacggtctggcgcaacaaattcttggtttgcgctggccggaagataacgggcagaacatccttaacctactgcgttacccggagtttacgcaatatctgaaaacgcgtgatttttctcgcccgctcaatctggtgctcaacaccgggcggcatctggaaattcgcgtcatgccttatacccacaaacagttgctgatggtggcgcgtgatgtcacgcaaatgcatcaactggaaggggcgcggcgtaacttttttgccaacgtgagccatgagttacgtacgccattgaccgtgttacagggttacctggagatgatgaatgagcagccgctggaaggcgcggtacgcgaaaaagcgttgcacaccatgcgcgagcagacccagcggatggaaggaactgtgaagcggtaccgagctcgatag

SEQ ID NO: 132531 - DNA, 3091 bp, Homo sapiens
atgaaaaaactgtccggcggtatccgtaccgctctggcacagtatcgtgaactggcagcgttctctcagtttgcatccgaccttgacgatgcaacacgtaagcagcttgaccacggtcagaaagtgaccgaactgctgaaacagaaacagtatgcgccgatgtccgttgcgcagcagtctctggttctgttcgcagcagaacgtggttacctggcggatgttgaactgtcgaaaattggcagcttcgaagccgctctgctggcttacgtcgaccgtgatcacgctccgttgatgcaagagatcaaccagaccggtggctacaacgacgaaatcgaaggcaagctgaaaggcatcctcgattccttcaaagcaacccaatcctggtaacgtctggcggcttgccttatggcaggccgcaaggcattgaggagaagctcatggccggcgcaaaagagatacgtaataagatcgcaagcgtccaaaacacgcaaaagatcactaaagcgatggagatggtcgccgcttccaaaatgcgtaaatcgcaggatcgcatggcggccagcccgtccttatgcagaaaccatgcgcaaagtgattggtcaccttgcacacggtaatctggaatataagcacccttacctggaagaccgcgacgttaaacgcgtgggctacctggtggtgtcgaccgaccgtggtttgagcggtggtttgaacattaccctgttcaaaaagctgctggcggaaatgaagacctggaccgacaaaggcgttcaatgcgacctcgcaatgatcggctcgaaaggcgtgtcgttcttcaactccgtgggcggcaatgttgttgcccaggtcaccggcatgggggataacccttccctgtccgaactgatcggtccggtaaaagtgatgttgcaggcctacgacgaaggccgtctggacaagctttacattgtcagcaacaaatttattaacaccatgtctcaggtttcgaccatcagccagttgctgccgttaccggcatcagatgatgatgatctgaaacataaatcctgggattacctgtacgaacccgatccgaaggcgttgctggagcagtgcagctgcatgcttaggtcaccggcatgggggataaccagtacagatacaactcgagctcgtaccgacttggcatgtcccatctggcttcttttagatccctaccccaagcttatgggtaatgcgccaaaagcgctggcgtctgtcgataaacgtggtgtaccagtaaataccattctggtgtctgcactggtaacggcgttgtgcgtactgattaactaccttgccccagagtccgctttcggactgttaatggcgctggtggtatctgcactggtaatcaactgggcgatgattagcctggcgcatatgaaattccgtcgcgccaagcaggaacaaggcgtggtaactcgcttccctgctctgctttatccgctgggtaactggatctgcctgctgtttatggcggcggtactggtgattatgctgatgaccccaggaatggcgatttcggtatacctgatcccgcccttacaaaccaacaccttcaactccacgaccattgcgatggcggattaccagatggaatccctgtcggcggaaatcaactttgcggcggcgaaactggcgcgagcttgtgctgacgagtggaccgcgcgcacgccagagaaaccgcgctacgttgccggtgttctcggcccgaccaaccgcacggcgtctatttctccggacgtcaacgatccggcatttcgtaatatcacttttgacgggctggtggcggcttatcgagagtccaccaaagcgctggtggaaggtggcgcggatctgatcctgattgaaaccgttttcgacacccttaacgccaaagcggcggtatttgcggtgaaaacggagtttgaagcgctgggcgttgagctgccgattatgatctccggcaccatcaccgacgcctccgggcgcacgctctccgggcagaccaccgaagcattttacaactcattgcgccacgccgaagctctgacctttggcctgaactgtgcgctggggcccgatgaactgcgccagtacgtgcaggagctgtcacggattgcggaatgctacgtcaccgcgcacccgaacgccgggctacccaacgcctttggtgagtacgatctcgacgccgacacgatggcaaaacagatacgtgaatgggcgcaagcgggttttctcaatatcgtccgcggctgctgtggcaccacgccacaacatattgcggagatgagtcctggccgtaaaaggttaacgccgcgcagaatcgagctcggtaccctcgacgctgccgggtaaagcctggctggaacatgcactgccgctaattgctgaacagttgcaggtcgccgctcagcggtgtttattccctttcgctggcgtaacgcagacctgggatgattacacagcgaaaacggctgcggttctcgctccgctgggtgtttctgtcaccggtattcatagcgttgtcgatcccgttgccgcgattgaaaatgctgagatcgtgattgtcggcggggggaatactttccagttggctgaaacagtggccgcgaagcgcgggctggtggcaccaattactggacgtgggcggcaggggctaaacttggttggccaaatattcgtaccaacaacgatatgccgattgtcgatccgcaagggtttcgatggcgctaaatctgttcccgctggcaaatcaacccggcacttcaccaacgcgctggcggaagggcataaaggtgaaacccgtgagcagcggtattcgcgaactggtggtcgtcgcgcccgaactgacgattattggtctaccggaaggttactggatcacggaaaaacattaaccgtaaaaggtaattatgtctataatggtcatttacgcaccgtattagtgatgaaatcggacggagatagtagtatacttcgggttcctagctatgtgaaaaatgctggaggaagcggcgcggccacgctaaacgggatcgaactcataactgtgaatggcgatgaatctccagcagatgccttcagatga

SEQ ID NO: 132532 - DNA, 384 bp, Homo sapiens
ctggttgattgagatgctgatcctacagtactcccgctgtgcctcagcagtgagctgggatgtaaaggcaggaggcttgctggggtctgacacttccctgcccttcttcaggagggacacatctggggctatatgaggaggacagctttcatcctgggctatggacttctgtcatttgcggccttctggaactcaatgacatggcatcttcagagactttggggtgcttgtggctacttttggcatgcccaatgggagaggctgctgactacatttgaagggaacgagtggatcctcatctttatagggggcatcctgtgaaactgcgccaggctatccacacagatcttttcaaccagtgcatgatatctttgcccatggtgg

SEQ ID NO: 132533 - DNA, 1149 bp, Homo sapiens
ggcacgaggagatgctgatcctacagcactcccgctgtgcctcagcagtgaggtgggtgtaaaggcaggaggcttgctgtggacttgacactttgcctgcgccttctccaggtagggacacatctggggctctatgaggaggacagcttttatcctgggctctggacttctctcatttgtggccttctggaactcagtgacatggcatcttcagagattttggggtgcttctggctacttttggcaagcccagtgggagaggctgctgactacatttgaagggaaggagtggatcctcttccttataggtgctatccaagtgccttgtctcttcttctggagcttcaatgggcttctattggtggttgacacaacaggaaaacctaacttcatctctcgctaccgaattcaggtcggcaagaatgaacctaatattacctgccgtctgtacaaccttgtggtctacacaatgactacagagctacattggaagatgtcattgcattctgcagaagctgaggttcagaaatcgtccagtgactagctcaagatcagattgctgctaggaaacagagccagggctcatcccatctgacaccaagtccagtgctcctgtacctacatgcaccctcaagtgggcacacaagcaggaaagaacctcacgaggccatttaatctttggctgtttcaaggaaggactggcccctgaactaacacatcagaaacagatcctcaaagtggggagcttgaatgctacctggtgttcctatgatccattcctggctctggtttactcttccacttgcctgaatggctagtttcacaacctcctcccctaactgctggcagagggagggggccttgctttccattttactaaggaaaattttaggcctgggggtgggtgggttcatgcctgtaatcccagcactttgggaggccgagatgggcaaatcacttgagctccggagttcaagaccagcctgggcaacatggcaaaaccctgcctctactaaaaatacaaaaattagctgggcatggtggcgcatgcctggaggagaattgcttgaacctgggaggcagaggttacagtgagccgagattgcaccactgcactccagcctgggcgacagagcaagactctgcctc

SEQ ID NO: 132534 - DNA, 373 bp, Homo sapiens
atgccatatcggggatcctctagagtggcctgtcaggaaggcaaactcagtgggagcggcgtggtcgcgccggatgaacgattgccgtttgctcagacggcagtaatgggcgttcaacactcggtggcgatgtttggcgcgacggtgttaatgccgattctgatggggctggatcccaatctttccattttaatgtcggggatcggcacgttactgtttttctttattaccggcgggcgcgtccccagttatctcggctccagcgcggcttttgtcggcgtggtgatcgccgcgacgggctttaacggtcagggcattaacccgaatatcagcattgcgctgggcgggattatcgcctgtgggctggacgaaa

SEQ ID NO: 132535 - DNA, 397 bp, Homo sapiens
atttttggggaccagcctaggaatgggcctcttactcgtgcaggccaaagccatgcagcttctgtactgcctgaagaccgagcactctgaggacgatgtgcagagcaagcagtggctcacccatttccttgaccaatttaccaacattaagaacagcctggtcttgaagaaaattgaggtacctggcggtttgggtttacaaggaggccaggagaaggtgggagggacgaggaagatttgcacccagaaccctaacaaaagtactgcatgactacttgatggggcccttgcctcaaagccgggtttgctctgctgtatttggtactcaatccaattttcttaaccctgacagatgctagaaatcgtgaatcctgggtaacattgcagtcgataacgc

SEQ ID NO: 132536 - DNA, 594 bp, Homo sapiens
tcagagcccagcagggtgaggatggatgaggatgcgctgaccaccctgaagatcctcatcattggcgagagtggggcgggcaagtccagcctgctcttgagtttcacagataatacttttgatccagaacttctcctggcctccctgtaaacccgaacagccaggtacctcaattttcttcaaggccaggctgttcttaacgttggcaaattggtcgaggaaatgggtgagccactgcttgctctgcacgtcgtcctcagggtgctcggtcttcaggcagtacagcagccacacggctttggcccgcaggagtaagtggcccattcctaggctgtcccccaagatgtgtcctccgaagaagctggtcaggtagaggggatgcccgccctgctggtactggatctggcttccgtttccccgcgccacacgcagatcctgcaccgcaccgtccagtttgctgacttctgcaaagatggccgggtccagcagtgagtcgctgtggaagaccgccagaagcgaggcgcaattggcctcggtgctcatcctggaagccgagaagacgtaggagtcgttgttggtgaaatggctctgcat

SEQ ID NO: 132537 - DNA, 440 bp, Homo sapiens
  misc_feature (1)...(440): n = a,t,c or g
tcttggcatacccgnctggaattcccgnnnnnaaatctcgtgtctttgtctcgctgcagcgggtgctgcaggtttggccttcacttttctgcgtcctcttactcctagaggcccagcctctgtggcgctgtgatctggttatcgggagattcacagctaagacgccaggatcccccggaagcctagaaatgctctgtgttctcgttttgcccaagacctttggctagagcagaacataaaagattctttccaaaaagtgacactgagcagatatggaaaatatggacataagaatttacagttaagaaaaggctgtaaaagtgtggatgagtgtaagggacaccaaggaggttataatggacttaaccaatgtttgaaaattaccacaagcaaaatatttcaatgtaataaatatgtaaaagtcatgcataaattttcac

SEQ ID NO: 132538 - DNA, 2175 bp, Homo sapiens
tcagaggcgctgggctggaaaccgtccaatcaggcacgcagtggaatgaacaggacggcttccggatttggcggggtctttgtctctcccgcagctggagctccaggtcgtctgttcactgctgtgtgtcctctgctcctagaggcccagcctctgtggccctgtgtcctgcaggtattgggagatccacagctaagacgcccgggagcccctggaagcctagaaatggccagaaaaactgggaaaaacaggctcttccacttactggatgtttgacaaaatatccttcttgggccaaaaacattgacatcattggggccattgcaatttagagacgtggccatagaattctctctggaggagtggcattgcctggacactgcacagcggaatttatataggaatgtgatgttagagaactacagaaacctgggctttcttggtattgttgtctctaagccagacctgatcgcccatctggagcaaggaaaaaaacctttgactatgaagagacatgagatggtagccaacccctcagttatatgttctcattttgcccaagatctttggccagagcagaacataaaagattctttccaaaaagtgatactgagaagatatgaaaaacgtggacatggaaatttacagttaataaaaaggtgtgaaagtgtagatgagtgtaaggtgcacacaggaggttataatggacttaaccagtgtagtacaactacccagagcaaagtatttcaatgtgataaatatgggaaagtctttcataaattttcaaattcaaatagacataatataagacatactgaaaaaaaacctttcaaatgcatagaatgtggcaaagcttttaaccagttctcaacccttataacacataagaaaattcatactggagagaaaccctacatttgtgaagaatgtggcaaagcctttaagtactcctctgcccttaatacacataagagaattcatactggagagaaaccatacaagtgtgataaatgtgacaaagcctttattgcatcctcaacccttagtaaacatgagatcattcatactggaaagaaaccctacaagtgtgaagaatgtggcaaagcttttaaccaatcctcgacacttactaaacataagaaaattcatactggagagaaaccctacaaatgtgaagaatgtggcaaagcttttaaccaatcctcaacacttactaaacataagaaaattcatactggagagaagccctacgtttgtgaagaatgtggcaaagcctttaagtactcccgtatccttactacacataagagaattcatactggagagaaaccatacaagtgtaataaatgtggcaaagcctttattgcatcctcaacccttagtagacatgagttcattcatatgggaaagaaacattacaaatgtgaagaatgtggcaaagccttcatttggtcctcagtcctaactagacataagagagttcatactggagagaagccctacaaatgtgaagaatgtggcaaagcctttaagtactcctctacccttagttcacataagagaagtcatactggagagaaaccctacaaatgtgaagaatgtggcaaagcctttgttgcatcctcaacccttagtaaacatgagatcattcatactggaaagaaaccctacaagtgtgaagaatgtggcaaagcttttaaccagtcctcatcccttactaaacataagaaaattcatactggagagaaaccctacaaatgtgaagaatgtggcaaagcttttaaccagtcctcttcccttactaaacataagaaaattcatactggagagaaaccctacaaatgtgaagaatgtggcaaagcttttaaccagtcctcaacccttattaaacataagaaaattcatactagagagaaaccctacaaatgtgaagaatgtggcaaagcttttcacctatccacacaccttactacacataagatacttcatactggagagaaaccttatagatgtagagaatgtggcaaagcttttaaccattctgcaaccctttcttcacataagaaaatccattctggagagaaaccatacgagtgtgataaatgtggcaaagcctttatttcaccctcaagccttagtagacatgagataattcatactggggagaaaccctag

SEQ ID NO: 132539 - DNA, 426 bp, Homo sapiens
cggcacgagatcatctcagtgagacaggttaactctatcacagccacagagctgataatgcagtgagtcccagatataaacctcatttgtctaatcccagagaattctctaggtgactttttcaggataagacacagttttatctttatgaaaatttccttaacttttcaggagagaaggctcttatgaccgatacctactaatggatgactattgcaggagaaaggatgactcttattttgaccgttacagagatagctttgatggacggggccctccaggcccagaaagtcagtctcgtgcaaaaggtaaagtagctgaaacagtctattcctattattgatagaacactttacaaaagagagaggaaactaataaccagtacccccatctgaaaaagggctagtgccttggccaagcagtgta

SEQ ID NO: 132540 - DNA, 999 bp, Homo sapiens
atgaaggatccatatggctttggagacagtcgagattcaaggcgtgatcgatccccaattcgaggaagtccaaggagagagcccagggatggcagaaatggccgggatgcccgggacagcagagacattcgagacccccgagacttgcgggaccacagacatagtagagatttgcgggatcacagagacagcaggagtgtgcgcgacgttcgggacgtgagggatcttagagactttcgtgatctaagagactctagggattttcgagatcagcgagaccccatgtacgacagatacagagacatgagagactcccgagatcctatgtacaggagagaaggctcttatgaccgatacctacgaatggatgactattgcaggagaaaggatgactcttattttgaccgtttacagagattagctttgatggacggggccctccaggcccagaaagtcagtctcgtgcaaaagagcgtttgaaacgtgaggaacggcgtagagaagagctttatcgtcaatattttgaggaaatccagagacgctttgatgccgaaaggcccgttgattgttctgtgattgtggtcaacaaacagacaaaagactatgctgagtctgtggggcggaaggtgcgagacctgggcatggtagtggacttgatcttccttaacacagaagtgtcactgtcacaagccttggaggatgttagcaggggaggttctccttttgctattgtcatcacccagcaacaccagattcaccgctcctgcacagtcaacatcatgtttggaaccccgcaagagcatcgcaacatgccccaagcagatgccatggtgctggtggccagaaattatgagcgttacaagaatgagtgccgggagaaggaacgtgaggagattgccagacaggcagccaagatggccgatgaagccatcctgcaggaaagagagagaggaggccctgaggagggagtgcgtgggggccaccctccagccattccag

SEQ ID NO: 132541 - DNA, 681 bp, Homo sapiens
ctataacagggcccaagagaaaccaacaacgcgttctgataaaaaactatggccagtgggtaaacgaaagaaaaaaaacaagaaacatttgaaaacatttccgtcaaatttggcggcggcaaccgttacggcctgattggcgcgaacggtagtggtaaatccacctttatgaagatcctcggcggcgaccttgagccgacgctgggtaacgtttccctcgatcccaacgagcgcattggtaaactgcgtcaggatcagtttgcctttgaagagttcactgagctggaatgaacttataatgcgcttccaatactctaatattctgataactgccccgaaagggggttgtcccatctcccgagcctccctaaaccgtggccaggaaaggagcgcacctcgagtcctgcggggaagcggagccgggacactccgcattgcacgggtgtcatttctcctgtggccctttcctgtgacgttgccggctggtgggcgcagccctaggcgttcaggaagaggaggcgggcactggcgcggcggttgagctagtcgggctgggcttttgcccgcatccttttcaagctgaagcagtttcctcccagcttgactgagaaggcgttggggcaggcgatgctgctcttctccttcccctccagtccactggtttccctgctgttctgacat

SEQ ID NO: 132542 - DNA, 550 bp, Homo sapiens
cggccttcctgagagaatattagagtattggaagcgcattataagttcattccagctcacagtgaaattatgatgtgtacgaaatcacattttttgcctttggcttgagtgtagaccttaagcgaggagcaggatcttctttcagacttatggcataatgcgcggtttgtcatatctcttttcaggatacgcctgtgttagtttccagtaacgtcaccatgcagttcggcagtaagccgttgtttgaaaacatttccgtcaaatttggcggcggcaaccgttacggccttgattggcgcgaacggtagtgggaaatccacctttatgaagatcctcggcggcgaccttgagccgacgctgggtaacggttccctcgatcccaacgagcgcattggtaaactgcgtcaaggaccagtttgcctttgaagagttcactgtgctggatacggtgatcatggggcataaagagttgtgggaagtgaagcaggagcgcgaccgcatctatgctttgccggaaatgagtgaagaagacggctataaagtggccgat

SEQ ID NO: 132543 - DNA, 481 bp, Homo sapiens
cgatagccagcaccctgaaatcagcgtcactttccgacatcgaaatgcgtggttttacctttgatcaaaaacgccagatacttcacctccagctacgggccgcgaactttgccagtttcgacaaactgcgtagtgtactggcaaccgataatgttgtgcaccaggacgcgttacagaaagaggcggtggtgttcctgtttagcgtcggatattacgtcctcatctggcagccgttgagcgaacggattgagcaacaggagacaatattgcagcagctggtggcgatgaacacccgactgaagaacgccgcgccggatattattgcagcgcgaaaatctgccacaacaacgcctgcgcaggtatcgcgggtcatcagtgacagtgcttccgcgcactcggtggtcatcaggcggatagccgatcgtggggagaatattcaggtctggatagaacctgtggtgtttaatgacctgctgaaatg

SEQ ID NO: 132544 - DNA, 235 bp, Homo sapiens
gccggataaggcgtttacgccgcatccgcaacagtgccaactgcctgatgcgacgcttgcgcgtcttatcaggcctcaaattcccgcaccatccgtaggccggataaggcgtttacgccgcatccgcaacggccggataaggcgtttacgccgcatccgcaatggtgccgactgcctgatgcgacgcttgcgcgtcttatcaggcctcaccgctgtgaagtgctccaccccgtag

SEQ ID NO: 132545 - DNA, 3028 bp, Homo sapiens
ctcggtaccgaccattatcttctttttcctgccagttttgcgtttctggcggccaggtatccagcaagccaagaaatgccacctgttcgccacgggcacgcagtcgcgccgcaataccctgcgccagcgtaccgccaagggaataccccagcagcgaatgaccgccaagcgcgaagaaatcagcatcggcatcctgcacgtcacaccccagcaacgacgagaatgccgcggcgataatcgtttcactgcccgctttcggcgcacgccctggcgcttgctgggacattgtgtgtcagccgcagtcacaggcgtcctgccagcagtggctggaagcccactggcgtactctgacaccgacgaattttacccagttgcaggaggcacaatgagccagcatttacctttggtcgccgcacagcccggcatctggatggcagaaaaactgtcagaattaccctccgcctggagcgtggcgcattacgttgagttaaccggagaggttgattcgccattactggcccgcgcggtggttgccggactagcgcaagcagatacgctgcggatgcgttttacggaagataacggcgaagtctggcagtgggtcgatgatgcgctgacgttcgaactgccagaaattatcgacctacgaaccaacattgatccgcacggtactgcgcaggcattaatgcaggcggatttgccacaagatctgcgcgtcgatagcggtgaaccactggtctttcatcagaccacgttaggttttattctgtcgcaaagtgaaaaaaatgaacttagcctgaccgcatcctggatgccgctggaatttgaccctaccgataatgacgattatgccatgcaacagcttgataagcgtgatagtacggctatggcgggggttgcctggtatcaccacgagcgttggggaaccgtgaaagcctctgcagctgcggacgttctggataacagcaacggctgggtgggggagctatcggtattccacaaaatgcagataggtcgtctgtcgctgacacctgcgctgggcgttctctattatgacgagaatttcagtgactattactatggcatttcagagagtgagtcccgtcgtagcggtctggcaagttattccgcgcaggatgcctgggtgccctatgtcagcctgacggcaaaatacccgataggagagcacgtcgtattgatggcgagcgcaggatacagcgagctgccggaagagattaccgacagcccgatgattgatcgtaatgagagttttacctttgtcaccgggacccatataggcgcattcttcgagtactacggcgttatgcacggcatcggcggcgtttttaccccatgcgaacgggccgtgagaatgcaccagcaccgccgggatttgtgccggactcctgccacgttcttcgaaggtttcaatgatcacttcgccggtctgatattcatattcgccgttaatctcctctgcggtcatctgtcgcgtgcaggggatggcaccgtaaaaataatcggcgtgggtggtgccccaggcggggagatccagcacggcctgtgcgtgattcgttgcaacagtgcgaccgcaattattatcgtggcaacgccggggcgtttgctggatcacctgcaaaaaggcacggtatcactggatgcgttgaatacgctggtgatggatgaggccgaccgcatgctggatatgggatttagcgatgccattgatgatgtcatccgttttgcgcctgcatctcgacagacgcttctgttttcggcaacctggccggaagccatcgctgcaatcagcggacgagtgcaacgcgatcctttggcgattgaaattgactcaacagatgctttgccacccattgaacaacaattttatgagacatccagcaaaggcaaaattcctctgttgcaacgcaccctggtacgttttgctaacggtagcgcccgtgtactggtcgcgactgatgttgctgcgcgtggtctggatattaaatcgcttgagctggtggtgaactttgagctggcgtgggaccctgaagttcatgtacatcgcatcggtcgtacagctcgtgcaggaaatagcggtctggcgatcagtttctgtgctccggaagaagcacagcgggccaatatcatttctgacatgttgcagataaaacttaactggcaaacgccgccagctaatagttccattgcgacgctggaagcagaaatggcaacgttgtgtatcgatggcgggaaaaaagccaaaatgcgcccgggtgatgtattaggtgcactgacaggagatatcgggcttgatggcgcagatattggcaaaatcgccgtgcatccggcgcatgtctatgtcgcggtccgtcaggctgttgctcataaagcatggaaacagttacagggcgggaagattaaaggaaaaacgtgccggcggtgttacccgttggcggctccgtatgttcggcattgtagccttgttggacgcgcggcgtcgcatcaggcattgtggcatgttgccggattcggcttatacgccttattccgtcgtaccggaggctgtcggctccgttgccggtattctggcggtttacgccttatccggcctacggtggctgcgggtatttgtaggcctgataagacgcgcaagcgtcggatcaggcatcgggcaccgtttccggatgcggcgcgagcgccttatccggcttaccgatcacaatacaatcagttctttttcactaactcagatttcagtttcatcggaccaaaaccgtcgatgttgcaatcgatgttatgtgcgccttgcaaccaggcggatgtttttcactttggtgccaatgtttcagcatcgaagagctacctgttcaccttcagatcgttaatgatggtaacgctgtcgccgtgcagccagcagattgccgttagcatctttaacgatcagctcgtcgctttcctgtgcaggttctgcgtcgttccattgcgtaggcacattcacgggcagatgtacatgccgttatcttcgtag

SEQ ID NO: 132546 - DNA, 5421 bp, Homo sapiens; identical to SEQ ID NO: 123348

SEQ ID NO: 132547 - DNA, 891 bp, Homo sapiens
atggcatcgctcatcatgatgtcgcttccggcaatgcgcacattggcgtgggcgatggcggtatcgggaaattgcattccggaagggcagttctcggcgctgtcctgcgctgattttggcatttcgccgaagctgattggtatagagcagttccgcgcccaacgtacgttgataataggcaatcgcgtcggaacagttaccggccaacgagagttcgaaatttatacggatgagaggcggcctgataagacgcgcgagcgtcgcatcaggcagtcggcactgttgccggatgcgggcgtaaacgccttatccggcctacggagggtgcgggaatttgtaggcctgataagacgcgcaagcgtcgcatcaggcagtcggtaccattgccggatgcggcgtaaacgccttatccggcctacggagggtgcgggaattcgtaggcctgataagacgcgcaagcgtcgcatcaggcagtcggcaccgatgccggaactacctggtcccccggtgattgaaacttcaactaggaacttcaaagaaaactgggaagaaaacttctgttatctggaattcacaattgccaaattaggaaccaccaggaaaagaatacaggaaaactgcaaagggcagcccctgggtcctgcgggagttcaggtgtctctgagaaacactgggaccgaagcaaagatccagtccacagttacacagcctggcggaaaaccaaaagtagataaaaccacaaagatggggaaaaaacagagcagaaaaactggaaactctaaaaagcagagcacctctcctcctccaaaggaacacagttcctcaccagcaacggaacaaagctggatggaggatgactttgacaagttgagaaaagaaggcttcagatga

SEQ ID NO: 132548 - DNA, 3224 bp, Homo sapiens
ccccgacaaactcagggattttgtgtataattgcggcctttttcggcaatctgccgttttttggcgcttttgccctgctgacttttgaggaaatccacatgtcattaccacactgcccaaaatgcaactccgaatacacctacgaagataacggcatgtacatctgcccggaatgtgcctacgaatggaacgacgcagaacctgcacaggaaagcgacgagctgatcgttaaagatgctaacggcaatctgctggctgacggcgacagcgttaccatcattaaagatctgaaggtgaaaggtagctcttcgatgctgaaaattggcaccaaagtgaaaaacatccgcctggttgaaggcgaccataacatcgattgcaaaatcgacggttttggtccgatgaaactcaggtgccagcagatgtccggaaataccaatcactttttcagcatcaacgccaccgttcatcactcgcgcccgactgtagcccacttcggctcccagcttttctgccagcatagcgatttcctggttatctggctctccgccctgccccaccaccagcacccgtctggcctcagctaatgggtcgcgggtaacatttttcagatcctctgtgctaaccagccagtccggaagcgcacccgggacaatgttcagttgttgcattccagagggcaacgtggcgtttttcgctgctcccgcctgacgcgccagggaaaggcatagcgggcgtttttctgtttgcagcgtcgccgttagcgcatttccccagtgggatttgcgcacgcttacggttggaatatctaacgaagtcacctggcagatggatgctggttcaggcaagtaggtgctccaaatgcctgcatttctgcctgaaggtggatcatagagggccttgctacaccacaatctcatgggagcatggtatgccacttctgaaattaggttagcaaggactctggcttccaccatgagtgcatgttttccatctgtctgcctttcagtctctctctctctctctttctgtctctctgtatcattctttcctgggaaattcattgcaaaaagatcatcgcctaggcacattgtcatcaggctatttaatgttacgatgaaggaaagaatcttgagagctgtgagacaaaagcacccggtaacccgcatgcggaagttatcgcgttcccggcataacaactcatagtcgacattgttaacgacgcggctctggatttgttcggtgacgacagaaacgatctgcgtaaatgtttgcagacgattgaactctttttcgctccaggggcgatcgtcataacgaataaattcacagccaccaaaaatatgcccttccgccgccagtggcatcaggcaatagtgaccaaattttgggtatagcccacctgcgtccagctgcggccaggtttcacaaaattcttcgtaactgcaatgcagcgtatcagggcgcgacaaaatgctgcgtaccggaccgtgtgccagaacagtttcgtcttcatatttaatgggggtgtctttttcacgcgacgcgtaataagacgcacgttgagtctgcgcttgccacaacacaatagccgcgttgtcggcgagcgcagaacgctttaccagttgcgaaagagcctcacacagcgaggccagatcgggctgctgcaatagtgtccgagtgatgtcgaacaacccttgttgtccgagatcactcatcggtgtatatgacattttgttcttccaggaaagcaccgcaaagcggtgcaaaaggtcattgagcggaagcggttcggcgtgtggtaaatcgagggttcgtttcacgccatacagaccggcaagacgaacacctttacgttccaccacttcaccaatcagcgccgcgtctttccccagtggatgggaatgtaacgctgccagcacttgctctgccgcgttgcgttcaacagctattactagtttgccttcgttggcaaagttcagggcgtccagtcccagcaattcgcaaacgccacgcacggcaggtttaacaggcagtgccgcttctgaaagttcaataccacaaccgcaggctgccgcgaactcatgaaccaccgcgtttacaccaccacgggtggcatcacgcagcgctttcacgccgggaatgtcacgcagcgtctgaataagcggcgtcagcaccgcgcaggttgttccctctttgttgcgcctctcctcttgtggaagtttgttgccccctattactttttttaggacagcgcagtactgagaaggccctcgggtccaacaccgaaaccaccctttttttgcatgaacttccttgggccctggaacaacctcccgagaaaactcggagaccgacacaccaaaatggccctctacctttcttcttcttcttgtcgtgtctcgctctggtcgtctcgtctctctcatgatcggtctgtcatctgtgttgtcttcttggtcctgcaagtccggtttgttgagtttctttttcactgcttcaacaatggcgttggagtaatcctgcgagtaacccaccactttttgctgattgtcgtaataagagaaaggcactgaagattcacggtgaccgacgacaatcacaccgtttttggcgattttgtccagagtactgcccgctgccggggcggcgtcatctgcctgtgccagtcgtatcatttggtccgcccgaaacaggttggccagcgtgaataacatcgccagttggttatcgtttttcagcaaccccttgtatctggctttcacgaagccgaactgtcgcttgatgatgcgaaatgggtgctccaccctggcccggatgctggctttcatgtattcgatgttgatggccgttttgttcttgcgtggatgctgtttcaaggttcttaccttgccggggcgctcggcgatcagccagtccacatccacctcggccagctcctcgcgctgtggcgccccttggtagccggcatcggctgagacaaattgctcctctccatgcagcagattacccagctgattgaggtcatgctcgttggccgcggtggtgaccaggctgtgggtcaggccactcttggcatcgacaccaatgtgggccttcatgccaaagtgccactgattgcctttcttggtctgatgcatctccggatcgcgttgctgctctttgttcttggtcgagctgggtgcctcaatgatggtggcatcgaccaaggtgccttgagtcatcat

SEQ ID NO: 132549 - DNA, 1428 bp, Homo sapiens
atggcgctgaaaaaatatcgccacatggccgacgatacgccgctgctcgccgagttgtcagcgatagccagcaccctgaaatcagcgtcactttccgacatcgaaatgcgtggttttacctttgatcaaaaacgccagatacttcacctccagctacgggccgcgaactttgccagtttcgacaaactgcgtagtgtactggcaaccgattatgttgtgcaacaggacgcgttacagaaagagggtgatgcggtttccggcggccaatggcgtgaacgccagttaagccgtggcgaacactggctggcacaacacctggcggggcgttctccgcgtgaaaagggcatgttactggcagcggtggtgttcctgtttagcgtcggatattacgtcctcatctggcagccgttgagcgaacggattgagcaacaggagacaatattgcagcagctggtggcgatgaacacccgactgaagaacgccgcgccggatattattgcagcgcgaaaatctgccacaacaacgcctgcgcaggtatcgcgggtcatcagtgacagtgcttccgcgcactcggtggtcatcaggcggatagccgatcgtggggagaatattcaggtctggatagaacctgtggtgtttaatgacctgctgaaatggttaaacgcactggatgaaaaatatgcgctgcgggtgacacaaattgatgtcagtgctgctgagaagcctgggatggtgaatgtgcagcggctggagtttggacgggggtgtaccaatgctgcatgcagtgaatgcgtagcatgtctccagcggataaggtcgccggccattaccagccttggggtaaaacggctcgatgacttccaccatgttttgccatgccagatcctgctccatgcgggacaagaaatctccttttctggtctgacggcgcatactgctgaattcactgtcggcgaagcgcttgagtcggatcactactcacactgtgatgtacagatcatctcgcacgtttgttccccgaaccatgtcagacatggtgtcctctatgaacacatgagaaataggtttattctcatacctaaaggcgttagtgctgatccagagttgcgtattaaggtcgtgacagctgtgatcgagcagcacatgtcccttaatcaggctgctgctcactttatgcttgctggtagtggttctgtagccaggtggctgaaggtctatgaagagcgcggagaagctggtttacgcgcgctcaagattggcaccaaaagaaacattgcaatatcagttgatccagaaaaagcggcatcagcattggagctgtcaaaagaccgacgcattgaggatcttgaaaggcaagttcgatttcttgaaacgcggcttatgtatctaaaaaagctgaaagccttagctcatcccacgaaaaagtga

SEQ ID NO: 132550 - DNA, 868 bp, Homo sapiens
aatttgtaggccggataaggcgtttacgccgcatccggcgatattagtttacgccgttaacagattagctatcgtgcgcacaccaagtcccgtagcgcccgcagaccactgttcaaccggcgctttacgtcgccgagcagtcgatatgcagccagccttgctgatagttctcaacaaagtgcgacaggaagcccgccgccgtgctcgcgcctgccggatacgccgcgcttccggtattgttcagttcggcaaagttagacggcagctggctgcggtggaactccgccagcggcagacgccagaacggttcgttctcctgcgcggcactcgccagcaagcgaccggccagcgcatcgtcaaaactgaacagcgcgtgataatcattacccagcgcagttttcgccgccccggtgagggtcgccgcatcaatgatcatttccggtttctgcgcactggcatcaatcagaccatcggcaagcaccagacgcccttcggcatcagtgttcatcacttcaacttttttaccgttgcgatagaacctgcacaggaaagcgacgagctgatcgttaaagatgctaacggcaatctgctggctgacggcgacagcgttaccatcattaaagatctgaaggtgaaaggccggataaggcgtttacgccgcatccggcaacggtgccgactgcctgatgcgacgcttgcgcgtcttatcaggcctacaaattcccgcaacctccttaacagctgctccgcggcgcccgaggcccggaccaccgatcccataaagcgctacaacaggcccacaaacgtggggaacagcggaaccagcgaccgagccacaaagaggatccagccggaacccacagactaa

SEQ ID NO: 132551 - DNA, 1394 bp, Homo sapiens
  misc_feature (1)...(1394): n = a,t,c or g
ttacgcgataaatttattcactattttcagcaatggcgtgaacgccattaagccgtggcgaacactggctggcacaacacctggcggggcgttctcgcgtgaaaagggcatgttactggcagcggtggtgttcctgtttagcgtcgatattacgtcctcatctggcagccgttgagcgaacggattgagcaacagagacaatattgcagcagctggtggcgatgaacacccgactgaagaacgcgcgccggatattattgcagcgcgaaaatctgccacaacaacgcctgcgaggtatcgcgggtcatcagtgacagtgcttccgcgcactcggtggtcataggcggatagccgatcgtggggagaatattcaggtctggatagaacctgggtgtttaatgacctgctgaaatggttaaacgcactggatgaaaaatatcgctcacgtctggtatgtgccagaagcagtaaaaactcgctatgcgcatctgaatgccaactggctggagatgaataatcggctcagcaagggcgatttgccgtggtatcaggccaatattaataattatgttaatcagatagacctgttcgtactggctttacagcactacgctgaacgcaaaatgctgctggtggtggcgatttccctggctggcggcatcggtattttcacgctggtcttttttactttgcgccgcatacgccatcaggtggttgccccgctgaatcagctggttaccgccagtcagcgtattgaacacgggcagttcgactcgccgccgctggataccaacctgccgaatgagcttggtctgcttgcaaaaacctttaaccagatgtcgagcgagctgcataaattgtaccgttcggaagataacggcatgtacatctgcccggaagtgcctacgaatggaacgacgcagaacctgcacaggaaagcgacgagctatcgttaaagatgctaacggcaatctgctggctgacggcgacagcgttacatcattaaagatctgaaggtgaaaggtagctcttcgatgcctcgtaggccggataaggcgtttacgccgcatccggcaacagtgccaactgctgatgcgacgctcgcgcgtcttatcaggccgcctctcatctgtataaattcgaactacacttaactggcttctcttaactgaggtcaccatcatgccgtaagtccctacctctcttttgccggtaactgttccgacgcgattgcgttgggcgcggaactgctctataaaatcagcttcggcgaatgccaaaatcagcgcaggacagcgccgagaactgcccttccggaatgaatttcccgataccgccatcgcccacgccaatgtgcgcattgccgngaacgacatcatgatgagcgatgccat

SEQ ID NO: 132552 - DNA, 2382 bp, Homo sapiens; identical to SEQ ID NO: 129247

SEQ ID NO: 132553 - DNA, 1161 bp, Homo sapiens
atgaatggcactatttatcagcggatagaagacaatgcgcatttcagggagttagtcgaaaaacggcaacggtttgccaccatcctgtcgattattatgctggcagtttatatcggctttattttactgatcgccttcgcgcccggctggctgggcacgccgctgaatccgaacaccagcgtcacacgcggtattccaattggtgttggagtgattgtgatctcctttgttctcaccggtatctacatctggcgggcgaacggcgaattcgaccgtcttaataatgaagtcctgcatgagcggggccgtagagcgccagccaacgaactggcaggcgattcttatgttcctgattttcgtcgtgtttacgctcggcattacctactgggcatcaaacgcgtacgttctcgccggataaggcgtttaccccgcatccggcaacggtgccgactgcctgatgcgacgcttgcgcgtcttatcaggcctacaaattcccgcaccctccgtaggccggataagggcgtttacgccgcatccggcaacagtgccaactgcctgatgcgacgcttgcgcgtcttatcaggcctacaaattcccgcaccatccgtaggccggataaggcgtttacgccgcatccggcaacggtgccgactgcctgatgcgacgcttgcgcgtcttatcaggcctacaaattcccgcaccctccgccggataaggcgtttacgccgcatccggcaatggtgccgactgcctgatgcgacgcttgcgcgtcttatcaggcctacaaattcccgcaccctccgtaggccggataaggcgtttacgccgcatccggcaacagtgccgactgcctgatgcgacgcttgcgcgtcttatcaggccacaaattcccgcaccatccttcaatgccaaatgtttccgcgaacggttaccgttcgttcccgtttatggcatcgtatatgaccccgttctttggctatctcaccgcctggtcttactgtttatgtggatgccgttggggatctctgaaatcaccgccattggcgttatgtccagttctggttcccggagatggcgcagtggatacccgcattgatgcagtggcgctggtggcgttggcgaatctggcggcggtgcggttgtacgcgaaatcgagttctg

SEQ ID NO: 132554 - DNA, 536 bp, Homo sapiens
cggtccggaattcccgggcaaggacaagaagaacagatcagataggagcacaccagccgggcatgagcctctccagctctaaggtgatgaatgaccaaggcccagtgtggaaacccttgaaactgcagcaagctggtggccccgccaatacagtgctgcagctgcctggtcagggatgccgaccgtggagggaaaggattccctctgaggcagcagctccaacacatggggccaagctcaggaccaccagggcatggaactggagaccatggtttttaatgttagaacagaaaacgccatacttttcctatatcaatgatcaaaagtgcaaacaatttaaatttccatcagggaacatcaaatgttgcccaacccttttcattcctatccatggctccgtaaggggcttgaggcttaatgcccatcctgtggccaagctgagcttccactccgggaccaaaaaaaaaaaaaaagtctgctttgtgacatcatcgttatgagcggaaagtacctagatgacaatgtttccattctga

SEQ ID NO: 132555 - DNA, 1110 bp, Homo sapiens
atggcctcgggcgctcagctcccgccgcagccgtcgagctcagaggtcagcgccgtccagagcccaggcgggcgtcccggcgccggtctggaggaaacagccctgggcgttcctctcccgccgtctccgggggaggcccctctgccccgaagcaaccggagcaggtgccctgggacccgccagcccggagcggcctccctccacgcggcgtccgcagcagtccccgtgcggccccggcgcggtacggcgccagccgggaaaaccgcagacgcggtccccgccgccgccccagagcaagctccgcggccggctccacagtcccgcaagccgcgcaacctggaaggcgacctggacgagcgccggctgctctgccacttgcagctggcccaggaccgcgaggcgcgcctgtggcggggcggcaaaccccaggatgaaatctgcgacgccttcgaggaagtcgtgctgtggctcctgcggcttcagaacaccttttacttctcccagtccacttttaacctggccctcaccatctttggccgcctcctgatttcagtgaaggtaaaagagaaatacctgcattgcgccacaattacttccttgaggctcgctgcaaaagttaatgaagaagaggagtttattccacaagtaaaagacttcacaaagcactatggctctgactattccccgaatgagctgctgaggatggagctggctattctggacagactgcactgggacctctatattgggacgccgctggacttcttgactatattccatgccctggtggtcctgagctggccccatgtgttggagctgctgcctcagaggaatccttccctccacgtcgcatccctgaccaggcagctgcagcactgtatggcgggccaccagctgctgcagttcaagggctccacactggccttggtcatcatcaccttagagctggagaggctcatgcccggctggtgtgctcctatatctgatctgctaaagaaagcacaggttggtgatatgcagtacagctgctgcaaggaacttgtaatgcagcaactgagaagtcttcagtcatcctcctgcacagacaactttgtgtcacctgccaactag

SEQ ID NO: 132556 - DNA, 156 bp, Homo sapiens; identical to SEQ ID NO: 115364

SEQ ID NO: 132557 - DNA, 510 bp, Homo sapiens
ctagaattcagcggccgctgaattctagcagggataagagagcggtctggacagcgcgtggccggcgccgctgtggggacagcatgagcggcggttggatggcgcaggtttgatgcgtggcgtacaggggctctgggcctggcgctgctgctgctgctcggcctcggactaggcctggaggccgccgcgagcccgctttccaccccgacctctgcccaggccgcaggaaccaatgagatcctccctgaaggggatgccacaaccatggggccccctgtgaccctggagagtgtcacctctctcaggaatgccacaaccatggggccccctgtgaccctggagagtgtcccctctgtcgggaatgccacatcctcctctgccagagaccagtctggaagcccaactgcctatggggttattgcagctgctgcggtgctcagtgcaagcctggtcaccgccaccctcctccttttgtcctggctccgagcccaggagcgcctccgcccactg

SEQ ID NO: 132558 - DNA, 1015 bp, Homo sapiens
atgagcggcggttggaggcgcaggttggagcgtggcgaacaggggctctgggcctggcgctgctgtgctgctcggcctcggactaggcctggaggccgccgcgagcccgctttcaccccgacctctgcccaggccgcagagaacgcgaggtctctcccccccatgctactgcaggctctcgcagaactggggtcacaagttgaatatacccccgtggacgtgttcgccctggccaagaggggctcagtaacaagcagccgccagtgtggttcctatatcccgggacttcgcctgtctcctgcggatcacagccagtgactactgtgctcttggagaaaggtccagcctccagcttcccaggcttcatttgcatccatctcgcaggccccagctcaggctcgtgcccacccaccaagttccagtgccgcaccagtggcttatgcgtgcccctcacctggcgctgcgacagggacttggactgcagcgatggcagcgatgaggaggagtgcacggtgctcagtgcaagcctggtcaccgccaccctcctccttttgtcctggctccgagcccaggagcgcctccgcccactggggttactggtggccatgaaggagtccctgctgctgtcagaacagaagaattcgctgccctgaggacaagcacttgccaccaccgtcactcagccctgggcgtagccggacaggaggagagcagtgatgcggagggtccccgcgtccccgagaaggctgtggccaagggatcgagcccagccgtcccgcccgggtgccgagctccggcctcgaacccgggtccggcccgcggactggcgtcctccggccttacctgcaggcccgtgcatacctgatccgcggccgggccgggcggccgcacaggcccctcggttcgcctcggcccgggtcccgcccggcccggcccgtcggcgccactagctccgctccggccggcacctggtccgggcaccgcccgccgagccgacagcgccgcggaccaatag

SEQ ID NO: 132559 - DNA, 858 bp, Homo sapiens
tcacagggtgcaagggcaatttgtcacagacagaactgtcagttgagggtgatctgtcacactgaacacgggcgaatgtgtgccgaccaccgtctctagacacgcagcatggactatagggcctacaaggcgcgcgaatggggaagagctcctaactatatggctgatgatcttgtagagagtatctccgtggatgcgctcggggaccccgtgggatgttgcttcaggcagcgtgtgtaagcggaatatatcagtgctgttctctggtgcttcctcgctcacggcgagggcttcgctgatcgcgctactgcggcgagacggggaaaaacgtttgtcatcatgctcggcggtgaagccattgagcatgagaatttctccagtatcgttaatgatatcgggttgttgcacagcctcggcatccgtctggtggtggtctatggcgcacgtccgcagatcgacgcaaatctggctgcgcatcaccacgaaccgctgtatcacaagaatatacgtgtgaccgacgccaaaacactggaactggtgaagcaggctgcgggaacattgcaactggatattactgctcgcctgtcgatgagtctcaataacacgccgctgcagggcgcgcatatcaacgtcgtcagtggcaattttattattgcccagccgctgggcgtcgatgacggcgtggattactgccatagcgggcgtatccggcggattgatgaagacgcgatccatcgtcaacgggcgcagggtgtacagtgtgcccagcagtgacagcggaccggcgctgtgctcgatatacacaccagccgtagctgccttcccgcggggcagggatcgggagcagcagcccaccat

SEQ ID NO: 132560 - DNA, 2247 bp, Homo sapiens
tcagggagtctgcgagcaagacaccctggtcaccaggatgcctcgacggtgagctgctccaccagctcgtccgtcggggtctgcaggcgcaggcctagcacatgtccggttgtggatgggtgggcctaccgggccagtcgcccatggcgacggcgccgcggcctgaggggctggtaggtacgaggggctgggatgcgaaggtgctagtcggctgtggtacgccgtttgtccttcgcgctcatttggtgcgtattttgttgcgtcgtgtcttgtgctcaggtgtgtcgtatcttctttgtggtcagtgtcgtctttctcgcggatgtcggttttggtggtaggctgtgttgggcacgacggctggacttgtgccactggcagatgagtgacagctgatggagggtgggatgcctgttgagagtcagacataaacaatgcatgggcaagctttgcatgctggcaggtgggtgttgtgtgttggtgggtggtggttggaggtgaccgtttttccacgccgaagtgccggttgttttcctggggggttggatctcctattggaaccccacggggataacggccccacaaatagtggcctccggccatcccctctttcctttgtttcccgcccgcgggttgttccgggttggaacttgtaccggcgttggagaaaaccgcttcgtgggacaaccaatggccaaggtttccccacgggaaggaccgggttccaaccaaggctttggttccgtgtaaaaatccgggaattgccccggggggaagcataggaccaatagcccccagttccaagggggccgccgttcctagaccggggttgttttcggccggggctgttccgggggccttgggcctttcaaacttaatgccgggccaatccaagtagccaagaatttggtaacttgaaggagctgccaaccaataatgccggtcgttgataatacccggcaacaagaatgccgttaacgggtagaaataatacccgccatccaaggcgcccatttcgcccaattccagactggcgccaacctgtttggtaagggccgaatccggtccaacgagagactgccctgcaccgatactgcccccagcagacccgccggatgacacgtagacgcaatgacgacgaatcccgccggcggttgcacgacctcgcgcgtacacgcacccagcaactcccacacacggcaacgaaccctgagagaaccaatcggtgttgccccgtggatgaataggtgtctcatcatgggggcatcttggggggttacgtaagaagttaatcacatcggtgtgaagtgtggcgttgctgctccgacctgccagcagttccagcacttcatccacgctggtggtgtgtgccagacgctcgatgacggactcatcatccagtgcattggtcaggcgtctttgcgtgtggaatcgttgtgtggactgccaggcgtcatggaattgagtgtctttagcgtagaaggtcgcccgtgccagtgttccaactgtggtggccacatgctgttgtcgggcctttgtgcggcaacatattgttgtgtggccttggccgaagcgtattggtgtgtgtcctagttgtgcaaccttgcgccgacgtgtggattggcaccacaccctggaacacggatgaacatgatatagagtggtacagtgcgcgggatgcactgctgaagactgccatattcgccgttcagaaggcggcattgcctggggcgatatgcgcaactgcctcaaccagctgataacggaaccgagcgtcgcctccgcgatgtttgaataccgttttggtggcaatggcgaacttagcgtgcggcctctggaagccatcaatttaattcgtaatctgctgaaagtggatagtttacctcgtattttgttagatggttgttgatgtccaaagtaaggcatttgttctggtgggttcttaatatgtctggtgagttccggctcatgtttggagacacctagccttgatctatccggataagcatccactagcaatcgcggctcacggacaacaggtgatttcaaaatacttcgatgacggacaccggtgccagcccggcagcaggagatatccttacactggtaacaacgggagccggtatatagcctatttacgttggcaatgccggaggagttgttagatggacgaggtagtagttgtgaggattgttctttcaggtcgaatccatacatgaggtcccgcgtgtccaactccggagtcat

SEQ ID NO: 132561 - DNA, 413 bp, Homo sapiens
cccagcagtgtccgggctctcccggcaggtgagagaaaggtggtcctgagagccagtgggaggatccctcctgggatgaccggtaccaaacctcgagcaccagggtgcgatgcttcggctggggaagtctggcagtcttcaaggttatgggacctggcgagtgggagcgactcaggacgacccagcgtttgtcccccgggatgcctacggggcagtaggcgcggggctgcgcgtgccgtaaccttggcgtcttccgagcacagcccctggaagctgctagcctgaggggcgcaggagagggggtctgcccttcgctgaattccggggaaggggcatggactagcccccaaatcagcttcctttgccattgtggtaaaacctgtcagagatcacttactagtaatgctaaggag

SEQ ID NO: 132562 - DNA, 588 bp, Homo sapiens
atgcttcggctggggaagtctggcagtcttcaaggttatgggacctggcgagtgggagcgactcaggacgacccagcgtttgtcccccgggatgcctacggggcacctcctgttcaggtatacggtattgaaggtcgctatgccacagctctttattctgctgcatcaaaacagaataagctggagcaagtagaaaaggagttgttgagagtagcacaaatcctgaaggaacccaaagtggctgcttctgttttgaatccctatgtgaagcgttccattaaagtgaaaagcctaaatgacatcacagcaaaagagaggttctctcccctcactaccaatctgatcatgaggcctgctctgcagaaggtggcgtcatacacacaatcacagctcctacagacatgtgactgccaatggacaaaccgtctttgcgggagcctcatgctgctgatgctgcccagatccttcagagtcaaactcagcaagcttcctgttgatcaagcacatacaatcttggggaatgatgaggcccttcatatgtcgccttacgaggtcaccagagagaacctagagatctatgtacaatga

SEQ ID NO: 132563 - DNA, 803 bp, Homo sapiens
ctacagccgcccgggagaagatgggctgccccagcagtcgtccgggctctcccggcaggtgccgatgcttcagtacctctgtggtcagaccatttgcccaagcttgtggggccctcttgttcaggtatccgttattgaaggtcgctatgccacagctcttttattatgctgcatcaagacagaataagctggagcaagtagaaaaggggtttgttgagagtagcacaaatcctcgaaggaaccccaaagtgggctgcttctgttttggaatcccctatgttgaaggcgttcccattaaaagtgaaaaagcctaaaatgaccatcacagcaaaagtaggaggttctctccccctcacttaccaaaccttgatcaattttgctttgcttgaaaatgggtccgattaaggcaattacccaagggagtcgttttctggcctttttcttaccatggatggagtgttccattcgcgggagagggtaccttggcacagtggacctctggcatcttcctttaggaaggaaggccacaattctctgaatttaaaaactgttcctcaaggggtttcctaaggtcaagggccaagtttttgaaattgggggctaaggactgatccgtcaatctttgggtggaatgattgtgcgcattggcgaagaaatatgttgacatgtctgtcaagaccaaagattcagaagctggggcagggctatgcgggagattgtctaaaagtgttggttttctgccatcaagtgaaaattcttaaacttggagcaacaataaaaagcttccagaacagaaaaaaaaa

SEQ ID NO: 132564 - DNA, 1092 bp, Homo sapiens
  misc_feature (1)...(1092): n = a,t,c or g
tcccgggtcgacgatttcgtgagaaggctgactggctggactcattgagctgaagaatttccagtgacatttgtaaatgacgccgctcgattccgggctccaagcggcccctgccgccgccgccgccgccgggccgaaggtgccgccgagcagtctccagcgcaggcttccttaccgggcgaccacaatgtccgagtctctcctcgccttactcactctctcgggattattgccgattgccagggtgctgaccgtgggagccgaccgagatcagcagttgtgtgttcccgggtcgacgatttcgtcgcgcatccctccaccttccacatcctgctccaggcaggagaaggctgactggctggactcattgagctgaagaatttccagtgacatttgtaaatgacgccgctcgattccaggctccaagcggccccctgctgccgccgccgcccgccgccggggcgaaaggtcccgccgagcagtctccagcgcagatttctttaccgggcgaccacaatgtccgagtttctcctcgcattactcactctctcgggattattgccgattgccagggtgctgaccgtgggagccgaccgagatcagcagttgtgtgatcctggtgaatttctttgccacgatcacgtgacttgtgtctcccagagctggctgtgtgatggggaccctgactgccctgatgattcagacgagtctttagatacctgtcccgaggaggtagaaatcaagtgccccttgaatcacattgcttgccttggcaccaacaaatgtgttcatttatcccagctgtgcaatggtgtcttggactgcccagatgggtatgacgaaggagtacattgtcagggtgagtccatttgtggaacaatgcatctgaaatattaaattttacatagtaatgaaagttcaaagaaaacctataacctgccttttctttcaactacaagcatatcagttattaagaaagcatgaattttactgccagacattttaatatgcatttcaaagctgcaagtattatgtttgagcaaaaaaacaccattagacagnnnnnnnnnnnnnnnnnnnnnnnggggtatt

SEQ ID NO: 132565 - DNA, 1026 bp, Homo sapiens
  misc_feature (1)...(1026): n = a,t,c or g
atgatcaccctggaaaaaatcgtgcgtggaaaacgtactgcagtcagtgagccattgttccccaactacctgtttgtggaatttgacccagaagtgattcataccacgactatcaacgcgacccgcggtgtcagccacttcgtgcgctttggcgcgtcgccagcgatagtcccatcggcggttattcatcagctatcggtatataaaccgaaagacattgtcgatccggcaaccccttatccgggtgataaggtgattattaccgaaggcgcgttcgaaggctttcaggccattttcaccgaacccgatgcatttattgcttttgtttttgtcttgttatgccagaacacggcgtttgcgcgggcgtcatcgaatggtgatctgccgacaaaagcggacctgcaggcgcaacttgactcactaaataaacaaaaagatctttctgctcaggacaaactggtgcagcaggatctgacagatacattagccaccctcgataaaatcgatcgcataaaagaagagacagttcagctacggcaaaaagtcgctgaagcgccggaaaaaatgcgccaggcgaccgcggcgttaacagcacttagcgatgtcgataacgacgaagaaacgcgcaaaattctgagcacgctgtcgttgcgccactnggaaactcgcgttgcccaggcgctggacgatttgcaaaacgcacaaaacgatctggcgtcttataacagccagctggtttcgttacagacgcagcccgaacgcgtgcaaaatgcgatgtataacgcttcgcagcagctgcaacaaattcgcagtcgtctggatgggactgatgtcggcgagacagccttacgtcccagccagaaagtgttaatgcaggcccagcaggcgttgctgaatgcggagattcgtaaaacaccgcttcgccgctcattcgcgcactggcggttctacggcatctgcgccgtacatgcgaacaaacgcattcagatattgcagcggctggcgatcttcttcctgtgccagtaa

SEQ ID NO: 132566 - DNA, 427 bp, Homo sapiens
ccgggagcgcgaccctcccccgtcccggcctggcccggcctggccagtcccggcggtctctgcccgggctgacgcccaggaatgtggtcgacgagaagccccaacagcacggcgtggcctctcagcctcgagcctgatccggggatggcctctgcctgcaccacaatgcatactaccaccattgcagagcctgatccagggatgtctggatggccggatggcagaatggagacctccagccccaccataatggacattgtcgtcatttgatgtgcgattgctgctgaggccatcgtcctagtctctcttctcttcgtcatgctgcgctacatgtaccggcacatgggcacgtaccacaccaatgaggccaagggcactggagttgctgatagtgcagatgcatgccctgccggagaccctgcctgat

SEQ ID NO: 132567 - DNA, 1202 bp, Homo sapiens
ggaaggacttccgcgcgttaggagtgtgacccaggtgccgcttcctctcgccgccgagggtcaggagcccgggagcgcgaccctcccccggcccggcctggcccggcctggccagtccccgcggtctctgcccgggctgacgcccaggaatgtggtcgacgagaagccccaacagcacggcgtggcctctcagcctcgagcctgatccggggatggcctctgcctccaccacaatgcatactaccaccaattgcaagagcctgatccaggggtttcctggattgccggaatggcagaatggaaacccccaccccccacccataattgacaatggtcgtcattgcaggtgttgattgcttgcttgtggccattcgtccttagtcttccctcctctttcgtcatggttgcgttaacattgttaaccgggcacaaaggggcacgtaccacaccaaatgaggccaaagggcacggagtttgctgagagtcgcagatgcagccctgcagggacgaccctgccctcctaagatgctggtgatagcagcagaaaaggagtactttatttgagggacaacagacttaactttccttgaatgccttcccccatctcccatcaggaaaaatacaaccccaatcgccccagcaacccctgctggataccacccagacagagagagagagtacacttgatttcttcccgagatagcccaccctggaaacactaaggtgccctgccccccagggaggaaacggaaggaaggaactccgcgcctacaaagaggcccacttcccccagggaccccccagggaagccgaatggcccaccccccagagggccacccttttgcctcccacgggaaggtgggagaaaaatctgggcacaatggggccccctagggcagtgcaggacaacatcagctcactggcaggacaacatcagctcactggcacagttcactgcagggaaagccctgttgaggggtgagggggtgcctggggtaacccgggggcctggggaagcaaggaaataagtcatctgtatgctgaactggggataatggcatcaaatgtcagtccttgacatttggggggaacagtcaggtgccagagctaaaaggtacctttgtctgaccattgatccagctcagaacgaattggaaataaatttgaaatgtaaccgagcaaaaaaaaaaaaaaaaaaaaga

SEQ ID NO: 132568 - DNA, 1572 bp, Homo sapiens; identical to SEQ ID NO: 117435

SEQ ID NO: 132569 - DNA, 717 bp, Homo sapiens
atggtgaaaggtgaaggtgaaaagcccgtggtgaaaggtgaaggtgaaaagcccgtctcacatggcagcagacaagagaagagagtttgtgcagggaaactcccccttataaaaccatcagatctcgtgagacttattcactaccacgagaacagcatggaaaagacctgcccccatgattcaattacctcccaccaagtccctcccacaacacgatctgccctgggtgacaagaccaagggaggttcacacaacactctttatctccgctgcaaacgtttttctgcatttattcttaattgtgagcctccctctaaactgttaaaagccaggccacaggtgtcggagctgagctggaatcctgactttgttgcctcctggcggcgaggcccagcatttcaaagtaaaacatccaagtattcctttactgaggggggagaagtaggaatcaagcccaagaaaacatctccaggcactgaactgctaatgcagccttgcaccagcccagccctaggacttgtcagccggcaccccgaaaatccaacaggcctcaggctgcttaagcccattaatgaagcacagtacactagggtatctgctttggttgcaaaaagcaatctggctaaagggatttgggacatccggctggtgaatgtaggggaggtttcacctttagatgaggcaccagaaacgatgtgctccctggtagcatcctga

SEQ ID NO: 132570 - DNA, 323 bp, Homo sapiens; identical to SEQ ID NO: 117433

SEQ ID NO: 132571 - DNA, 2909 bp, Homo sapiens
atggtgaaaggtgaaggtgaaaagcccgtggtgaaaggtgaaggtgaaaagcccgtctcacatggcagcagacaagagaagagagtttgtgcagggaaactcccccttataaaaccatcagatctcatgagacttattcactaccacgagaacagcatggaaaagacctgcccccatgattcaattacctcccaccaagtccctcccacaacacataacagctttctagctttcaccagaccctggattcccagtaataatgcatccttcagaccctttaagcctctggactgtcttcaaataaaatactggaaattgcagaggtctgactccctctcatcccagcccaccctcctccaggccacctggaaggagggagtcggtgaaccatctcttttcctgctgctctctttagcaggccttcgaacttcactgcccttgcagacccaagttttccacattaccaagcccagcctggccacccaggcacacagatttgagaaaaagaggccgaaggaccgcacaataatatgccggcaacgagagccatcccccatccctgccccgatacctgcgccgctcccggcactgcggatgcaggccccctcctctacctgttcctactcccacacaagcctgcaatgctccccagcgccgcagaaccacctcaacatccttagcctgccttggaagagctggcctgtggctcccgtcagtctcctctccatatctcgtcctaagctcttgccaggagcagccacatcactgctgtcctccctccacaccccggccctcctggtcccctcttccggggatgccatctgctactcacccggtcaggtccccgctcaaggggacctctcccaggaagactcctcagactcgcctccagctgagcaggttctccctccttcctcaggttcacacaacactctttatctcggctgcaaacgtttttctgcatttattcttaattgtgagcctccctctaaactgttaaaagccaggccacaggtgtcggagctgagctggaatcctgactttgttgcctcctggcggcgaggcccagagatggtccctgctccactggaaggcaatcagccagcaagacgccacctccacccagtcatcctcacacggggcactcactgtggtcagaagagaaatgaaaggacagtgactcgaggccaaaccaaagtgcttttccaggatgcagtgttgatttgcaattttcccacaagcttaggccatacctcattcatccccagagtctctggggacagtcggaaacaggccttcccaggagggccacgagcttccgccagccccgttctccaggatggggccagaacagcacctgcccgtggtggtgctgcctttcactggggcctttgctgtggtcctgccttgccccttcctagtatcatcgtctgcctggcatttcaaagtaaaacatccaagtattcctttactgaggggggagaagtaggaatcaagcccaagaaaacatctccaggcactgaactgctaatgcagccttgcaccagcccagccctaggacttgtcagccggcaccccgaaaatccaacaggcctcaggctgcttaagcccattaatgaagcacagtacactaggcccctcacaacaccactcacaatgtgtctgctcatgcaggctgctctgcggacactccttggagaggctgggcctgccaaattcagtgaccatcccagggaatgttggctgtccctccccacaggaattcacccagtggcctcctgtccttgtgctcatggtaaatccaagccccggttcagcagcaggggacttcccttggcttctccaacaaagtccttcgcagttaggccccttctcagacaatcttggaagatggagaagcaagaaaagaatggagagggagaatggaagaggtggactcagaaatgccgcatttgtgggtggagctggggctgggctttggttaacaaaaagcaaatctggctaaagggatttgggacatccggctggtgaaatgtaggggaggttttacctttagatgaggcaccagaaacgatgtgctccctggtagcatcctgagctgcccctcttgactttaatgctaaccctgctgcttttcctcaaggctcagacatcccatttcgatgcttccagaagcacagcctgcacccagggacaggagctgccgccctcccactggagagactctcagaatggacacaattgattcccaagtacccttagagcttcctggaagagggttcccttcccgtcccccagaccagcgatgctccttggagccagggtggccccaaaaggatggcatttggagaaaaattgggccccattcacggcccatcagctccaggtcagagaagccactgggtttacactgcgtggggacaggagggttcttgatactggtccacatttagtgttcggtgtggaaagcggaataagtcctcagcttccatgggataacgggaaataatctaggtaaatctaagctcaataactcaaccttttcaactatttactttcaatatttttccattcatgttaagcataaagttgaaatgtgagcacatagcaaaacctgagtctgcatccctctatttacccagtggtgtgaccttgaggaggtcgagctctataagcctcggcgtcttcagctgtgaaacgcaaattgtggcagatctccctgggatggtgttgcctaagggaaatccctcctggcttgggctcggggatgcagatgcctagtggcaggcacgcatcctcgcttcctccccacaacctctctccagccccacaaccaactgtccctacctccagccactaggagggacactctccatgataccccgaggtcaacttcctatgtatcctcc

SEQ ID NO: 132572 - DNA, 2299 bp, Homo sapiens
ataggccttcgcctccgcgctgcaggaattcggcacgagggattctgtgtgctgtcggacccagagggtgacggcgccgctaggatgaagctcgtgagatttatttctgtatctcagttggcagcattgtcatccttattctcactgtcaccctaaccaaaaacctgggagatttttgatgaaattgagttcatgaaactgtaaccattgaattgaagaacggaaccaccaggtcccatggaaccaatccaccaggtgtgggatgtccagcatgaatacacatccttaaagctgtgaaaatgaccctgaagaacagagaacctgtacagctgggaaacgctgagtattcgaggaaataacattcggtgattttattctaccagaccagtttaccctctggatacactacttgtggatgttgaccctaaggtgaaatctaagaaaagggaagctgttgcaggaagaggcagaagaagaggaagaggaagagggacgtggcccgtggcagatgaagaggggggtcctaggcgataatgtctctcaagatttcaaagtcatatgagatttgggatattttttgtacacggttgtgtttgtttatgtcagtttttaataaacataaatgtgggacagagctgtctatttagtatatcaaagttttagtagtttcctccacattcacgaaattaccacagtgagagctaagcatttctactgggcagtttcattttttagttgatcaggttttaagtttttgaactaaaatttttctttttctttttatgatgaataaggttaaaataaaagccttagacaaattaaatttggcagagtttaattgagcaaaggacaattcacaaatcaggtagcccctgaaccataataggctcagaggcttcagcccagctgcatagttgaagatttatggacagaaggaaagtgatgtatggaaaatggaagtgagatacagcaacagccggattagttacagttcagcgtttgccttatttgaatatggtttgaacagttcgctgtctttggttggctgaaacttagtgattgcccacaagagtaggggtaccgtttgtttacacgtcagtttaggctacagttctatgtactgagaaaccttaaagctgaacttgagatatgtaaagagactttaggctaaacttaaccaatatatatacgatatatacccttctaattcaaaaggcacggattagccatttatggccttaactctaaattctgtggcaacctaacccacagggggaagtaagaagtttgttttggtatttcggaaactaaacgtccttatgggatggggtctagaatctgatcctcctttccctgagctctactccacggagtccttaggtacccggtaaaaagttgtcttcctaaattaagggtcattgcctttgttgtcctagctgcctaatgtcttacttttgtttctttcgcatttttaatcagtccttaataggatatagtttctatcttctccaagttataacttggagttaatgggcactagattatcagtctatgagcagtgttaaaatctcctcttaatgtgtaatgtacctgtcagtgcctcctttattaaggggttctttgagaataaaagagaaaagacctactttatttgacagcaaaactgttctaattgttaataaggacttttaaaaattgtttttgatttgctaagctcagaaaaaatgtctctcagtgcatcagttctttgtaaagcttactacgaagtatttatatgctaaggaaaacaactgaggatgtgggtggcttaaatctgtattttcatcatgtatgtgagttttttttttttttaagtaaagaaattttctgcaaagatcgttaccttaaaaaagtttagcctgggcgtgagccaccgcgtccggccgaacattagtttttaaagaaatgtattatgaatatagatagaaaacccaaagtgaaggaatagaaaatgaaatatcagtttcttttaatctatcataattatgtgagcataahyttagtattttgaaatagattaatgtagtcagcaaacaattcatgtattacctataatagatatcatacatataacatttaataacatacagttcttgttcctgaagacttaacctagacacctcactccataacaagaagaatctctgtcatcatacacccaacagacagacattctctaaaggcattaaacgtatatctgatactggcctttattaatgtgaaattcttgtggatctgtgaaatccagaggagtactttc

SEQ ID NO: 132573 - DNA, 547 bp, Homo sapiens
aaaatcttcgttgggggtctgaatcctgaagccactgaggaaaagatcagggagtactttggcgagtttggggagattgaggccattgaattgccaatggatccaaagttgaacaaaagacgaggttttgtgtttatcacctttaaagaagaagaacccgtgaagaaggttctggagaaaaagttccatactgtcagtggaagcaagtgtgagatcaaggtggcccagcccaaagaagtctatcagcagcaggtgagaggctctgcttcctgctgccgctctgcagcctggacctgtggaccctggttgtaaagagtaaattgtatcttaggaaaccagtgtcacctttttttcaccttttaattttatattatttgcgtcatacatttcctgtaacggaagtgttaattttactgtactttttggtaccttttgggaatctaatgtattgtaaggtattttacacgtgtcctgattttgccacaacctggatattgaagctatccaagcttttgaaataaaatttaaaaacccccaacatataaaa

SEQ ID NO: 132574 - DNA, 514 bp, Homo sapiens
gtggtggaattcggctgagtggagccaggcgtgtgacggaggcggccctcttccagttgggcactgccaccctctcgtggtccaagcagcacatgagcagaacgaggtgctcaacaccaacagccggtacctgcatgacaacatcgtggactatgcgcagaggctgtcagagaccctgccggagcagctctgtgtgttctatttcctgaattctgggtaagtggactgtggccagcccccgggaagagggtgagacggtaacaaagacagtcactcacatgggcccagtgtagtgtagctgaccgagtgtggactcggagaggcagcccccactgcaccaggctcctgagattcccggctgtaggccctgatgctttctctgttggatccagtttccttgtctcttattgaaggatgttattacctcctttctaggatcattgctggagcttagtgaggtaatatgttcctttatttctgccttacggatacagccaaaatccctggctgtggc

SEQ ID NO: 132575 - DNA, 606 bp, Homo sapiens
tatttttcaccctctgtcttcaatggggtcttttctcctgtgagtcccctatatgctctggggtagggaggtattgggcctgagtttgcctatgctttttgcagattgaggccattgaattgccaatggatccaaagttgaacaaaagacgaggttttgtgtttatcacctttaaagaagaagaacccgtgaagaaggttctggagaaaaagttccatactgtcagtggaagcaaggtaaggtgttcccagctctgcttggcctcctgtgctgctggagagctggcccttagagggatgggttaggggttgggcctcatgcaggagctctccaggttggtcagactttactatttctctgaagcgtatgctgccctgattggggcagtcgttccaatccttgaaagacttcccaggctgggaggactgccaataaacaacacaggatgtgaagggaggtaaggagaaggtggcctctgtgaataagagcaggtttgagtagcctctttagctcctcacttaaagctagaggtgacagttctagatttctgagtccaggggtatgaagcctgcagtttaaggtctcagaagatcctagaacttctgc

SEQ ID NO: 132576 - DNA, 640 bp, Homo sapiens
gccacagaggctgaaaatgctttcagaaacaatccgaggtttgagcgacttgttaccccatctgcttcctgctttgcaaccacctgtggagtggagagacaaggcagggaagcagcaccttgcccttccagctctcatttcccccccgccaccagaaactgggaaggggtgggcgggggtctgcgatgagtagacttcaccctttcggtcttcagacatggctgtccactccttgcctgtccccacagctcttcctgcagactcttttttcccgaggatcctgttaagaatgtccgggcccaagggcagtacatgtacgatgaacagggggcagaatacatcgattgcatcagcaatgtggcgcacggtcagtatcacacctcaggctggcagggcaggagaggaaggcagtgctgtgaacctggtcccaaggtgacctgagattgccgagaggtgtggagaacctgggtggagttgaggcactgtcagtatgcagaggaggctcagccttcgcaatatagctgtggaattctgcaatctggagctgtgctaaaccaggcaggggtcagcaatctaagtctgtgagtctagttccacttgggactgatgatgagctcacaaagtggcagatggcccagct

SEQ ID NO: 132577 - DNA, 1584 bp, Homo sapiens
gcgcctcggcctagcatgtcggaagcgggcgaggagcagcccatggagacgacgggcgccaccgagaacggacatgaggccgtccccgaagcgagtcgcggccggggctggacgggcgccgcggcggggctggaggcgcgaccgccgcgcccccgagcgggaatcagaacggcgccgagggaccagatcaacgccagcaagaacgaggaggacgcgggaaaaatgttcgttggtggcctgagctgggatactagcaaaaaagatttaaaagactattttactaaatttggagaggtcgttgactgtacaataaaaatggatcccaacactggacggtcaagagggtttgggtttatcctgttcaaagatgcagccagtgtggagaaggtcctagaccagaaggagcacaggctggatggccgtgtcattgaccctaaaaaggccatggctatgaagaaggacccggtcaagaaaatcttcgttgggggtctgaatcctgaaagtcccactgaggaaaagatcagggagtactttggcgagtttggggagattgaggccattgaattgccaatggatccaaagttgaacaaaagacgaggttttgtgtttatcacctttaaagaagaagaacccgtgaagaaggttctggagaaaaagttccatactgtcagtggaagcaagtgtgagatcaaggtggcccagcccaaagaagtctatcagcagcagcagtatggctctgggggccgtggaaaccgcaaccgagggaaccgaggcagcggaggtggtggtggaggtggaggtcagagtcagagttggaatcagggctacggcaactactggaaccagggctacggctaccagcagggctacgggcctggctatggcggctacgactactcgccctatggctattacggctacggccccggctacgactacagtcagggtagtacaaactacggcaagagccagcgacgtggtggccatcagaataactacaagccatactgaggcggccaagggagcgaccaactgatcgcacacatgctttgtttggatatggagtgaacacaattatgtaccaaatttaacttggcaaactttctattgcctgtcccatgtgcatcttatttaaaatttcccccatggaaatcactctcctgttgactatttccagagctctaggtgtttaggcagcgtgtggtgtctgagaggccatagcgccatcatgggctgatttttattaccaggtcccccagaagcaggtgagaggctctgcttcctgctgccgctctgcagcctggacctgtggaccctggttgtaaagagtaaattgtatcttaggaaaccagtgtcacctttttttcaccttttaattttatattatttgcgtcatacatttcctgtaacggaagtgttaattttactgtactttttggtaccccttttgggaatctaatgtattgtaaggtattttacacgtgtcctgattttgccacaacctggatattgaagctatccaagcttttgaaataaaatttaaaaaccccaagcctgggtgagtgtgggaaaaaaaaaaaaaaa

SEQ ID NO: 132578 - DNA, 911 bp, Homo sapiens
ccctgacatcgtcaccatgggcaagtccattggcaacggccaccctgttgcctgcgtggccgcaacccagcctgtggcgagggcatttgaagccaccggcgttgagtacttcaacacgtttgggggcagcccagtgtcctgcgctgtggggctggccgtcctgaatgtcttggagaaggagcagctccaggatcatgccaccagtgtaggcagcttcctgatgcagctcctcgggcagcaaaaaatcaaacatcccatcgtcggggatgtcaggggtgttgggctcttcattggtgtggatctgatcaaagatgaggccacaaggacaccagcaactgaagaggcatgtctacttggtatcaaggctgaaggagaactacgttttgctgagcactgatggccctgggaggaacatcctgaagtttaagcccccaatgtgcttcagcctggacaatgcacggcaggtggtggcaaagctggatgccattctgactgacatggaagagaaggtgagaagttgtgaaacgctgaggctccagccctaagccagccctgctctgcctaagtgtactccagaagaaactcatctcatccaaatacacgctattgagaaggcgagcctgacctccctcttacagataaagtcagctttcagaggctcagggtgggggggcctgcccgaggccataatgctacccaccccctcctcctaaccactggtctgttggaataacccagatgtctgcatcccctcaagtcagtcaatttcctttctgtccactgggggtggaatggggtagggtgggatactttaaagtgctcctgcttaaataaattagaccagaccagtgtatttctaaagaaaatcctgacatgcacacccattaaaaatagtacattttacagtgaaa

SEQ ID NO: 132579 - DNA, 2449 bp, Homo sapiens
atccttaattaaattaaactccccccccccccgaggcggcggcaccgcgcggtacggagcttggctgttggtcggtgggttcccgtgcggcggcggccaaggaggaggagacacagttggagcagctccgtgggctgactggggcgaggcctcagcagccgcgagctttgatgtgctggccgaagcctgcgcgcgcctttcctccttgcgggtgggggacgaagcgggctcccgcggcgtcatctggcgtgcgaggagcccgccgcgcctcggcctagcactgtcggaagcgggccgaggagcacgcccatggagacgacgggcgcctccgagaacggacatgaagccgtccccgaaggcgagtcgccggccggggctgctggacaccgctgcggcgggggctggaggcgcgaccgcggcgcccccgagcgggaatcagaacggcaccgagggaccaagaatcaacgccagcaagaacgaggaggacgcgggaaaaatgttcgttggtggcctgagcatgggatactagcaaaaaagatttaaaagactattttactaaatttggagaggtccgttgactgtacaataaaaatggatcccaacacctggacggtcaagagggtttgggtttatcctgttcaaagatgcatccagtgtgtagaaggctcctagaccagaaggagcacaggctggatggccgtgtcattgacccctaaaaaggccatggctattgaagaaggccccggtgaagaaaatcttcgttgggggtctgaatcctgaaagtcccactgaggaaaagatcagggagtcttttggcgagttttggggagattgaggccattgaattgccaatggatccaaagttgaacaaaagacgaggttttgtgtttatcacctttaaagaagaagaacccgtgaagaaggttctggagaaaaagttccatactgtcagtggaaagcaagtgtgagatcaaggtggcccagcccaaagaagtctatcagcagcagcagtatggctctgggggccgtggaaaccgcaaccgagggaaccgagggcaagcggaggtggtggtggaggttgaggtcagggtagtacaaactacggccaagacccagccgacgtggtggccatcagaaataactacaagcccatactggaggccggcaggcaggagcgaccaacttgattcgcacacatgctttgtttggaatatggaagtgaaccaccatttatgtccccaaatttaacttggcaaactttccaattgcctgtccccatgtgcaatcttaattaaaaatttccccccatggaaaatcaactctcctgtggacttatttcccagaagctcctaggtgttttaggccaccgtgtgggtgtcctgaagaggcccatagcgcccatccatgggctgatttttattacccaggtcccccccagaagcaggtggggaaggctctgcctcccctgctggccgctctgcagcctgggaccttttggaccctggagtacacttaggcagagcagggctggcttagggctggagctcagcgtttcacaacttctcaccttctcttccatgtccatttcctcactgaactggaaaagcaccccagggtattgtgagacacgggctgaacttgggatctgtttccttccagccacctgaccattccgaatccctgaggctccttgataccaagtaggcagcctcttcagttgctggtgtcttgtggcctcatctttgatcagatccacaccaatgaagagcccaacacccccagggtggcccgtcagcagcacctgggcctgctcgagagtgacctgggagggggcctttcggtcttcgacatggctgtccactccttgcctgtccccacagctcttcctgcagactttttttcccgaggatcctgttaagattgtccgggcccaagggcagtacagtacgatgaacagggggcagaatacatcgattgcatcagcaatgtggcgacggtcagtatcacacctcaggatgggcccagtgtagtgtactgaccgagtgtggactcggagaggcagcccccactgcaccaggctcctagattcccggctgtaggccctgatgctttctctgttggatccagtttcctgtctcttattgaaggatgttattacctcctttctaggatcattgctgggcttagtgaggtaatatgttcctttatttctgcccggcccggcattataaagggcgccacgagtcggcattgtcaggcggcggcacccgcgggacggagcttggctgttggtcggtgggttcccgtgcggcggcggcaaggaggaggagacacagttggagcagctccgtgggctgactggggcgggcctcagcagcgcgagcttgagtgcggccgagcctgcggcgccttccctgcgggtggggacgagcgggccccgcggagtcat

SEQ ID NO: 132580 - DNA, 784 bp, Homo sapiens
agcctttgtttgttgtatttcctctgtctccagacatcgcaggccggccgggcggcgttgttggcgggggccccggtggaggcccggcctgggcggcgcccgccatgaatgggctgtcgctgagtgagctctgctgcctcttctgctgcccgccctgccccggccgcatcgctgccaagctcgccttcctgccgccggaggccacctactccctggtgcctgagcccgagccggggcctggtggggccggggccgcccccttggggaccctgagagcctcctcgggcgcacccgggcgctggaagctgcacctgacggagcgtgccgacttccagtacagccagcgcgagctggacaccatcgaggtcttccccaccaagagcgcccgcggcaaccgcgtctcctgcatgtatgttcgctgcgtgcctggtgccagacaaggacaccaggctcagggaggccatccccagctggcatgggtgggcaggctgggcgactccaacaacccagcgcctggtggttgcctgctgggcaagagctggggcacaggggctgccctggcctgcgggtacatccaccttctcgccaggtacacggtcctcttctcgcacggcaatgccgtggacctgggccagatgagcagcttctacattggcctgggctcccgcctccactgcaacatcttctcctacgactactccggctacggtgccagctcgggcaggccttccgagaggaacctctatgccgacatcgacgccgcctggcaggccctgcgcaccag

SEQ ID NO: 132581 - DNA, 2251 bp, Homo sapiens
  misc_feature (1)...(2251): n = a,t,c or g
cgcccgccatgaatgggctgtcgctgagtgagctctgctgcctcttctgctgcccgccctgccccggccgcatcgctgccaagctcgccttcctgccgccggaggccacctactccctggtgcctgagcccgagccggggcctggtggggccggggccgcccccttggggaccctgagagcctcctcgggcgcacccgggcgctggaagctgcacctgacggagcgtgccgacttccagtacagccagcgcgagctgnagcaccatcgaggtcttccccaccaagagcgcccgcggcaaccgtgtctcctgcatgtatgttcgctgcgtgcctggtgccaggtacacgggtcctcttctcgcacggcaatgccgtggacctgggccagatgagcagcttctacattggcctgggctcccgcctccactgcaacatcttcacctacgactcctccggctacggtgccagctcgggcaggccttccgagaggaacctctatgccgacatcgacgccacctggcaggccctgcgcaccaggtgagggcgaccctgggggcagctcagcctggcgggagggagtgggtggtggtctgggggtctgtgcacgtgtggctgggagcccatcggctgaggcagcacttggggccaagtgaggcgaggctgctgcatccaggtccggaggactggcccatgaggccctgtggctgcggagcttggccatcctgccatggccagctctgagctctgtctgctcggccatctgtcctgctgcccctttgtcctgcaggaacctaggcccagagccatgagggggaggccagagcgtgcccagggcctccactggggatgtgtcccgttcgtttgagtggtgacatccaggtggcagctgggggctcctgcctgcccatgctcctgccttgcaagagggcgtctgcctgggatcagagcctagagcgtgtgggaggagagttgtggggtcccggcatgggcagggtggcaggtgggtcccgcgtgcttgggactgggcacgaggaggccttgtaactggtgctggatcagctgggtcaggggccgcacaccaatgacctgggggtgagggtgcccctgggtgggagctggtggtgctgaggtggccgaggacttgtccactcccaagggaaggtgctggtgggagggggtgccacctccgcagccaccaccctcgatgctgacctgggttgcactggcatctcactgggcgtggggactccgagagtccaaaattgggtggagacatttggggacacagctgcctgaattcctcatggccaagggggtgggcaagggctgcagggaggaagagtgtccgctgtcctggccagtgcaccaggaacggctttctaacccgggcaggaaggtatgaagcattcaggatgtgggggccacacagttcccagtgtgcactgacttggctgagtggggagactggagggtcgcatccggagctgggcccggggacgcccgctggtgggaagggtgcgcgcgcgttggaggccgcggctgaccctgctccggcgccgccaggtacggcatcagcccggacagcatccatcctgtacgggcaggagcatcggccacggtgcccaccgtgggacctggcctcgcgctacgagtgtgccgcggtggtgctgcactcgccgctcaacctcgggcatgcgcgtcgccttccccgacacacaagaaagacctactgcttcgacgcctttcccctacattcgagaaaggtgtccaagattaacgtctccccgtgctcatcatcccacgggcacgaaggacgaggtgatcgactttctcgaagcgggctggcgctctacgaggcgctgccaccaaggcggtggagccgctgtgggtggagggggccccgggcacaacgacatcgagctctacagccagtacctggagcggctggcgtcgctttcattctcccaggagctgcccagccagcgcgcctagcggcggcccccaaccggccggacctcagcaataaggcggcccccggacttcaccccgcgccggcccccacccaggggcttgcatgtggaccccccgggcggccccggtggaggcccggcctgggcggcgcccgccatgaatgggctgtggacgatgtacaggcaacgagacgtacgcactcctttccttttggaagcaagaagaaaatacgtgaaaacggacaattaaagatttaaaattttaaaaaaaaaaaaaaaaa

SEQ ID NO: 132582 - DNA, 478 bp, Homo sapiens
  misc_feature (1)...(478): n = a,t,c or g
tgannnnttgcnnnctannnnnaaaactgagnacccatgagancntcngaaannnncgnaannnnnggnncgacgannncctgtcaaagtcagagtggtggtcatggtcctggttttggcattaaggatgacaaggacaagaaaaagaaatatgaacctcctgtaccaactagagtggggaaaaagaagaagaaaacaaagggaccagatgctgccagcaaactgccactggtgacacctcacactcagtgccggttaaaattactgaagttagagagaattaaagactatcttctcatggaggaagaattcattagaaatcaggaacaaatgaaaccattagaagaaaagcaagagacaaggatctgctggaacctggctgctcggtcctgctcaaccacaaggtgaggtgatagtctttttcagaaagcccacggaagtgctttctcttctcacttaaggtcatctttctggtccg

SEQ ID NO: 132583 - DNA, 1909 bp, Homo sapiens
ggcacgagcttccggcagcggcagctcaagtggccaaggcaagatgggtcaaagtctagagaggtggtcatggttctggaggtggcaagaaggatgacaaggacaagaaaaagaaatatgaacctcctgtaccaactagagtggggaaaaagaagaagaaaacaaagggaccagatgctgccagcaaacgtgccactggtgacacctcacactcagtgccggttaaaattactgaagttagagagaattaaagactatcttctcatggaaggaagaattcattagaaatcaggaacaaatgaaaccattagaagaaaagcaagaggaggaaaagatcaaaagtggatgatctgaaggggggaccccgattgtcagtagggaaccttgggaagagattcatttgatgacaatcatgcccatcgtgtctacacctagtgggctcagaacactaccgtcagcattcttttcatttgtagacaaggatctgctggaacctggctgctcggtcctgctcaaccacaaggtgcatgccgtgataggggtgctgatgggtgacacggatcccctggtcacagtggatgaaggtagaaaaggccccccaggagacctatgcagatattgggggggttggacaaccaaatttcaggaaattaaggaatctgtggagcttcctctcacccatcctgaatattatgaagagatgggtataaagcctcctaagggggtccatccttttggtcccacctggccacgggtaaaacctttttgcccaaggcagtagcaaaccaaaccctcagccactttcttgagagggggtggctctgaacttattcagaagaacctaggagatgggcccaaaacccctcccgggaattgttccggagtttctgaagaactggccccgtccctccggtttattgatagaattttgcccccattggggacaaaaagatattgactccaattctggtggtgaggagagaatttcagcgaacaatgtttggaactgctgaacccagttgggatggatttgattcttaggggagattgtgaaagttatcatgcccacaaaccgaaatagaaactttggatccagcacttatcagacccaggcccgcatttgacagaaagtatgagtttccccctgccctgatgaaaaggacgaagaagcgcatctttcagatttcacacaaaagcagatgacgctggctgatgttggtaccccctggacgaccctgatcatggcctaaagatgacctctctggtgcctgaccatccaaggcaatcctgtacatgaagctggcctgatggcccttaagagaaccgtagaatgaaagtaccaaattgaagacttcaaaaaatcctaaagaaaatgttctttataagaaacaggaaggcacccctgagggggtggtatctctaatgaacccatggcttgtcatcaggaaaatggttgggagatttctcaatccctgaaagggatgaggttggggggagttgcccagaggaatccctgttcccactgattttttattagcaaaacatcctgtgtcttttggaataacaagtgtaaagtgcccattgggtggcctgttggtcactgtgcatcagtctgctttcccaataaagcgtgctctttcacaaacacttcctgtttctgcagtctccacacacacctaccgctcaacagcagcctgtgggtggacccagctacagggaagcctttggacaggaactcaggctgcggtcccaaggagtgtggacctcactatgcgttcgccacatcacacccccagagctggcgttcaacggtaattacagtgggaaatggtcactaccacagagccagggatattcgttgtttaaataataaaggctgcgttaatgtggctattgcttccaaaggaag

SEQ ID NO: 132584 - DNA, 274 bp, Homo sapiens
ctggcaggacctaatctgtcggatggctgcatcagtgaaggagcaatccacaaagccaattccattaccacagtcaacacctggcgatctcattcactgagtacctctgggaaatcagaggtacgtgatctgtttgtggctgagagacagtttgcaaaggaacaacatacagatgggacactaaaggaagttggagaagattatcaaatcgcaatcccagattcacacctgcctgtctcagaagaacggtgggcattggatgcactaagaaatt

SEQ ID NO: 132585 - DNA, 845 bp, Homo sapiens
tgggtttgttgaagcagttgctggtgcaacagctaggtttgactgagaagagcgttcaggaagactggcaacatttcccaagatacagaacagcctctcaggggccgcagacagacagtgtcatccagaactctgaaaatattaaggcctatcattctggtgaaggacatatgccctttagaactggaactggtgacattgcaacttgttacagtccacggacttcaactgaatcttttgctccacgggattcagtgggactggcaccccaggatagccaggcaagtaacattttagtaatggaccacatgattatgaccccagagatgcctaccatggagccagaagggggtcttgatgacagtggagagcacttttttgatgcccgtgaagcacatagtgatgagaatccatcagaaggaaactatttgatccttgatggctatgacccagtgcaggagagttccacagatgaggaggttgcttcctcacttaccctgcagcccatgacaggcatccctgctgtggaatccacccaccagcagcaacattctcctcagaatactcactccgatggggcaatttcaccattcacccccgaatttctggtccagcagcgctggggagctatggagtattcctgttttgagatccagagtccctcctcttgtgcagattcacagagccagatcatggagtacattcataagatagaggctgaccttgaacacttaaaggtacctcatacttccacatccataggacttggttgtaagaaacatttagcagaggggaagaatagggtgatgaaaatgctgatgtcaataaacttgttcaggttctag

SEQ ID NO: 132586 - DNA, 7843 bp, Homo sapiens
  misc_feature (1)...(7843): n = a,t,c or g
gttttaggggtgactgaacatgggacaccaaagcccttttcaaaagtaagtaaatcttaagcagctttcaataaggcgcattttaagaaacgtaaccttttttcctctaaagtttcattttaaaggaaaagaaaccctgtataccaatctgttatgtagtataaaagaaagctcttaagaaacactggtcattcaaaagctgtattttgaagtatgtataaaacagccatttgtaggagaggatgaaatttcagtgctaagtcagattcaggaatctgattagaatttattgtaatataaagatttgtgctgtttctcattgtccacctaaagtcttcaaattgaattcactcttttttcttcataggtttgacagtgtagcttttggagaaagtcaaagtgaggatgaacaatttgaaaatgacttagagacagatccacccaactggcagcagcttgttagtcgagaagtgttactgggactaaaaccttgtgaaatcaaaagacaggaagtgattaatgaattgttctacactgaaagagctcatgttcgaacactgaaggttcttgatcaagtgttctatcagcgagtatccagagaaggaattctgtcaccctcagagctacggaaaattttttcaaacttggaagatattcttcaacttcatattggattgaatgaacaaatgaaggctgttcgaaagagaaatgagacctctgttatcgatcagattggggaagatttgctgacatggttcagcggaccaggagaggagaaattgaaacatgctgctgctaccttttgcagtaaccaacctttcgccctggaaatgatcaaatctcgtcagaaaaaggattctcgatttcagacttttgtgcaagatgctgaaagtaatccactgtgtcgtcgtcttcaactgaaggatattattcccactcaaatgcaaaggcttactaagtacccacttctgttggataatattgccaaatacacagaatggccaacagaaagggagaaggtgaagaaagctgcagatcactgtcgtcagatcttaaattttgtaaatcaggctgtcaaggaggcagaaaacaagcagcgccttaggaagattatcagcgtcgccttgatacctccagcctggaagttgtcagagtacccaaatgttgaaagtgctcaggaatatggatttaacaaaaaggaagatgattcatgaagggccattggtttggaaggtgaatagagataaaactattgatttatacacgttgctgctggaagacattcttgtattgttacaaaagcaggatgatagactggttttaaggtgtcatagtaagattctggcatctacagctgatagcaaacacacgtttagccctgtcattaagttgagtacagtgttggttcgacaagtggcaacagataacaaagctttattcgtcatttccatgtcagacaatggcgctcagatttatgaactggtggcacagacagtttctgaaaagactgtctggcaggacctaatctgtcggatggctgcatcagtgaaggagcaatccacaaagccaattccattaccacagtcaacacctggcgaaggagataatgatgaagaagatccttcaaaattaaaagaggagcagcatggcatttcagtcactggtttgcagagtccagacagagatttgggattagaatctaccttaatatcgtcaaaacctcagtctcattcactgagtacctctgggaaatcagaggtacgtgatctgtttgtggctgagagacagtttgcaaaggaacaacatacagatgggacactaaaggaagttggagaagattatcaaatcgcaatcccagattcacacctgcctgtctcaaaagaacaggagggcattggatgcactaagaaatttgggtttgttgaagcagttgctggtgcatcagctaggtttgactgaaaaaagcgctctggaaaactggcaacattttccaagatacagaacagcctttcaggggccgcagacagacagtgtcatccagaactctgaaaatattaaggcctatcattctggtgaaggacatatgccctttagaactggaactggtgacattgcaacttgttacagtccacggacttcaactgaatcttttgctccacgggattcagtgggactggcaccccaggatagccaggcaagtaacattttagtaatggaccacatgattatgaccccagagatgcctaccatggagccagaagggggtcttgatgacagtggagagcacttttttgatgcccgtgaagcacatagtgatgagaatccatcagaaggtgatggagcagttaacaaggaagagaaggatgttaatttacgcatctcaggaaactatttgatccttgatggctatgacccagtgcaggagagttccacagatgaggagggttgcttcctcactttccctgcagcccccatgacaggcatccctgctgtggaatcacccacccagcaagcaacattctccctcagaaatactcactccgattggggcaatttcaccattcacccccgattttctggtcccagcagcgctggggagctatggagtatttcctgtttttgaggatccagagtccctcctcttgtggcaggatttcacaggaggccagatcatggggagttacatttcattaaggttaggaggctgacccttgaacacttaaagaaggtggaggaaagttaacacccattcttttcccaaaggcctggcttggatcagcccctcacagacaagcacctcagataaaagttaagagcctcatgtcctgggaggtgactgcaaggttggttggatttggagtatcggccgtgtcttcaccacatccctggctccagtgtggatgccagagagagtgtggaccagagggatcctgccctgtgaaccccacccctgggattagtcaaagtcccccaaggtgccccagagtgggacctagttccttcacagtgtggcagctgcacctaatctgtttggtgagggaatatcccattccctcactctactctcctcactatcggaaattcattttgattcagaataaaaaccaaatgtatagagctttgggtgtaggatatgaaattgtacttagatttaagaaaaagagaaaatcagatgtatttatttgacttcattccgtatttgaaagcacattttaatttttatttgccttggtttgttttaattgagtagggagagttttagacctttgtctttagtacacccaaggatcaactgctcctgaagcaaagaggtcaggatggagtatgcagaagttgggtagagaggttaagaagaggaggaagtgagacggggaagggaggagcaccttgcttcactataccgtatttcaagctctctgctgtccagtaggctgcttctctgagggtcacctcaaaggtatgctatgccgtgtggctcttatgtgcccaggtggtgtggtcagagagtggatgggcttcctcccgccctgaggcaagcacctcttctctgtagctgggatcaaccacaattaataggaatcctcaacatactaaatagcaggcacttgaaaatgggtgtgttttcttccattgtcgtcttttctattgagggttgggattttgggtgggagaggaaagcaaatttcattttcttgactataaatttgtcattccttggtatcatttcatttttataattatacattaggacattggcacttgtgtaaaactgtccctgcagattgagcaggaagtaaaaacaaatggaaatgcttcggatagtggcaggggtgggggttgctaaggaaagggtgggatgggagtgggtaaagagtttgggaaggttatctaactgaatcactactgagttgaatcatggctatcattagccacaggtactgctgattataaggccagtaaaattttagtacctggaggtttgactctaatttttgcactgatggtgccaaagggccctgagtcaaaaggatagccaagggtggagtggaaaaagatatggtgaaggcagaactgctcacaccagctccagaagcacgtcctctgacttcactgccgcagctctttccacacggggccgtgattgaccctaaaaattgcagaccagcacatacactggacactgcaggcaaggtgttggtaacttgcctgctctagggatgaatagtagcgttagcagcaccctacagagggtaagtttcagaattgtaatttgagaactccttcaattatattgactttctttggttttccttgtgcattaaggtatatattttttgaagtaattttggccaactaaaaatgaagtctgtaaattctgttaataaacaaggagttcatccgttgctcacatctttcattggtgccctctgaactctgtgggttgctaggatgtaattttaatgcttccctgcagtccaaagatgattttttcaccacaaatggtaagggatgcccacctacttttataaacaccactgcaacttaacaagtttatttatctatgtccagatttctgtttctgtcctaaattgatctgtgtttttaggtggatcaacttggatctttagacctcatctataaattgaaattatatttttaagtcataagccaagtacaatctaactcagaatgggattaaaaattttagaagcagaagctaatatataaatgaagtttgggatttggaactttctgtatctcttaggaggaacaagtaaaaaccaaatggttacattgtgctgctagaaataatgtcattctcaattaaaagggttacacctgtagccacttgacactaacaccatcgagggcaattaatcaggagaaaagtaaatataaaaactttgctcttaacgtcacacactacagggtaattatgtaattctctaggcactcaattaaggaaggcttgtagggttaggcaaaatttcagtttctctagttcagccagtgtcttgtccttaggtaattatttgctttccctgcagttcaatttctccttgggaactctaacagggacttaactgggaaggaattactttggacccattaggctctaggtactttcccaaattaaattccatattctaggattttttcaaacaaaggccccaaggatggaaggtcttaatttctggaaaatattctncacaatttttggaatgttctttttatcttaccgacctaacttctctttttccctcccaacttggcctcccacacgttccatttcattttggccattatagtcacatccgtttgactttggttgtgacatcttcctttcagggatgatgggaattaggatgcagtctgtctttgagtgaggactgggtcaccatcagagggagttttttcttaaggtgacgtggactaggaagttggaaatcttacttccctggctaaagggggcacaggggtggtgtacaaagaaagctaccttcccagagcaagcaggctgcattttagctatggaagtgacctgctgtgacactgtgctctcttctgtgggcttaatggttcctttgctatgaagtggcaaattacatgtagagtgtctccttccttttcagagaacagttaatcaaggcaaatcagcaagcccccaaagtgctgtaatttaacatcatgattaccaccgttcgaagcgtatatattttgcatactttaaaatcaccgtaacttggactgcttgaattacattggcttttagaacccgaaattgtaactatgtattgtatttcatgggaggtatattttatgagctttttggctttctttttttcccacagcaactgccaatgaaggatgaatccccttttgtaaaaagttgttgttgttgttgtttatttgattttgagttaggagggataatagagaagtccatttaaaaattatttttagaagctaaagaaagtaattatgcttcctgtggaattgtctttttactggcatctctgtyyttcctctcttgatgttagtaaatctsgtgtaatacgtggggcttccatatttcaaagtggaagctttcttctctgaagtcgatatatggttttgaattactagagctttggtcagtatttccttccctaatatgtcacagagggcaccacttgagaactgcgtgccataggacctcaaaataccaaatttagcagggcctcacagtcagcttcctcatgggctagtttttcccccttatattacaatttttgttttataagacattttttttcctgatatttacaccacttttcagagtccatctacaaaattttttcttttcctcaagaaaagagtttcctttttggccttattccttatggcctttccccactgggtatttgtaggggtttttgataataaattggtaggaaaaaaaagtaccctcctagaaggaagccttccccacccatttcccaggtgcccaactgctaagcgggatatattcccaaaaaatgggtaaccggtccatgtggcacactgttgggttatttttaataagccctcttccctacctagaaccattttattttcccttggttccaccataccaatccatgtacccctttaaccagaaattgcttttcacacacaaatatctggaactaatctttaaaaaaaactttattgaataatccatgtatttttactgatccacattttgcaaatgccctaaaagactttattgttctcaattatccgagatgtacctttgtaaaataggctcttttatgaattaacctgatatgggctggatggtttctggaacaaaatattgtgtcatctaaaaactttctgttttctggggtctgggcaaaatagaaaataagatttcaaatattaaataagtcttaaaggaaccaagcatgtgactttttatttgtattctggttgatttgtcttgtccaagttatattagaaaagttgaggagtcgaggagcctgtaattaattttcctgtcagtgactgtcagacatcttcctgcttattagagcatccctagcaacaagggctaaacctttcatgacagtgctgggcaggtggggcttgccctaggcatgtgggggcaggtttgttgttttttttaatagctttattgaggatatttcacatatcatataattcatccatttaaagtgtataatcagatgggttttggtatattattgatttttaattgtggtgaaatatatatataacaaaatttgctattgtaactatttttaagtataaagttcagtgaggtaggccagcttttatgacgcacctgaagataactttggttttaatcctaccctaaatgaagcatatgcctctatttttcctgtccccagtgctgggcttcttcacataccaacatttctgtgcttttaccaacagcattttagctcagaaggctcgcttactttgggcatttgctgtattttggttttgaaatacttgtaatttgacttattcttgggataatattttagttttcagtcattcaagggcacatttggctgacggagctaataagcgtaataaaatgcttagtagtttataccatcttttagttaaacattttaaagattaagactattcaaatgtactttgcggaaattaacctgtttgtatgcctggctttgtttacaaacatatatctatatctatatatatagatacagatacagatacatatctggtggaacaaagaaatacctgtaccattcccacttgctctttgatagccacctcctaggaatggagacaataaaactctgtatttgcatgtgaaaaa

SEQ ID NO: 132587 - DNA, 414 bp, Homo sapiens
tcaggccataaacccaggcattctagcaggcaacggcaatcccctttgggtcccctccttgtatgggagctctgttttcactctattaaatcttgcaactgcactcttctggtccttgtttgttatggctctagctgagctttcgctcgctgtccaccactgctgttttgccagtgttgcagacccgctgctgacttccatccctccggatccagcagggtgtctgctgtgctcctgatccagcaaggcgcccattgccgctcccgatcgggctaaaggcttgctatttttcagctctttctcttcaaacttctttaacatgtcttggcttagttgttctgcttgattttccaaaagaagcagcttctctggataaggtgtaggatagttaaaggaggttctagtaagagccat

SEQ ID NO: 132588 - DNA, 459 bp, Homo sapiens; identical to SEQ ID NO: 128256

SEQ ID NO: 132589 - DNA, 1092 bp, Homo sapiens
tcacaatatgtccagattcttagcactttccacttctcctccactttcatcgtggtccaagtcagtatcaccccctgcaatgtttgttgtgaccccctctaactggttccccgacctgcgcctttcctttagcatgttcagtttctgaacattccctcctctttcctcctcctccttcctcctcctcctcctccttcttctcctccttctcggccgggaggaggcagggctggatccctcagccgccgccgctcctcctcctggcaggccggccgcggagtcagctgacgccggcgctccagcctcgcctccccgcgccgcgctctgcgctccccgaaagtggctgcaagccggccgcccactgtcagggttggggggacagagaaagtgatgtgcgccttctaaagcctcgcccagcgccgccgaagcagcttcacctctccaactttctcccaccgactgcttgtcttgaccctgccctccaccctccccagagccacttcgggtgcgcgctgtgaggatccggagcagacgcctcggggtgagtatcgatcctctccgtgttgctgttcgccggttcgattgtctctctcttgagccagcatccctggagggtggacggagagtccccggccgcgcgccggagaattgcgcggtggctttctcagccgaaacccgcgtctccggggctgtcactgtaaggccagcgtctaggtatgtaatggatctatctttatctcttggatgacttggctttctgatggtggccgcgtgttgggcttcagtagcccctggagcccatctactcgaaataaatatttctcggtagccatggaagttggagctctgtcccaggtgtcgtgtcaaaggcggtgcgggctggcctctggtcggggccaacttgggtagatacttgaatctggattttccgtggttcgaagccggggtggtggatttctgttgctggaatacaccctggaggtccacggaagggttatttacgtggaacctgatacctggcatagcgcaagtgctccctacatatgtcctcacgctatccactgctacgaccctggtccgaaccctcctcat

SEQ ID NO: 132590 - DNA, 2539 bp, Homo sapiens
  misc_feature (1)...(2539): n = a,t,c or g
caagagttcggcgcgaggggctgggtccctctagccggcgccgctcctcctcctggcaggccggccgcggagtcagctgacgccggcgctccagcctcgcctccccgcgccgcgctctgcgctccccgaaagtggctgcaagccggccgcccactgtcagggttggggggacatgagaaagcgatgtgcgccttctaaagcctcgcccagcgccgccgcaagcagcttcacctctccaacttttttncacccaccgactgcttgtcttgaccctgccctccacccttccccagagccactttcgggtgcgcgctcttgggtaaagggggggtcaccggctgtctgggatggcttccaattttaatgacatagttaaacaagggtacgtgaggatccggagcagacgcctcgggatttatcagcgatgctggtttaatattcaagaaagcttcaagcaaaggtccaaaaagactggagaaattttctgatgaacgtgctgcatatttcaggtgttatcataagctgttcttgctgttttccagtctctgctatgggacttatcatgttgttgtactccctacactgaagccccgagaggatgaggactggatctcattgtgtctcagacactgcctgatgcagaaagacactcattcaatgcttggggaatgtggggagagaagggaggggaagaagcagaaaacaggtgccctgggctcctctctttccttggaagatgccaagcacctcctgccctttatacctgctcttcccttttcctggaatgctctcccccaggatctttgtaatgtattcaagttgctgtgggattatcggattagagtggaccccagtcccatagctggtacccttataagaagagacacagacccacagggagaaagccatgtgaagacaggcagacactggagtgatacaattaaaagccaaaggtgtcaaggactgcggcagccaccagaccgtcccattcccatccttctcatggttaaaggtcaacatgtgtggccaagccagctggacaaggctcaaatccaggaggttacagaactcaataatgtgaagaacgtagctcgattgccaaaaagcaccaagaaacatgccatagggatttatttcaatgacgatacctccaagacttttgcttgcgaatcagatcttgaggctgatgagtggtgcaaagtactccagatggagtgtgtaggaacacggatcaatgacatcagccttgggagagcctgacttactgggccactggggttgaggagagaacagagtgaggagattcaatgtgtatttgatgacatctccttaacttaggatgttacatgggcgaatgtgccttgcaggtttacatatggagtatatctgtctttggggacgtcccaggantccccaggagttcaaactcatctcttgggccgctaagcgccctgcggcggtatgagacgtggtactccttgtttcaattatcaggcagggaggatgttgtcagactggtgaaggcctgtttatctttcagacccgagacggggaggccatctatcagaaagtccactcttgctgctttggccatagccgagcagcacgagcgcttgctacagagtgtgaaaaactcgatgctccagatgaagatgagtgagcgggccgcctcgctgagcaccatggtgcccctgcctcgcagcgcctactggcagcacatcacacggcagcacagcacgggacagctctaccgcttgcaagatgtttccagccctctgaagcttcatcgaacagagacttttcccagcctacaagattcttgagcactgacagtaactggccatgaattgttaacacacttgtgatgtgtcagcccacagattcacccaggaggtcacagaatgacagcaagggaaatgacgaccaagagaagaagcttaaagccctggctaattgtgtggtcattggaaaaactctgcaatacaataattttctttatttcctttttcttttttaaattcttagtgtaattgaaacgtgctctatagatattgactctgtgttccctcttttacagctggacagaaagaagtcaatgtcacgaaatgattttctattgtagatactttgtcccttgcacttctctgaatctgtccttttgtggattcttgtgattttccttccaagtgtttcagttgtatgacagtcagtattgacaataaaatggcgttttaattatttgttatttgtttacccccctattcctcagttattattactgtggttctgattaactactgggaaattatatttgattatatcaccaattagttaaatcagtgcttcgactcactccttatctgttctgttcaaaactatttgttcaaagaacccattagtattgtttacagggttacagtttctctcacatgctttcctcacccctttacccccctttttgaaagcctttattttgttcggagtctcttcataaaacatttgaaaataaaagatcattcttcacccataaaaaaaaaaa

SEQ ID NO: 132591 - DNA, 620 bp, Homo sapiens
aagacagatggatcttggagaatgacagtggattactgtaagcttaaccaagtggtgactccaattgcagctgctgtaccagatgtagtttcattgcttgagcaaattaacacatctcctgatatcacactggtccattacattgatgacattatgctgaatggatcaagtgagcaagaagtaacaaacacactggacttattggtgagacatttgtgtgccacaggatgggaaataaatccaactaaaattcagggatcttctacctcagtaaaatttctaggggtccagtggtgtggggactgtcgagatgttccttctaaggtgaaggataagttgctgcatttggcccctcctactaccaagaaagaggcacaacacctaacgggcctatttggatttcggaggaaatacattccttatttgggtgtgttactctgtcccatttatcaagtgacccgaaaggctgccagttttcagtggcgtccagaacaggagaaggctctgcaacaggtccaggctgctatgcaagctgctctgccacttgggccatatgacccagcaggtccaatggtgcttgagatagcagtggcagatacagaggctgtttggggccattg

SEQ ID NO: 132592 - DNA, 424 bp, Homo sapiens; identical to SEQ ID NO: 128793

SEQ ID NO: 132593 - DNA, 207 bp, Homo sapiens; identical to SEQ ID NO: 128794

SEQ ID NO: 132594 - DNA, 1863 bp, Homo sapiens; identical to SEQ ID NO: 117889

SEQ ID NO: 132595 - DNA, 3819 bp, Homo sapiens; identical to SEQ ID NO: 118066

SEQ ID NO: 132596 - DNA, 1524 bp, Homo sapiens; identical to SEQ ID NO: 116251

SEQ ID NO: 132597 - DNA, 2265 bp, Homo sapiens; identical to SEQ ID NO: 116371

SEQ ID NO: 132598 - DNA, 1716 bp, Homo sapiens; identical to SEQ ID NO: 123223

SEQ ID NO: 132599 - DNA, 1707 bp, Homo sapiens
atgcagaaaaagcatgacaaaatccgaaattctttcatgataaaaactctcaaaaaactacgtacagaaggaatttacctcaatacaataaaggcaacatataaaaagcccataactaacatcatactcaatggtgaaaaccagaaagcttttgctctaagatcgggaacaagtgcaatcaaactagaactcaggattaagaatcccactcaaagccgcccaactacatggaaactgaacaacctgctcctgaatgactactgggtacataatgaaatgaaggcagaaataaagatgttctttgaaaccaacgagaacaaagacacaacataccagaatctctgggacgcattcaaagcagtgtgtagagggaaacttatagcactaaatgcccacaagagaaagcaggaaagatccaaaattgacaccctaacatcacaattaaaagaactagaaaagcaagagcaaacacattcaaaagctagcagaaggcaagaaataactaaaatcagagcagaactgaaggaaacagagacacaaaaaacccttcaaaaaatcaatgaatccaggagctggttttttgaaaggatcaacaaaattgatagaccgctagcaagactaataaagaaaaaaagagagaagaatcaaatagacacaataaaaaatgataaaggggatatcaccaccgatccctcagaaatacaaactaccatcagagaatactacaaacacctctacgcaaataaactagaaaatctagaagaaatggataaattcctcgacacatacactctcccaagactaaaccaggaagaagttgaatctctgaatagaccaataacaggagctgaaattgtggcaataatcaatagcttaccaaccaaaaggagtccaggaccagatggattcacagccgaattctaccagaggtacaaggaggaactggtaccattccttctgaaactattccaatcaatagaaaaagagggaatcctccctaactcattttatgaggccagcatcattctgataccaaagccgggcagagacacaaccaaaaaggagaattttagaccaatatccttgatgaacattgaggtaaaaatcctcaataaaatactggcaaaccgaatccagcagcacatcaaaaagcttatccaccatgatcaagtgggcttcatccctgggatgcaaggctggttcaatatatgcaaatcagtaaatgtgatccagcatataaacagagccaaagacaaaaaccacatgattatctcaatagatgcagaaaaagcctttgacaaaattcaacaacccttcatgctaaaaactctcaataaattaggtattgatgggatgtatttcaaaataataagagctatctatgacaaacccacagccaatatcatactgaatgggcaaaaactggaagcattccctttgaaaactggcacaagacagggatgtcctctctcaccactcctattcaacatagtgttggaagttctgaccagggcaattaggcaggagaaggaaataaacggtattcaattaggaaaagaggaagtcaaattgtccctgtttgcagatgacatgattgtatatctagaaaaccccattgtctcagcccaaaatctccttaagctgataagcaacttcagcaaagtctcaggatacaaaatcaatgtacaaaaatcacaagcattctga

SEQ ID NO: 132600 - DNA, 3621 bp, Homo sapiens
atggtaaagggatcaattcaacaagaggagctaactatcctaaatatttatgcacccaatacaggagcacccagattcataaagcaagtcctcagtcacctacaaagagacttagactcccacacattaataatgggagactttaacaccccactgtcaacattagacagatcaacgagacagaaagtcaacaaggatacccaggaattgaactcagctctgcaccaagcagacctaatagacatctacagaactctccaccccaaatcaacagaatatacatttttttcagcaccacaccacacctattccaaaattgaccacatagttggaagtaaagctctcctcagcaaatgtaaaagaacagaaattataacaaactatctctcagaccacagtgcaatcaaactagaactcaggattaagaatctcactcaaagccgctcaactacatggaaactgaacaacctgctcctgaatgactactgggtacataacgaaatgaaggcagaaataaagatgttctttgaaaccaacgagaacaaagacaccacataccagaatctctgggacgcattcaaagcagtgtgtagagggaaatttatagcactaaatgcctacaagagaaagcaggaaagatccaaaattgacaccctaacatcacaattaaaagaactagaaaagcaagagcaaacacattcaaaagctagcagaaggcaagaaataactaaaatcagagcagaactgaaggaaatagagacacaaaaaacccttcaaaaaatcaatgaatccaggagctggttttttgaaaggatcaacaaaattgatagaccgctagcaagactaataaagaaaaaaagagagaagaatcaaatagacaaaataaaaaatgataaaggggatatcaccaccgatcccacagaaatacaaactaccatcagagaatactacaaacacctctacacaaataaactagaaaatctagaagaaatggatacattcctcgacacatacactctcccaagactaaaccaggaagaagttgaatctctgaatcgaccaataacaggctctgaaattgtggcaataatcaatagtttaccaaccaaaaagagtccaggaccagatggattcacagccgaattctaccagaggtacaaggaggaactggtaccattccttctgaaactattccaatcaatagaaaaagagggaatcctccctaactcattttatgaggccagcatcattctgataccaaagccgggcagagacacaaccaaaaaagagaattttagaccaatatccttgatgaacattgatgcaaaaatcctcaataaaatactggcaaaccgaatccagcagcacatcaaaaagcttatccaccatgatcaagtgggcttcatccctgggatgcaaggctggttcaatatacgcaaatcaataaatgtaatccagcatataaacagagccaaagacaaaaaccacatgattatctcaatagatgcagaaaaagcctttgacaaaattcaacaacccttcatgctaaaaactctcaataaattaggtattgatgggatgtatttcaaaataataagagctatctatgacaaacccacagccaatatcatactgaatgggcaaaaactggaagcattccctttgaaaaccggcacaagacagggatgccctctctcaccgctcctattcaacatagtgttggaagttctggccagggcaatcaggcaggagaaggaaataaagggtattcaattaggaaaagaggaagtcaaattgtccctgtttgcagacgacatgattgtttatctagaaaaccccatcgtctcagcccaaaatctccttaagctgataagcaacttcagcaaagtctcaggatacaaaatcaatgtacaaaaatcacaagcattcttatacaccaacaacagacaaacagagagccaaatcatgggtgaactcccattcacaattgcttcaaagagaataaaatacctaggaatccaacttacaagggatgtgaaggacctcttcaaggagaactacaaaccactgctcaaggaaataaaagaggagacaaataaatggaagaacattccatgctcatgggtaggaagaatcaatatcgtgaaaatggccatactgcccaaggtaatttacagattcaatgccatccccatcaagctaccaatgactttcttcacagaattggaaaaaactactttaaagttcatatggaaccaaaaaagagcccgcatcgccaagtcaatcctaagccaaaagaacaaagctggaggcatcacactacctgacttcaaactatactacaaggctacagtaaccaaaacagcatggtactggtacaaaaacagagatatagatcaatggaacagaacagagccctcagaaataatgccgcatatctacaactatctgatctttgacaaacctgagaaaaacaagcaatggggaaaggattccctatttaataaatggtgctgggaaaactggctagccatatgtagaaagctgaaactggatcccttccttacaccttatacaaaaatcaattcaagatggattaaagatttaaacgttaaacctaaaaccataaaaaccctagaagaaaacctaggcattaccattcaggacataggcgtgggcaaggacttcatgtccaaaacaccaaaagcaatggcaacaaaagacaaaattgacaaatgggatctaattaaactaaagagcttctgcacagcaaaagaaactaccatcagagtgaacaggcaacctacaacatgggagaaaatttttgcaacctactcatctgacaaagggctaatatccagaatctacaatgaactcaaacaaatttacaagaaaaaaacaaacaaccccatcaaaaagtgggcgaaggacatgaacagacacttctcaaaagaagacatttatgcagccaaaaaacacatgaagaaatgctcatcatcactggccatcagagaaatgcaaatcaaaaccactatgagatatcatctcacaccagttagaatggcaatcattaaaaagtcaggaaacaacagggtgaacaaggagaaaaaggagatccagctctggctggccttaatggagaaaatatgtgttcagaaacccattttgtatgcaggagatcattacagcggaagagaggctgaagaccaatctttccggcctgtggagaaagtcgagcaccagtgtgacacaaggagaaaaaccgcatttgagaaaagcattactgatgtgtttctcagaggctattacaatgccatggccttaacaacattgtactttgtcacaggaagacaattagagaaaaacattctaaaattcatatggaaccaaaaaagagccttggtagccaaagcaatcctaggcaaaaagaacaaagttggaggcatcacacttcctgacttcaaactatactacaagttcagtatggcactggtacaaaaacaagcacatagaccaacggaacaggttagagaacccagaaataaagatgcatacctacaaccatctgattttcgacaaggcttacgaaaacaagcaatggggaaaggactcattcaataa

SEQ ID NO: 132601 - DNA, 3090 bp, Homo sapiens; identical to SEQ ID NO: 121155

SEQ ID NO: 132602 - DNA, 350 bp, Homo sapiens
gcccttggtgtgaactgtttaaagagttatacaaaataaatgcatttgacactcctgattcattgctcatgagaggcaaggagtttagtgaccctatacatcatacctttgaccatatgtggagaactaaggaacataatgaagctggttggttgctcctaagttcagtggataaagtgatgaaagaaaatgatgaactcggggattctatctcccagcttcagaagcagatactgagcctcaaatctgccaagattgccctgagtgagagtctaatctcctgtagagaaagaactgaaattgtggaaaaatagacataagctcttatcatgttagtggctgacctgcaa

SEQ ID NO: 132603 - DNA, 481 bp, Homo sapiens
  misc_feature (1)...(481): n = a,t,c or g
agctcgtacataagctcctactttaactggaggacaacaatgatgttttgggtcccctggaatcaacgtcagctcaaagccagtgtccagtagtccccaaagtgtctgatcattcccctcttcccagtgcacagttatcctggtaaaaggccctaggtctccttggggaaggatgaggtaaagattcactgcataaattgtcaataaagtagtacttcctcaagggggcccagcctccccttcattgaaggggttctgggtctataaactggctcaagtctggaaattgattgaggggccatgattccctatttttataattcaaattagtcttttgtctatttgacctagaagttttctgtttgtataaattaagtaggaatgcagtaggcttcctatcagtttcacttctagcggacgcgtnnnnnacccggnanttccnnnccngtcgctcatgcgtacgaanatcaggangagccat

SEQ ID NO: 132604 - DNA, 3274 bp, Homo sapiens
atggtaaagggatcaattcaacaagaggagctaactatcctaaatatttatgcacccaatacaggagcacccagattcataaagcaagtcctgagtgacctacaaagagacttagactcccacacattaataatgggagactttaacaccccactgtcaacattagacagatcaacgagacagaaagtcaacaaggatacccaggaattgaactcagctctgcaccaagcagacctaatagacatctacagaactctccaccccaaatcaacagaatatacatttttttcagcaccacaccacacctattccaaaattgaccacatacttggaagtaaagctctcctcagcaaatgtaaaagaatagaaattataacaaactatctctcagaccacagtgcaatcaaactagaactcaggattaagaatctcactcaaagccgctcaactacatggaaactgaacaacctgctcctgaatgactactgggtacataacgaaatgaagacagaaataaagatgttctttgaaaccaacgagaacaaagacaccacataccagaatctctgggacgcattcaaagcagtgtgtagagggaaatttatagcactaaatgcctacaagagaaaggaggaaagatccaaaattgacaccctaacatcacaattaaaagaactagaaaagcaagagcaaagacattcaaaacctagcagaaggcaagaaataactaaaatgagagcagaactgaaggaaatagagacacaaaaaacccttcaaaaaatcaatgaatccagtagctggttttttgaaaggatcaacaaaattgatagaccgctagccagactaataaagaaaaaaagagagaagaatcaaatagacacaataaaaaatgataaaggggatatcaccaccgatcccacagaaatacaaactaccatcagagaatactacaaacacctctacacaaataaactagaaaatctagaagaaatggatacattcctcgacacatacactctcccaagactaaaccaggaagaagttgaatctctgaatagaccaataacaggctctgaaattgtggcaataaccaatagcttaccaaccaaaaagagtccaggaccagaaggattcacagccgaattctaccagaggtacaaggaggaattggtaccattccttctgaaactattccaatcaatagaaaaagagggaatcctccctaactcattttatgaagccagcatcattctgataccaaagccgggcagagacacaaccaaaaaagagaattttagaccaatatccttgataaacattgatgcaaaaatcctcaataaaatactggcaaaccgaatccagcagcacatccaaaagcttatccaccatgatcaagtgggcttcatccctgggatgcaaggctggttcaatatacgcaaatcaataaatgtaatccagcatataaacagagccaaagacaaaaaccacatgattatctcaatagatgcagaaaaagcctttgacaaaattcaacaacgcttcatgctaaaaactctcaataaattaggtattgatgggacgtatttcaaaataataagagctatctatgacaaacccacagccaatatcatactgaatgggcaaaaactggaagcattccctttcaaaactggcacaagacagggatgccctctctcaccactcctattcaacatagtgttggaagttctggccagggcaatcaggcaggagaaggaaataaagggtattcaattaggaaaagaggaagtcaaattgtccctgtttgcagacgacatgattgtttatctagaaaaccccatcgtctcagcccaaaatctccttaagctgataagcaacttcagcaaagtctcaggatacaaaatcaatgtacaaaaatcacaagcattcttatacaccaacaacagacaaacagagagccaaatcatgagtgaactcccattcacaattgcttcaaagagaataaaatacctaggaatccaatttacaagggatgtgaaggacctcttcaaggagaactacaaaccactgctcaaggaaataaaagaggacacaaacaaatggaagaacattccatgctcacgggtaggaagaatcaatatcgtgaaaatggccatactgcccaaggtaatttacagattcaatgccatccccatcaagctaccaatgactttcttcacagaattggaaaaaactactttaaagttcatatggaaccaaaatagagcccgcatcgccaagtcaatcctaagccaaaagaacaaagctggaggcatcacactacctgacttcaaactatactacaaggctacagtaaccaaaacagcatggtactggtaccaaaacagagatatagatcaatggaacagaacagagccctcagaaataatgccgcatatctacaactgtctgatctttgacaaacctgagaaaaacaagcaatggggaaaggattccctatttaacaaatggtgctgggaaaactggctagccatatgtagaaagctgaaactggatcccttccttacaccttataccaaaatcaattcaagatggattaaagatttaaacgttagacctaaaaccataaaaaccctagaagaaaacctaggcattaccattcaggacataggcgtgggcaaggacttcatgtccaaaacaccaaaagcaatggcaacaaaagccaaaattgacaaatgggatctaattaaactaaagagcttctgcacagcaaaagaaactaccatcagagtgaacaggcaacctacaacatgggagaaaattttcgcaacctactcatctgacaaagggctaatatccagaatctacaatgaactcaaacaaatttacaagaaaaaaacaaataaccccatcaaaacgtgggcgaaggacatgaacagacacttctcaaaagaagacatttatgcagccaaaaaacacatgaagaaatgctcatcatcactggccatcagagaaatgcaaatcaaaaccactatgagatatcatctcacaccagttagaatggcaatcattaaaaagtcaggaaacaacaggtggaatattggtggacttgtccccaagttaaattatgatttaaagagacacttagaaaaagaggaaaagcctactaaaactgagcaggctatcagcaaagacaaaaatgcagagaagaacaaccgtttatctcttcagggagaaattattattgcaattatattgataacagaacctgggt

SEQ ID NO: 132605 - DNA, 2432 bp, Homo sapiens
atggaagacgaaatgaatgaaatgaagcgagaagggaagtttagagaaaaaagaataaaaagaaatgaacaaagccaccaagaaatatgggactatgtgaaaacaccaaatctacgtctgattggtgtacctgaaactgacggggagaatggaaccaagttggaaaacactctgcaggatattatccaggagaacttccccaatctagcaaggcaggccaacattcagattcaggaaatacagagaacaccacaaagatactcctcgagaagagcaactccaagacacataatcatcagattcaccaaagttgaaatgaaggaaaaaatgttaagggcagccagagagaaaggtcaagttacccacaaagggaagcccatcagactaaaagcggatctctcggcagaaactctacaagccagaagacagagctggttttttgaaaagatcaacaaaatcgatagaccacaagcaagactaataaagaagaaaagagagaagaatcaaatagacacaataaaaaatgataaaggggatatcaccaccgatcccacagaaatacaaattaccatcagagaatactacaaacacctctatgcaaataaactagaaaatctagaagagatggataaattcctcgacacatacaccctcccaagactaaaccaggaagaagttgaatctgtgaatagaccaataacaggctctgaaattgaggcaataaccaatagcttaccaaccaaaaaaagtccaggaccagatggattcacagccgaattctaccagaggtacaaggaggagctggtaccattccttctgaaactattccaaccaatagaaaaagagggaatcctccctaactcattttatgaggccagcatcatcctgataccaaaacctggcagagacacaaccaaaaaagggaattttagaccaatatccttgatgaacattgatgcaaaaatcctcaataaaatactggcaaaccaaatccagcagcacatcaaaaagcttatccaccatgatcaagtgggcttcatccctgggatgcaaggctgtgttggaagttctggccagggcaataggcaggagaaggaaataaagggtattcaattaggaaaagaggaagtcaaattgtccctgtttgcagatgacatgattgtatatctagaaaaccccactgtctcagcccaaaatctccttaagctgataagcaacttcagcaaagtctcaggatacaaaatcaatgtacaaaaatcacaagcattcttatacaccaacaacagacaaacggagagccaaatcatgagtgaactcccattcacaattgcttcaaagagaataaaatacctaggaatccaacttacaagggatgtgaaggacctcttcaaggagaactacaaaccactgctcaatgaaataaaagaggatacaaacaagtggaagaacattccatgctcatggataggaagaatcaatatcgtgaaaatggccatactgcccaaggtaatttatacattcaatgccatccccatcaagctaccaatgactttcttcacagaattggaaaaaactactttaaagttcatatggaaacaaaaaagatcccacatcgccaagtcaatcctaagccaaaagaacaaagctggagacatcacactacctgacttcaaactacactacaaggctacagtaaccaaaacagcatggtactggtaccaaaacagagatatagatcaatggaacacaacagagccctcagaaataatgctgcatatctacaaccatctgatctttgacaaacctgacaaaaacaagcaatggggaaatgattccctatttaataaatggtgctgggaaaactggctagccatatgtagaaagctgaaactggatcccttccttacatcttatacaaaaatcaattcaagatggattaaagacttaaatgttagacctaaaaccataaaaaccctagaagaaaacctaggcaataccattcaggacataggcatgggcaaggacttcatgtctaaaacaccaaaagcagtggcaacaaaagccaaaattgacaaatgggatgtaattaaactaaagagcttctgcacagcaaaggaaactaccatcagagtgaacaggcaacctacagaatgggagaaaattttcgcaacctactcatcggacaaagggctaatatccagaatctacaatgaactcaaacaaatttacaagaaaaaaacaaacaaccccatcaaaaagtgggcaaaggatatgaacagacacttctcaaaagaagacatttatgcagccaaaagacacatgaaaaaatgctcatcatcactggccatcagagaaatgcaaatcaaaaccacaatgagataccatctcacaccaattagaatggtgatcattaaaaagtcaggaaacaacag

SEQ ID NO: 132606 - DNA, 3255 bp, Homo sapiens; identical to SEQ ID NO: 129034

SEQ ID NO: 132607 - DNA, 3139 bp, Homo sapiens; identical to SEQ ID NO: 131336

SEQ ID NO: 132608 - DNA, 3213 bp, Homo sapiens; identical to SEQ ID NO: 116408

SEQ ID NO: 132609 - DNA, 3348 bp, Homo sapiens; identical to SEQ ID NO: 120169

SEQ ID NO: 132610 - DNA, 3156 bp, Homo sapiens; identical to SEQ ID NO: 124193

SEQ ID NO: 132611 - DNA, 3325 bp, Homo sapiens; identical to SEQ ID NO: 124194

SEQ ID NO: 132612 - DNA, 3145 bp, Homo sapiens; identical to SEQ ID NO: 131340

SEQ ID NO: 132613 - DNA, 548 bp, Homo sapiens; identical to SEQ ID NO: 117963

SEQ ID NO: 132614 - DNA, 3229 bp, Homo sapiens; identical to SEQ ID NO: 128659

SEQ ID NO: 132615 - DNA, 3352 bp, Homo sapiens; identical to SEQ ID NO: 129042

SEQ ID NO: 132616 - DNA, 1968 bp, Homo sapiens
atgggagactttaacaccccactgtcaacatcagacagatcaacaagacagaaagttaacaaggatacccaggaaatgaactcagctctgcaccaagcggacctaatagacatctacagaactcgccaccccaaatcaacagaatatacatttctttcagcaccacaccacacctattccaaaactgaccacatactgggaagtaaagctctcctcagcaaatgtaaaagaacagaaatgataacaaactatctctcagaccacagtgcaatcaaactagaactcaggattaagaaactcactcaaaactgctcaactacatggaaactgaacaacttgctcctgaatgactactgggtacataacgaaatgaaggcagaaagaaagatgttctttgaaaccattgagaacaaagacacaacataccagaatctctgggatgcattcaaagcagtgtgtagagggaaatttatagcactaaatgcccacaagagaaagcaggaaagatccaaaattgacaccctaacatcacaattaaaagaactagaaaagcaagagaaaacacattcaaaaactatcagaaggcaagaaataactaaaatcagagcagaactgaaggaaatagagacacaaaaaacccttcaaaaaattaatgaatccaggagctggttttttgaaaggatcaacaaaattgatagaacactagcaagactaataaagaagaaaagagagaagaatcaaatagacagaataaaaaatgataaaggggatatcaccaccgatcccacacaaatacaaactaccatcagagaatactacaaacacctctacgcaaataaaccagaaaatctagaagaaatggataaattcctcgacacgtataccctcccaagactaaaccaggaagaagttgaatctctgaatagaccaatatcaggctctgaaattgtggcaataatcaatagcttaccaatcaaaaagagtccaggaccagatggattcacagccgaattctaccagagttacaagaaggaactggtaccactgcttctgaaactattccaatcaatagaaaaagagggaatcctccctaactctttttatgaggccagcatcatcctgttaccaaagcggggcagagacacaaccaaaaaagagaatttcagaccaatatccttgatgaacattgatgcaaaaatcctcaataaaatactggcaaaacgaatccagcagcacatcaaaaagcttatccaccatgatcaagtgggcttcatccctgggatgcaagagaataaaatacctaggaatccaacttacaagggacatgaaggacctcttaaaggagaactacaaacaactgctcaacgaaataaaagaggatacaaacaaatggaagaacattccatgctcatgggtaggaagaatcaatattgtgaaaatggccatactgcccaagaattggaaaaaactactttaaagttcatatggaaccaaaaaagagcctgcattgccaagtcaatcctaagccaaaagaagaaagctggaggcatcacgctacctgacttcaaactatactacaaggctacagtaaccaaaacagcacggctgtatacgaagcatggcaccagcatctgctgcggaagcttcggggagcttttacccatgcagaaggccaagcgagagcttgcacatcacatggcaaaagcaggagcaagagtcaaggggcagctcggccatgtgactcaacatcagcttgggtctattgaatggttcaataaatattcactgagcacctactacacagtagacaccaagccgcagttttctcatccaactaaggataataaaacaggtctgacatgtagaaacagaaccacagtaggtgtggacctgcaagctaaaggaaatttagttgtgaagcatctttccagcttgcaacattgttatgaatttatttgccacatttag

SEQ ID NO: 132617 - DNA, 3099 bp, Homo sapiens; identical to SEQ ID NO: 128084

SEQ ID NO: 132618 - DNA, 3303 bp, Homo sapiens; identical to SEQ ID NO: 124216

SEQ ID NO: 132619 - DNA, 3095 bp, Homo sapiens; identical to SEQ ID NO: 128883

SEQ ID NO: 132620 - DNA, 2678 bp, Homo sapiens
accaaatctacgtctgattggtgtacctgaaactaacggggagaatggaaccaagttggaaaacactctgcaggatattatccaggagaacttccccaatctagcaaggcaggccaacgttcagaatcaggaaatacagagaacaccacaaagatactcctcgagaagagcaactccacgacacataattgtcagattcaccaaagttgaaatgaaggaaaaaatgttaagggcagccagagagaaagcaccacaccacacctattccaaaattgaccacatacttggaagtaaagctctcctcagcaaatgtaaaagaacagaaattataacaaactatctctcagaccacagtgcaatcaaactagaactcaggattaagaatctcactcaaaaccgctcaactacatggaaactgaacaacctgctcctgaatgactactgcgtacataacgaaatgaaggcagaaataaagatgttctttgaaaccaacgagaacaaagacacaacataccagaatctctgggacgcattcaaagcagtgtgtagagggaaacttatagcactaaatgcccacaagagaaagcaggaaagatccaaaattgacaccctaacatcacaattaaaagaactagaaaagcaagagcaaacacattcaaaagctagcagaaggcaagaaataactaaaatcagagcagaactgaaggaaatagagacacaaaaaacccttcaaaaaattaatgaatccaggagctggttttttgaaaggatcaacaaaatatatagaccactagcaagactaataaagaaaaaaagagagaagaatcaaatagacgcaataaaaaatgataaaggggatatcaccaccgatcccacagaaatacaaattaccatcagagaatactacaaacacctctatgcaaataaactagaaaatctagaagaaatggataaattcctcaacacatacactctcccaagactaaaccaggaagaagttgaatctctgaatagaccaataacaggatctgaaattgtggcaataatcaatagcttaccaaccaaaaagagtccaggaccagatggattctcagccgaattctaccaaaggtacaaggaggaactggtaccattccttctgaaactattccaatcaatagaaaaagagggaatcctccctaactcattttatgaggccagcatcattctgataccaaagccgggcagagacacaaccaaaaaagagaattttagaccaatatccttgatgaacattgatgcaaaaatcctcaataaaatactggcaaaacgaatccagcagcacatcaaaaagcttatccaccatgatcaagtgggcttcatccctgggatgcaaggctggttcaatatatgcaaatcaataaatgtaatccagcatataaacagagccaaagacaaaaaccacatgattatctcaatagatgcagaaaaggcctttgacaaaattcaacaacccttcctgctaaaaactctcaataaattaggtattgatgggtcgtatttcaaaataataagagctatctatgacaaacccacagccaatatcatactgaatgggcaaaaactggaagcattccctttgaaaactggcacaagacagagatgccctctctcaccactcctattcaacatagtgttggaagttctggccagggcaatcaggcaggagaaggaaataaagggtattcaattaggaaaagaggaagtcaaattgtccctgtttgcagacgacatgattgtatatctagaaaaccccactgtctcagcccaaaatctccttaagctgataagcaacttcagcaaagtctcaggatacaaaatcaatgtacaaaaatcacaagaattcttatacaccaacaacatacaaacagagagtcaaatcatgagtgaactcccattcacaattgcttcaaagagaataaaatacctaggaatccaacttacaagggatgtgaagaacctcttcaaggagaactacaaaccactgctcaatgaaataaaagaggatacaaacaaatggaagaacattccatgctcatgggtaggaagaatcaatatcgtgaaaatggccatactgcccaaggtaatttacagattcaatgccatccccatcaagctaccaatgcctttcttcacagaattggaaaaagctactttaaagttcatatggaaccaaaaaagagcccgcattgccaagtcaatcctaagccaaaagaacaaagctggaggcatcacactacctgacttcaaactatactacaaggctacagtaaccaaaacagcatggcttcagcacgcagtgccggctaatgatggcaccacaagatccccatcaatagacagcattcagaaggaccccagcgagtttgcctggcgtgatcctgagttgcctgaggtcattcacatccttcagcaccagttcccatctgttcaggcaaatgcagcagcctacctgcagcacctgtggtttggtgacaacaacgtgaagatgaaggtgtgtaggttatggggaatcaagcttctggtttaccttttgggccacagagttttggaagttcagaagaatgcttgtgatgcccttcgaaatctctttttcggcaagtctacaggtgaaaataaaataacaatgaaggatgttg

SEQ ID NO: 132621 - DNA, 2481 bp, Homo sapiens
atgaaggcagaaataaagatgctctttgaaaccaaggagaacaaagacaccacataccagaatctctgggacgcattaaaagcagtgtgtagagggaaatttatagcactaaatgcccacaagagaaagcaggaaagatccaaaattgacaccctaacatcacaattaaaagaactagagaagcaagagcaaacactttcaaaagctagcagaaggcaagaaataactaaaatcagagcagaactgaaggaaatagagacacaaaaaacccttcaaaaaattaatgaatccaggagctggttttttgaaaggatcaacaaaattgatagaccgctagcaagactaataaagaaaaagagagagaagaatcaaatagacgcaataaaaaatgataaaggggatatcaccaccgatcccacagaaatacaaactaccatcagagaatactacaaacacctctacgcaaataaactagaaaatctagaagaaatggataaattcctcgacacatacactcttccaagactaaaccaggaagaagttgaatctctgaatagaccaataacaggagctgaaattgtggcaataatcaatagtttaccaaccaaaaagagtccaggaccagatggattcacagccgaattctatcagaggtacaaggaggaactggtaccattccttctgaaactattccaatcaatagaaaaagagggaatcctccctaactcattttatgaggccagcatcattctgataccaaagccgggcagagacacaaccaaaaaagagaattttagaccaatatccttgatgaacattgatgcaaaaatcctcaataaaatactggcaaaccgaatccagcagcacatcaaaaagcttatccaccatgatcaggtgggcttcatccctgggatgcaaggctggttcaatatacgcaaatcaataaatgtaatccagcatataaacagagccaaagacaaaaaccacatgattatctcaatagatgcagaaaaagcctttgacaaaattcaacaacccttcatgctaaaaactctcaagaaattagagaataaaatacctaggaatccaacttacaaaggatgtgaaggacttcttcaaggagaactacaaaccactgctcaaggaaataaaagaggatacaaacaaatggaagaacattccatgctcatgggtaggaagaatcaatatcgtgaaaatggccatactgcccaagaattggaaaaaactactttaaagttcatatggaaccaaaaaagagcctgcatcgccaaggcaatcctaagccaaaagaacaaagctggaggcatcacactacctgacttcaaactatactacaaggctacagtaaccaaaacagcatggtactggtaccaaaacagagatatagatcaatggaacagaacagagacctcagaaataacgccgcatatctacaactatccaatctttgacaaacctgagaaaaacaagcaatggggaaaggattccctatttaataaatggtgctgggaaaactggctagccctatgtagaaagctgaaactggatcccttccttacaccttatacaaaaatcaattcaagatggattaaagacttaaacgttagacctaaaaccataaaaaccctagaagaaaacctaggcatcaccattcgggacataggcatgggcaaggacttcatgtccaaaacatcaacagcaatggcaacaaaagccaaaattgacaaatgggatctaattaaactaaagagcttctgcacagcaaaagaaactaccatcagagtgaacaggcaacctacaaaatgggagaaaattttcgcaacctactcatctgacaaagggctaatatccagaatctacaatgaactcaaacaaatttacaagaaaaaaacaaacaaccccatcaaaaagtgggcgaaggacatgaacagacacttctcaaaagaagacatttatgcagccaaaaaacacatgaaaaaatgctcatcatcactggccatcagagaaatgcaaatcaaaaccacaatgagataccatctcacaccagttagaatggcgatcattaaaaagtcaggaaacaacagaacaccaacccgacccatacaaacatctcatctctcagctgcatgcttgaagctgaacgctacagcagcagagacttctatttcctctagaatagcccctcgagtggccagtctacttctgacaagactctacctctgctccagagttgaagccccaggcagggcattcagtggccaagcctcggatacctggctatatccaccaagcaccagccagaagaaatatccagtccctttagttcctgaagtgggagatggggctctgcctcctaccaagattcaacactgtggggatccttcaaaacaagaagggagtttagatgtgggaggggaaaaaaccaaagccaaaccaaacagaagtctactactgttctaa

SEQ ID NO: 132622 - DNA, 3507 bp, Homo sapiens; identical to SEQ ID NO: 128728

SEQ ID NO: 132623 - DNA, 3121 bp, Homo sapiens
agcacccagattcataaagcaagtcctgagtgacctacaaagagacttagactcccacacaataataatgggagactttaacaccccactgtcaacattagacagatcaacaagacagaaagtccacaaggatacccaggaattgaactcagctctgcaccaagcggacctaatagacatctacagaactctccaccccaaatcaacagaatatacatgtttttcagcaccacaccacacctattccaaaattgaccacatagttggaagtaaagcactcctcagcaaatgtaaaagatcagaaattataacaaactgtctctcagaccacagtgcaatcaaactagaactcaggattaagaaactcactcaaaaccgctcaactacatggaaactgaacaacctgctcctgaatgactactgggtacataacgaaatgaaggcagaaataaggatgttctttgaaaccaacgagaacaaagacacaacataccagaatctctgggacacattcaaagcagtgtgtagagggaaatttatagcactaaatgcccacaagagaaagcaggaaagatccaaaattgacaccctaacatcacaattaaaagaactagaaaagcaagagcaaacacattcaaaagctagcagaaggcaagaaataactaaaatcagagcagaactgaaggaaatagagacacaaaaaaccctttcaaaaaattaatgaattccaggagctggtttttttgaaaggatcaacaaaattgatagaccgctagcaagactaataaagaaaaaaagagagaagaatcaaatagacggcaataaaaaatgataaaggggatatcaccactgatcccacagaaatacaaactaccatcagagaatactacaaacacctctacgtaaataaactagaaaatctagaagaaatgaataaattcctcgacacatgcactctcccaagactaaaccaggaagaagttgaatctctgaatagaccaataacaggagctgaaattgtggcaattatcaatagtttaccaaccaaaaagaatccaggaccagatggattaacagccgaattctaccagaggtacaaggaggaactggtaccattccttctgaaactattccaatcaatagaaaaagagggaatcctccctaactcattttatgaggccagcatcattctgataccaaagccgggcagagacacaaccaaaaaagagaattttagaccaatatccttgacgaacattgatgcaaaaatcctcaataaaatactggcaaaccgaatccagcagcacatcaaaaagcttatccaccatgatcaagtgggcttcatccctgggatggaaagctggttcaatatacgcaaatcaataaatgtaatccagcatataaacagagccaaagacaaaaaccacatgattatctcaatagatgcagaaaaggcctttgacaaaattcaacaacccttcatgctaaaaactctcaataaattaggtattgatgggacgtatttcaaaataataagagctatctatgacaaacccacagccaatatcatactgaatgggcaaaaactggaagcattccctttgaaaactggcacaagacagggatgccctctctcactgctcctattcaacatagtgttggaagttctggccagggcaatcaggcaggagaaggaaataaagggtattcaattaggagaggaagtcacattgtccctgtttgcagacgacatgattgtttatctagaaaaccccattgtctcagcccaaaatctccttaagctaataagcaccttcagcaaagtctcaggatacaaaatcaatgtacaaaaatcacaagcattcttatacaccaacaacagacaaacagagagccaaatcatgagtgaactcccattcacaattgcttcaaagagaataaaatacctaggaatcctacttacaagggatgtgaaggacctcttcaaggagaactacaaaccactgctcaaggaaataaaagaggatacaaacaaatggaagaacattccatgctcatgggtaggaagaatcaatatcgtgaaaatggccatactgcccaaggtaatttacagattcaatgccatctccatcaagctaccaatgactttattcacagaattggaaaaaactactttaaagttcatatggaagcaaaaaagagcccgcatcgccaagtcaatcctaagccaaaagaagtgtgctggaggcatcacactacctgacttcaaactatactgcaaagctacagtaaccaaaacagcatggtactggtaccaaaacagagatatagatcaatggaacagaacagatccctcagaaataacgccgcatacctacaactatctgatctttgacaaacctgagaaaaacaagcaatggggaaaggattccctatttaataaatggtgctgggaaaactggctagccatatgtagaaagctgaaactggatcccttccttacaccttatacaaaaatcaattcaagatggattaaagatttaaacattagacctaaaaccataaaaaccctagaagaaaacctaggcattaccattcaggacataggcatgggcaaggacttcatgtccaaaacaccaaaagcaatggcaacaaaagccaaaattgacaaatgggatctaattaaactaaagagcttctgcacagcaaaagaaactaccatcagagtgaacaggcaacctacaacatgggagaaaattttcgcaacctactcatctgacaaagggctaatatccagaatctacaatgaactcaaacaaatttacaagaaaaaaacaaacaaccccatcaaaaagtgggcgaaggatatgaacagacacttctcaaaagaagacatttatgcagccaaaaaacacatgaaaaagatggtgatgtacagatgggtttttggtgtggatgtcctttctgtttgttagttttccttctaacagacaggaccctcagctgcaggtctgttggagtttgctagaggtccactccagaccctgtttgcctgggtaccagcagtggtgtctgcagaacagcagattttcatgaaccgtgaatgctgctgtctgatcgt

SEQ ID NO: 132624 - DNA, 1077 bp, Homo sapiens
ttttgcccctgccctaaagatttgtggaactttgaacttgagagagatgatttagggtatctggtggaagaagtttctaagcagcaaagcattcaagaggtgacttgggtgctgttaaaggcattcagttttataagggaagcagagcataaaaggttggaaaatttgcagcctgataatgtgatagaaaagaaaatcctattttctgaggagaaatttaagctggctgcaaaaatttggataagtaatgaggagctgaatattaatccccaagacaatggggaaaatgtctgcagggcatgtcagaggtcttcacagcagctcctcctgtcacagacctggaggcctagaaggaaaaaatggtttcatggtctgggcccaaggcccccttgctctgtgcagcctaaggacttggtgccttgcgtcccagccactccagccatggctaaaaggggccaaggtacagtttgagccattgcttcagagagtgcaagccccaaggcttggcagcttccatgtggtgctgctcagcaatttgcagccctgcctggattgggtaattataaattcccactgaccttaatcacagggtatggtagtaataagagccccccctagggatatcttgtattccagacatactcgtccttacctctattaagattgccacctggacactttgggttcctcctacctttaagtcaacaggctaagaagggagttacagtgttggctggggtgattgacccagactatcaagatgaaatcagtctaccactccacaacagaggtaaggaagagtatgcatggaatacaggagatccattagggcatctcttagtattaccatgccctgaatccactccagatggttcagcccaattggcactaccagtggttcccatgggacaggatcagagtgggcttcccatggagattctcagactaatggggaaatcaaatgccaacctccagttctctcctccaacttccaataaagtggatctgtaaaaattctctgtgagtggcattatgacagcttaaaaggagatggtggagcagtctgaaataattgtt

SEQ ID NO: 132625 - DNA, 2373 bp, Homo sapiens
atgtcaagtgaatgggagtggttgaggtgctcagaagttaaaggtcagagagacgtgaggccagggtgtttggggtgggactttcgtgtgtatattgttgaggacacccaggatgaggacagaacttggagtgtcaaggaagcctgtgagctggtccttagagttcaggaaatgatcatcacaagggtggtagatgctgcaccacaccacacctattccaaaattgaccacatagttggaagtaaagctctcctcagcaaatgtaaaagaacagaaattataacaaactgtctctcagaccacagtgcaatcaaactagaactcaggattaagaatctcactcaaagccgctcaactacatggaaactgaacaacctgctcctgaatgactactgggtacataacgaaatgaaggcagaaataaagatgttctttgaaaccaacgagaacaaagacaccacataccagaatctctgggacgcattcaaagcagtgtgtagagggaaatttatagcactaaatgcctacaagagaaagcaggaaagatccaaaattgacaccctaacatcacaattaaaagaactagaaaagcaagagcaaacacattcaaaagctagcagaaggcaagaaataactaaaatcagagcagaactgaaggaaatagagacacaaaaaacccttcaaaaaatcaatgaatccaggagctggttttttgaaaggatcaacaaaattgatagaccgctagcaagactaataaagaaaaaaagagagaagaatcaaatagacgcaataaaaaatgataaaggggatatcaccaccgatcccacagaaatacaaactaccatcagagaatactacaaacaactctacgcaaataaactagaaaatctagaagaaatggatacattcctcgacacatacactctcccaagactaaaccaggaagaagttgaatctctgaatagaccaataacaggctctgaaattgtggcaataatcaatagtttaccaaccaaaaagagtccaggaccagatggattcacagccgaattctaccagaggtacaaggaggaactggtaccattccttctgaaactattccaatcaatagaaaaagagggaatcctccctaactcattttatgaggccagcatcattctgataccaaagccaggcagagacacaaccaaaaaagagaattttagaccaatatccttgatgaacattgatgcaaaaatcctcaataaaatactggcaaaccgaatccaacagcacatcaaaaagcttatccaccatgatcaagtgggcttcatccctgggatgcaaggctggttcaatatacgcaaatcaataaatgtaatccagcatataaacagagccaaagacaaaaaccacatgattatctcaatagatgcagaaaaggcctttgacaaaattcaacaacccttcatgctaaaaactctcaataaattaggtattgatgggacgtatgtcaaaataataagagctatctatgacaaacccacagccaatatcatactgaatgggcaaaaactggaagcattccctttgaaaactggcacaagacagggatgccctctctcaccgctcctattcaacatagtgttggaagttctggccagggcaatcaggcaggagaaggaaataaagggtattcaattaggaaaagaggaagtcaaattgtccctgtttgcagacgacatgattgtttatctagaaaaccccatcgtctcagcccaaaatctccttaagctgataagcaacttcagcaaagtctcaggatacaaaatcaatgtacaaaaatcacaagcattcttatacaccaacaacagacaaacagagagccaaatcatgggtgaactcccattcacaattgcttcaaagagaataaaatacctaggaatccaacttacaagggatgtgaaggacctcttcaaggagaactacaaaccactgctcaaggaaataaaagaggatacaaacaaatggaagaacattccatgctcatgggtaggaagaatcaatatcgtgaaaatggccatactgcccaaggtaatttatagattcaatgccatccccatcaagctaccaatgactttcttcacagaattggaaaaaactactttaaagttcatatggaaccaaaaaagagcccgcattgccaagtcaatcctaagccaaaagaacaaagctggaggcatcacactacctgacttcaaactatactacaaggctacagtaaccaaaacagcatgttcatgggatctgcagggttggttccttctggaggctctgagggagaaactgtcttatgcctctctcctagcttctaatgattgtcggcagtctttg

SEQ ID NO: 132626 - DNA, 3813 bp, Homo sapiens; identical to SEQ ID NO: 128656

SEQ ID NO: 132627 - DNA, 4107 bp, Homo sapiens
atgggagactttaacaccccactgtcaacattagacagatcaacgagacagaaagtcaacaaggatacccaggaattgaactcagctctgcaccaagcagacctaatagacatctacagaactctccaccccaaatcaacagaatatacatttttttcagcaccacaccacacctattccaaaattgaccacatagttggaagtaaagctctcctcagcaaatgtaaaagaacagaaattataacaaactatctctcagaccacagtgcaatcaaactagaaatcaggattaagaatctcactcaaagccactcaactacatggaaactgaacaacctgctcctgaatgactactgggtacataacgaaatgaaggcagaaataaagatgttctttgaaaccaacgagaacaaagacaccacataccagaatctctgggacgcattcaaagcagtgtgtagagggaaatttatagcactaaatgcctacaagagaaagcaggaaagatccaaaattgacagcctaacatcacaattaaaagaactagaaaagcaagagcaaacacattcaaaagctagcagaaggcaagaaataactaaaatcagagcagaactgaaggaaatagagacacaaaaaacccttcaaaaaatcaatgaatccaggagctggttttttgaaaggatcaacaaaattgatagaccactagcaagactaataaagaaaaaaagagagaagaatcaaatagacacaataaaaaatgataaaggggatatcaccaccgatcccacagaaatacaaactaccatcagagaatactacaaacacctctacgcaaataaactagaaaatctagaagaaatggatacattcctcgacacatacactctcccaagactaaaccaggaagaagttgaatctctgaatagaccaataacaggctctgaaattgtggcaataatcaatagtttaccaaccaaaaagagtccaggaccagatggattcacagccgaattctaccagaggtacaaggaggaactggtaccattccttctgaaactattccaatcaataggaaaagagggaatcctccctaactcattttatgaggccagcatcattctgacaccaaagccgggcagagacacaaccaaaaaagagaattttagaccaatatccttgatgaacattgatgcaaaaatcctcaataaaatactggcaaaccgaatccagcagcacatcaaaaagcttatccaccatgatcaagtgggcttcatccctgggatgcaaggctggttcaatatacgcaaatcaataaatgtaatccagcatataaacagagccaaagacaaaaaccacatgattatctcaatagatgcagaaaaagcctttgacaaaattcaacaacccttcatgctaaaaactctcaataaattaggtattgatgggacgtatttcaaaataataagagctatctatgacaaacccacagccaatatcatactgaatgggcaaaaactggaagcattccctttgaaaactggcacaagacagggatgccctctctcaccgctcctattcaacatagtgttggaagttctggccagggcaatcaggcaggagaaggaaataaagggtattcaattaggaaaagaggaagtcaaattgtccctgtttgcagacgacatgattgtttatctagaaaaccccatcgtctcagcccaaaatctccttaagctgataagcaacttcagcaaagtctcaggatacaaaatcaatgtacaaaaatcacaagcattcttatacaccaacaacagacaaacagagagccaaatcatgggtgaactcccattcacaattgcttcaaagagaataaaatacctaggaatccaacttacaagggatgtgaaggacctcttcaaggagaactacaaaccactgctcaaggaaataaaagaggacacaaacaaatggaagaacattccatgctcatgggtaggaagaatcaatatcgtgaaaatggccatactgcccaaggtaatttacagattcaatgccatccccatcaagctaccaatgactttcttcacagaattggaaaaaactactttaaagttcatatggaaccaaaaaagagcccgcatcgccaagtcaatcctaagccaaaagaacaaagctggaggcatcacactacctgacttcaaactatactacaaggctacagtaaccaaaacagcatggtactggtaccaaaacagagatatagatcaatggaacagaacagagccctcagaaataatgccgcatatctacaactatctgatctttgacaaacctgagaaaaacaagcaatggggaaaggattccctatttaataaatggtgctgggaaaactggctagccatatgtagaaagctgaaactggatcccttccttacaccttatacaaaaatcaattcaagatggattaaagatttaaacgttagacctaaaaccataaaaaccctagaagaaaacctaggcattaccattcaggacataggcgtgggcaaggacttcatgtccaaaacaccaaaagcaatggcaacaaaagccaaaattgacaaatgggatctaattaaactaaagagcttctgcacagcaaaagaaactaccatcagagtgaacaggcaacctacaacatgggagaaaattttcgcaacctactcatctgacaaagggctaatatccagaatctacaatgaactcaaacaaatttacaagaaaaaaacaaacaaccccatcaaaaagtgggcgaaggacatgaacagacacttctcaaaagaagacatttatgcagccaaaaaacacatgaagaaatgctcatcatcactggccatcagagaaatgcaaatcaaaaccactatgagatatcatctcacaccagttagaatggcaatcattaaaaagtcaggaaacaacaggagctggtattttgaaaagatcaacaaaattgatagactgctagcaagactaataaagaaaaaaagagagaagaatcaaatagacgcaataaaaaatgataaaggggatatcaccactgatcccacagaaatacaaactaccaccagagaatactataaacacctctatgcaaataaactagaaaatctagaagaaatggataaattcctcgacacatacaacctcccaagactaaagcaggaagaagttgaatctctgaatagaccaataagaggctctgaaattgtggcaataatcaatagcttaccaaccaaaaaaagtccaggaccagatggattcacagccgaattctaccacaggtacaaagaggagctggtaccattgcttctgaaactattccaatcaatagaaaaagaggtaatcctccctaactcattttatgaggccagcatcatcctgataccaaagcctgacagagacacagcaaaaaaagagaattttagaccaatatccttgatgaacatcgatgcaaaaatcctcaataaaatactggcaaaccgaatccagcagcacatcaaaaagcttatccaccatgatcaagtgggcttcatccctgggatgcaaggctggttcaacatacgcaaatcagtaaatgtaatccagcatataaacagaaccaaagacaaaaaccacatgatcatctcaatagatgcagaaaagtcctttgataaaattcaacaacacttcatgctaaaaactctcaataaattaggtattgatgggtcatatctcaaaataataagagctacctatgacaaacccacagccaatatcatactgaatgggcaaaaactggaagcattccctttgaaaactggcacaagacacggatgccccctctcaccactcctattcaacatagtgttggaagttctggccagagcaatcaggcaggagaaggaaataaagggtattcaattaggaaaagaggaagtcaaattgtccctgttcatagatgacatgattgtatatctagaaaaccccatcatctcagcccaaaatctccttaagctgataagcaacttcagcagtctcaggatacaaaatcaatgtacaaaaatcacaagcattcttgtacaccaataa

SEQ ID NO: 132628 - DNA, 3161 bp, Homo sapiens
ctttcccaagtttcaagatagctattcctaaaaatgatcatgggcatgaacaacatttttggggatatagagttccaaataatgccatggaagatacagcttatcaactggtccaccagtaccctacaagaatgcaggcccggagatgcaggatcgcgctgtcacagtggtcctcttcgcatcctctcccggcaaagagagatgctccggttaccagcggcgcgcatccccgcaggcgcctctcctctcgccgatacccacccaggcagtcccgacaggcgcgcctgcctacctggtggccggctgtcagcgaagcggcggtgcctcagccccttctcagctgctacagcgctcccagcgccatgttcccggtctccccgggcgcacgctggggaactactactggctggaagttctttgaaaccaacgagaacaaagacacaacataccagaatctctgggacgcattcaaagcagtgtgtagagggaaatttataccactaaatgcccacaagagaaagcaggaaagatccaaaattgacaccctaacatcacaattaaaagaactagaaaagcaagagcaaacacattcaaaagctagcagaaggcaagaaataactaaaatcagagcagaactgaaggaaatagagacacaaaaaacccttcaaaaaatcaatgaatccaggagctggttttttgaaaggatcaacaaaattgatagaccgctagcaagactaataaagaaaaaaagagagaagaatcaaatagacacaataaaaaatgataaaggggatatcaccaccaatcccacagaaatacaaactaccatcagagaatactacaaacacctctacgcaaaaaaactagaaaatctagaagaaatggatacattcctcgacacatacactctcccaagactaaaccaggaagaagttgaatctctgaatagaccaataacaggagctgaaattgtggcaatattcaatagtttaccaaccaaaaagagtccaggaccagatggattcacagccgaattctaccagaggtacaaggaggaactggtaccattccttctgaaaatattccaatcaatagaaaaagagggaatcctccctaactcattttatgaggccagcatcattctgataccaaagccaggcagagacacaaccaaaaaagagaattttagaccaatatccttgatgaacattgatgcaaaaatcctcaataaaatactggcaaaccgaatccagcagcacatcaaaaagcttatccaccatgatcaggtgggcttcatccctggaatgcaaggctggttcaatatacgcaaatcaataaatgtaatccagcatataaacagagccaaagacaaaaaccacatgattatctcaatagatgcagaaaaagcctttgacaaaattcaacaacccttcatgctaaaaactctcaataaattaggtattgatgggacgtatttcaaaataataagagctatctatgacaaacccacagccaatatcatactgaatgggcaaaaactggaagcattccctttgaaaactggcacaagacagggatgccctctctcaccgctcctattcaacatagtgttggaagttctggccagggcaatcaggcaggagaaggaaataaagggtattcaattaggaaaagaggaagtcaaattgtccctgtttgcagacgacatgattgtttatctagaaaaccccatcatctcagcccaaaatctccttaagctgataagcaacttcagcaaagtctcaggatacaaaatcaatgtacaaaaatcacaagcattcctatacaccaacaacagacaaacagagagccaaatcatgagtgaactcccattcacaattgcttcaaagagaataaaatacctaggaatccaacttacaagggatgtgaaggacctcttcaaggagaactacaaaccactgctcaaggaaataaaagaggatacaaacaaatggaagaacattccatgctcatgggtaggaagaatcaatatcgtgaaaatggccatactgcccaaggtaatttacagattcaatgccatccccatcaagctaccaatgactttcttcacagaattggaaaaaactactttaaagttcatatggaaccaaaaaagagcccgcatcgccaagtcaatcctaagccaaaagaacaaagctggaggcatcacactacctgacttcaaactatactacaaggctacagtaaccaaaacagcatggtactggtaccaaaacagagatatagatcaatggaacagaacagagccctcagaaataacgccacatacctacaactatctgatctttgacaaacctgagaaaaacaagcaatggggaaaggattccctatttaataaatggtgctgggaaaactggctagccatatgtagaaagctgaaactggatcccttccttacaccttatacaaaaatcaattcaagatggattaaagatttaaacgttagacctaaaaccataaaaaccctagaagaaaacctaggcagtaccattcaggacataggcgtgggcaaggacttcatgtccaaaacaccaaaagcaatggcaacaaaagccaaaattgacaaatgggatctaattaaactaaagagcttctgcacagcaaaagaaactaccatcagagtgaacaggcaacctacaacatgggagaaaattttcgcaacctactcatctgacaaaaggctaatatccagaatctacaatgaactcaaacaaatttacaagaaaaaaacaaacaaccccatcaaaaagtgggcgaaggacatgaacagacacttctcaaaagaagacatttatgcagccaaaaaacacatgaaaaaatgctcatcatcactggccatcagagaaatgcaaatcaaaaccactatgagatatcatctcacaccagttagaatggcaatcattaaaaagtcaggaaacaacaggatggctgctggagctccaaccaatccagtctctcatgacggcctaaaggaagtgacttctatgatggagcagagaacacatttttcaacatttgctgatattgccaagttggcagcaactgccagcgctttggaaagctgcaatgtacaatccagggcaccactgggcacagactag

SEQ ID NO: 132629 - DNA, 3195 bp, Homo sapiens; identical to SEQ ID NO: 128888

SEQ ID NO: 132630 - DNA, 1986 bp, Homo sapiens; identical to SEQ ID NO: 118546

SEQ ID NO: 132631 - DNA, 3159 bp, Homo sapiens; identical to SEQ ID NO: 118086

SEQ ID NO: 132632 - DNA, 3471 bp, Homo sapiens
atggcttcggtctcctctgcgaccttctcgggccacggggctcggtccctactgcagttcctgcggctggtagggcagctcaagagagtcccacgaactggctgggtatacagaaatgtccagaggccggagagcgtttcagatcacatgtaccggatggcagttatggctatggtgatcaaagatgaccgtcttaacaaagaccgatgtgtacgcctagccctggttcatgatatggcagaatgcatcgttggggacatagcaccagcagataacatccccaaagaagaaaaacataggcgagaagaggggaataaatgtcataagcagaaggcaatggggaaacatcttaaagaaccacatgttcttggacaagaaaccaaaggcttggagagcactgatgttctattgcctcttcctgctgctggtcaggatttgggaagagagaagaaaatcagggaggaagctatgaagcagataacccagctcctaccagaggacctcagaaaggagctctatgaactttgggaagacctagaatttgaatctccatcctgcttggactccttgtccctctgttgctctttgaaaccccagtctgagtcctctcctgtcctaccagaaggctgcgaaacactgattcagagactctgtgccgtggggactggggtcacagccgccctggccaccaggctctgcagagcctcagggctgccagcaccccatcagtgggcctcggaattacaaaggagcaggaaaaaggaagaggaagagggcaaaacctcaaaagacttccaatgtttcaagaaaatgttggactttgttgtgcgccactatcaagctttttccaaatttggtttccaaattactacggcaaagagaaagcaggaaagatccaaaattgacaccctaacatcacaattaaaagaactagaaaagcaagagcaaacacattcaaaagctagcagaaggcaagaaataactaaaatcagagcagaactgaaggaaatagagacacaaaaaacccttcaaaaaatcaatgaatccaggagctggttttttgaaaggatcaacaaaattgatagaccgctagcaagactaataaagagaaaaagagagaagaatcaaatagacacaataaaaaatgataaaggggatatcaccaccgatcccacagaaatacaaactaccatcagagaatactacaaacacctctacgcaaataaactagaaaatctagaagaaatggatacattcctcgacacatacactctcccaagactaaaccaggaagaagttgaatctctgaatagaccaataacaggctctgaaattgtggcaataatcaatagtttaccaaccaaaaagagtccaggaccagatggattcacagccgaattctaccagaggtacaaggaggaattggtaccattccttctgaaactattccaatcaatagaaaaagagggaatcctccctaactcattttatgaggccagcatcattctgataccaaagccgggcagagacacaaccaaaaaagagaattttagaccaatatccttgatgaacattgatgcaaaaatcctcaataaaatactggcaaaccgaatccagcagcacatcaaaaagcttatccaccatgatcaagtgggcttcatccctgggatgcaaggctggttcaatatacgcaaatcaataaatgtaatccagcatataaacagagccaaagacaaaaaccacatgattatctcaatagatgcagaaaaagcctttgacaaaattcaacaacccttcatgctaaaaactctcaataaattaggtattgatgggacgtatttcaaaataataagagctatctatgacaaacccacagccaatatcatactgaatgggcaaaaactggaagcattccctttgaaaactggcacaagacagggatgccctctctcaccgctcctattcaacatagtgttggaagttctggccagggcaatcaggcaggagaaggaaataaagggtattcaattaggaaaagaggaagtcaaattgtccctgtttgcagacgacatgattgtttatctagaaaacctcatcgtctcagcccaaaatctccttaagctgataagcaacttcagcaaagtctcaggatacaaaatcgatgtacaaaaatcacaagcattcttatacaccaacaacagacaaacagagagccaaatcatgggtgaactcccattcacaattgcttcaaagagaataaaatacctaggaatccaacttacaagggatgtgaaggacctcttcaaggagaactacaaaccactgctcaaggaaataaaagaggacacaaacaaatggaagaacattccatgctcatgggtaggaagaatcaatatcgtgaaaatggccatactgcccaaggtaatttacagattcaatgccatccccatcaagctaccaatgactttcttcacagaattggaaaaaactactttaaagttcatatggaaccaaaaaagagcccgcattgccaagtcaatcctaagccaaaagaacaaagctggaggcatcacactacctgacttcaaactatactacaaggctacagtaaccaaaacagcatggtactggtaccaaaacagagatatagatcaatggaacagaacagagccctcagaaataatgccgcatatctacaactatctgatctttgacaaacctgagaaaaacaagcaatggggaaaggattccctatttaataaatggtgctgggaaaactggctagccatatgtagaaagctgaaactggatccctttcttacaccttatacaaaaatcaattcaagatggattaaagatttaaacgttagacctaaaaccataaaaaccctagaagaaaacctaggcattaccattcaggacataggcgtgggcaaggacttcatgtccaaaacaccaaaagcaatggcaacaaaagccaaaattgacaaatgggatctaattaaactaaagagcttctgcacagcaaaagaaactaccatgagagtgaacaggcaacctacaacatgggagaaaattttcacaacctactcatctgacaaagggctaatatccagaatctacaatgaactcaaacaaatttacaagaaaaaaacaaacaaccccatcaaaaagtgggcgaaggacatgaacagacacttctcaaaagaagacatttatgcagccaaaaaacacatgaagaaatgctcatcatcactggccatcagagaaatgcaaatcaaaaccactatgagatatcatctcacaccagtcacagtccaggtaccagggactgtggagtttcctggccaaatagcccagtctattcctgacctgttcaggtcttttgccagctctgttctgaaagtgccttgcatcactggcggaccactcataggcccaagagaggaccaaagagcaggcattttgtag

SEQ ID NO: 132633 - DNA, 2337 bp, Homo sapiens; identical to SEQ ID NO: 116373

SEQ ID NO: 132634 - DNA, 3855 bp, Homo sapiens; identical to SEQ ID NO: 120175

SEQ ID NO: 132635 - DNA, 3057 bp, Homo sapiens; identical to SEQ ID NO: 121979
  misc_feature (1)...(3057): n = a,t,c or g

SEQ ID NO: 132636 - DNA, 2007 bp, Homo sapiens
atgaggtctcggctgggcgcggtggctctggcctgtaatctcagcactttgggaggccgaggaggaaaagaaaggcatgcacatgaccttcctcatgtaacagcacagtctcaaggtcatcagggccaagggaaaatttcccggactgctctcaaagagcctacagtccacaaagtaacagcttccctatccccagtagtggcaacatcccctccccaacccatgctgccatcagactttccacctttgtctgaggagataaaccctatgctgcctgaggcaacagtgatagcctcccctaaggaaattgccaggcaagataatgttgattcccctcaggagccacccccaacaccccagttttcttctagacctataactagactaaagtcccagtgggcccccagagggccagagtgcgtaattggcatagacatacttagcagctggcagaacccccacattggctccctgactggtagggtgagggctattatggtgggaaaggccaaatggaagccattagagctgcctctacctagaaaaatagtaaatcaaaaacaatatcacatccttggagggactgtggaaattagtgccaccattaaggacttgaaagacacagaggcggtgactcccaccacatccccattcaactctcccatttggcctgtgcagaagacagatggatcttggagaatgacagtggattattgtaaacttaaccaagtggtgactccaattgcagctgctgtaccagatgtggttcattgcttgagcaaatcaacacatctcctggtacctggtttgagtggagtccaaaagaaggctctgcagcaggttcaggctgctgtgcaagctgctctgccatttgggccatatgacccagcagatccaatggtgcttgaggtgtcagtggcagatagggatgctatttggagcctttggaacgccgccattggtgaatcacagcggaggcctctaggattttggagcaaggctctcctgtcttctgcagataactactctccttttgagaggcagctcttggcctcttactgggctttggtggaaactgaacgtttgacggtgggtcatcaagtcaccctgcgacctgaactgcctatcatgaattgggtgctttctgacccatctagccataaagttagtggtgcacagcagcgttccatcatcaaattgaagtggtatatacatgattgggttcgagcaggtcctgaaggcacaaccacctctgtcatcacccaatgggcccatgaacaaagtggccacggtggtagggatggaggtcatgcatgggctcagcaacatggacttccactcacgaaggctgacctggctacggccactgccaggattcacaggtccaggaatcaaggggtgaaagtggaagtggcaccactcaccatcacccctagtgatccactagcaaagtttttgcttcttatttccgcgacatctactagtctagaggtcacagttccagagggagaaatgctgccaccaagagacacaacaaagattgccacctttgggactcagactggcttccttgctcttcagcttgcagatggcctattgtgggaccttgtgatcataccaggaaaggggaaacccagcagagacctagtggagagtcccagcccctattccacctacgagggtattgatgggtggcccgatgagcctgcaccaacagcaacaaagcccccagtcatgccagccccagctctaccaccagacacccgcagtggcagcaaagccccaactgtcccaaccccttacccacaaatggagcaccaccaagtccaattagccagcaacaacagcaacaccgaagctctgggccatcttagtccccagtccagctgggtgcagactcctgggcagaatagtggcccagcaataccgaaccatctagggaaggacatgatttcacctccacaaatggcaccagcaggggttaagtgggagtcccagaagtactag

SEQ ID NO: 132637 - DNA, 2835 bp, Homo sapiens; identical to SEQ ID NO: 116378

SEQ ID NO: 132638 - DNA, 3705 bp, Homo sapiens
atgcagaaaaagcatgacaaaatccgaaattctttcatgataaaaactctcaaaaaactacgtacagaaggaatttacctcaatacaataaaggcaacatataaaaagcccataactaacatcatactcaatggtgaaaaccagaaagcttttgctctaagatcgggaacaagattctggatattagccctttgtcagatgagtaggttgcgaaaattaacaaactatctctcagaccacagtgcaatcaaactagaactcaggattaagaatcccactcaaagccgcccaactacatggaaactgaacaacctgctcctgaatgactactgggtacataatgaaatgaaggcagaaataaagatgttctttgaaaccaacgagaacaaagacacaacataccagaatctctgggacgcattcaaagcagtgtgtagagggaaacttatagcactaaatgcccacaagagaaagcaggaaagatccaaaattgacaccctaacatcacaattaaaagaactagaaaagcaagagcaaacacattcaaaagctagcagaaggcaagaaataactaaaatcagagcagaactgaaggaaacagagacacaaaaaacccttcaaaaaatcaatgaatccaggagctggttttttgaaaggatcaacaaaattgatagaccgctagcaagactaataaagaaaaaaagagagaagaatcaaatagacacaataaaaaatgataaaggggatatcaccaccgatcccacagaaatacaaactaccatcagagaatactacaaacacctctacacaaataaactagaaaatctagaagaaatggataaattcctcgacacatacactctcccaagactaaaccaggaagaagttgaatctctgaatagaccaataacaggagctgaaattgtggcaataatcaatagcttaccaaccaaaaggagtccaggaccagatggattcacagccgaattctaccagaggtacaaggaggaactggtaccattccttctgaaactattccaatcaatagaaaaagagggaatcctccctaactcattttatgaggccagcatcattctgataccaaagccgggcagagacacaaccaaaaaagagaattttagaccaatatccttgatgaacattgaggtaaaaatcctcaataaaatactggcaaaccgaatccagcagcacatcaaaaagcttatccaccatgatcaagtgggcttcatccctgggatgcaaggctggttcaatatatgcaaatcagtaaatgtgatccagcatataaacagagccaaagacaaaaaccacatgattatctcaatagatgcagaaaaagcctttgacaaaattcaacaacccttcatgctaaaaactctcaataaattaggtattgatgggatgtatttcaaaataataagagctatctatgacaaacccacagccaatatcatactgaatgggcaaaaactggaagcattccctttgaaaactggcacaagacagggatgccctctctcaccactcctattcaacatagtgttggaagttctgaccagggcaattaggcaggagaaggaaataaacggtattcaattaggaaaagaggaagtcaaattgtccctgtttgcagatgacatgattgtatatctagaaaaccccattgtctcagcccaaaatctccttaagctgataagcaacttcagcaaagtctcaggatacaaaatcaatgtacaaaaatcacaagcattcttatacaccaacaacagacaaacagagagccaaatcatgagtgaactcccattcacaattgcttcaaagagaataaaatacctaggaatccaacttacaagggatgtgaaggacctcttcaaggagaactacaaaccactgctcaaggaaataaaagaggatgcaaacaaatggaagaacattccatgctcatgggtaggaagaatcaatatcgtgaaaatgaccatactgcccaagtctgagaaggtttcagtatgcccctcccttggtgcccacgtgattttcaagccatacaaggactggcctgtatgtgccagaactctcaccccagctcgatcacctaatctcattaaaaacagggcctgtcacccttctctgctctccaagctatttttggatcagcttataatcctgtcctattctccccagaaagcctcattatgcaccggaagtgaccgcctcgcggctgcttcctctcctggagtccagagtcccgttgctccgccgcgatattcagtaaaccactgggagtccggcagcatggaggcagcgcgccctcccccgacggcagggaagttcgtggtggtcggcggcggcatcgcgggcgtcacttgtgcggagcagttggctactcactttccatcggaagatattctcttggtaacagcttctcctgttattaaagcagttacaaatttcaagcagtggcagcagcgctggtgtctgataagtggtgcctatggagcagatagagctgaggcccaaaacacaggcatacacggaggaattaaagttctgggatctgggactgtaatgatattggtgcctagggtgcagatttctaaaatattggaagaattcgatgttgaagaacaatcaagtaccatgttaggaaaacgctttcccaacattaaggttatagaatctggcgtaaagcaactgaagagtgaagaacactgcattgtaacagaagatggcaatcagcacgtatataagaaactctgtctgtgtgctggagctaaaccaaagttgatatgtgaaggaaatccttatgtattaggaatccgtgatacagacagtgctcaggaatttcagaaacagcttactaaagctaaaagaataatgatcatagggaacggtggtattgcacttgagttagtgtatgaaattgaaggctgtgaagtgatttgggccattaaagataaagctatagggaatactttcttcgatgcaggagcagctgaattcttgacttcaaagctcattgctgaaaaatcagaggctaaaattgcacataaaagaaccagatatacaactgaaggaaggaaaaaggaagctagaagcaaatctaaagcagataatgtaggaagtgcattgggaccagattggcatgaaggcttgaatcttaaaggaacaaaagagtttgatctaggagaagatggtggcctgaaagtggatgatcatatgcacacatcccttcctgatatctatgctgccggtgacatctgtactacatcctggcagctgagcccagtctggcagcagatgaggctgtggacccaggctagacagatgggatggtatgcagcaaagtgcatggctgcagcgagttcaggagactctattgacatggatttcagctttgaactgtttgctcatgtgacaaaattttttaactataaggttgtactgctgggaaaatacaatgcacagggcttaggttcagatcatgaattaatgctgagatgtaccaaaggacgagaatacatcaaagtcgtcatgcaaaatggacgaatgatgggagctgtcttaattggtgaaaccgatttagaagaaacatttgaaaacctaatcttaaaccaaatgaatctttcatcatatggagaagatctgctagatccaaatattgatatagaagattattttgactaa

SEQ ID NO: 132639 - DNA, 3139 bp, Homo sapiens
atggggaaaaaacagaacagaaaaactggaaactctaaaaagcagagtgcctctcttcctccaaaggaacgcagcttctcaccagcaactgaacaaagctggacggagaatgactttgatgagctgagagaagaaggcttcagacgatcaaattactatgagctacgggaggacattcaaaccaaaggcaaagaagttgaaaactttgaaaaaaatttagaagaatcaccacaccacacctattccaaaattgaccacatacttggaagtaaagctctcctcagcaaatgtaaaagaacagaaattataacaaactatctctcagaccacagtgcaatcaaactagaactcaggattaagaatctcactcaaaaccgctcaactacatggaaactgaacaacctgctcctgaatgactactgggtacctaacgaaatgaaggcagaaataaagatgttctttgaaaccaacgagaacaaagacacaacataccagaatctctgggaggcattcaaagcagtgtgtagagggaaatttatagcactaaatgcccacaagagaaagcaggaaagagctaaaattgacaccctaacatcacaattaaaagaactagaaaagcaagagcaaacacattcaaaagctagcagaaggcaagaaataactaaaatcagagcagaactgaaggaaagagagacacaaaaaacccttcaaaaaattaatgaatccaggagctggttttttgaaaggatcaacaaaattgatagaccactcgcaagactaataaagaaaaaaagagagaagaatcaaatagaggcaataaaaaatgataaaggggttatcaccaccgatcccacagaaatacaaactaccatcagagaatactacaaacacctctacacaaataaactagaaaatctagaagaaatggataaattccttgacacatacactctcccaagaccaaaccaggaagaagttgaatctctgaatagaccaataacaggatctgaaattgtggcaataatcaatagcttaccaaccaaaaagagtccaggaccagatggattcacagccaaattctaccagaggtacaaggaggaactggtatcattccttctgaaactattccaatcaatagaaaaagagggaatcctccctaactcattttatgaggccagcatcattctgaaaccaaagccgggcagagacataaccaagaaagagaattttagaccaatatccttgatgaacattgatgcaaaaatcctcaataaaatactggcaaaacgaatccagcagcacatcaaaaagcttatccaccatgatcaagtgggcttcatccctgggatgcaaggctggttccatataagcaaatcaataaatgtaatccagcatataaacggagccaaagacaaaaaccacatgattatctcaatagatgcagaaaaggcctttgacaaaattaaacaacacttcatgctaaaaactctcaataaattaggtattgatgggaggtatttcaaaataataagagctatctatgacaaacccacagccaatatcatactgaatgggcacaaactggaagcattccctttgaaaactggcacaagacagggatgccctctctcaccactcccattcaacatagtgttggaagttctggccagggcaattaggcaggagaaggaaataaagggtattcaattaggaaaagaggaagtcaaattgtctctgtttgcagacgacatgattgtatatctagaaaaccccatcgtctcagcccaaaatctccttaagctgataagcaacttcagcaaagtctcaggatacaatatcaatgtgcaaaaatcacaagcattcctgtacaccaacaacagacaaacagagagccaaatcatgagtgaactcccattcacaatggcttcaaagagaataaaatacctaggaatccaacttacaagggatgtgaaggacctcttcaaggagaactacaaaccactgctgaaggaaataaaagaggatacaaacaaatggaagaacattccatgctcatgggtaggaagaatcaatatcgtgaaaatggccatactgcccaaggtaatttacaggttcagtgccatccccatcaagctaccaatgactttcttcacagaattggaaaaaactactttaaagttcatatggaaccaaaaaagagcccgcatcgtcaagtcaatcctaagccaaaagaacaaagctggaggcaccacactacctgacttcaaactatactacaaggctacagtaaccaaaatagcatggtactggtaccaaaacagagatatagatcaatggaacagaacagagccctcagaaataatgccgcatatctacaactatctgatctttgacaaacctgagaaaaacaagcaatggggaaaggattccttatttaataaatggtgctgggaaaactggctagccatatgtagaaagctgaaactggatcccttccttacaccttatacaaaaatcaattcaagatggattaaagacttaaacgttagacctaaaaccataaaaaccctagaagaaaacctaggcattaccattcaggacataggcatgggcaaggacttcatgtctaaaacaccaaaagcaatggcaacaaaacccaaaattgacaaatgggatctaatgaaactaaagagcttctgcacagcaaaagaaactaccatcagagtgaacaggcaacctacaaaatgggagaaaatttttgcaacctactcatctgacaaagggctaatatccagaatctacaatgaactcaaacaaatttacaagaaaaaaacaaacaaccccatcaaaaagtgggcaaaggacatgaacagacacttctcaaaagaagacatttatgcagccaaaaaacacatgaaaaaatgctcaccatcactggccatcagagaaatgcaaatcaaaaccacaatgagataccatctcccaccagttagaatggcaatcattaaaaagtcaggaaacaacagaaaaagtttacagatctctgctctaggaaattataccactcagccttatgttaggtttggttttgactctcttgtagtgtttacaagacttttaccaaaaaagtttatcaaca

SEQ ID NO: 132640 - DNA, 2920 bp, Homo sapiens
accaagtctacgtctgattggtgtacctgaaagtgatggggagaatggaaccaagttggaaaacactctgcaggatattatccaggagaacttccccaatctagcaaggcaggccaacattcagattcaggaaatacagagaacgccacaaagatgctcctcgagaagagcaactccaacacacgtaattgtcagattcaccaaagttgaaatgaaggacaaaatgttaagggcagccagagagaaagaccacagtgcaatcaaactagaactcaggattaagaaactcactcaaaaccgctccactacatggaaactgaacaacctgctccagaatgactactgggtacataacgaaatgaaggcagaaataaagatgttctctgaaaccaacggaaacaaagacacaacataccagtatctctggcacacattcaaagcagtgtgtagagggaaatttatagcactaaatgcccacaagagaaagcaggaaagatccaaaattgacaccctaacgtcacaattaaaagaactagaaaagcaagagcaaacacattcaaaagctagcagaaggcaagaaataactaaaatcagagcagaactgaaggaaatagagacacaaaataccgttcaaaaaattaatgaatccaggagctggttttttgaaaagatcaacaaaactgatagactgctagcaagactaataaagaagaaaagagagaagaatcaaatagatgcaataaaaaatgataaaggggatatcaccaccgatcccacagaaatacaaactaccatcacagaatactacaaacacctctacgcaaataaactagacaatctagaagaaatggataaattcctcgacacatacaccatcccaagactaaaacaggaagaagttgaatctctgaatagaccaataacagactctgaaattgtggcaataatcaatagcttaccaaccaaaaaaagtccaggagcagatggattcacagccaaattctaccagacgtacaaggaggagctggtaccattccttctgaaactattccaatcaatagaaaaagagggaatcctccctaactcactttatgaggccagcatcatcctgataccaaagcctggcagagacacaacaaaaaaagagagttttagaccaatatccttgatgaacgctgatgcaaaaatcctcaatacaatactggcaaaccgaatccagcagcacatcaaaaagcttatctaccatgatcaagtgggcttcatccctgggatgcaaggctggttcaatatacgcaaatcaataaatgtaatccagcatataaacagagccaaagacaaaaaccacatgattatctcaatagatgcaggaaaagcctttgacaaaattcaacaatccttcatgctaaaagctctcaataaattagatattgatgggacggcaattaggcaggagaaggaaataaagggtattcaattaggaaaagaggaagtcaaattgtccctgtttgcagacgacatgattgtatatctagaaaaccccattgtctcagcccaaaatctccttaagctgataagcaacttcagcaaagtctcaggatacaaaatcaatgtgcaaaaatcacaagcattcttatacaccaacaacagacaaacagagagccaaatcatgagtgaactcccattcacaattgcttcaaagagaataaaatacttaggaatccaacttacaagggatgtgaaggacctcttcaaggagaactacaaaccactgctcaaggaaataaaagaggatataaacaaatggaagaacattccatgctcatgggtaggaagaatcaatatcgtgaaaatggccatactgcccaagaattggaaaaaaactactttaaagttcatatggaatcaaaaaagagcccgcatcaccaaggcaatcctaagccaaaagaacaaagctggaggcatcacactacctgacttcaaactatactacaaggctacagtaaccaaaacagcatggtactggtaccaaaacagagatatagatcaatggaacagaacagagccctcagaaataatgccacatatctgcaactatctgatctttgacaaacctgagaaaaacaagcaatggggaaaggattccctatttaataaatggtgctgggaaaactggctagccatatgtagaaagctgaaactggatcccttccttacaccctatacaaaaatcaattcaagatggattaaagacttaaacattagacctaaaaccataaaaaccctagaagaaaacctaggcattaccattcgggacataggcatgggcaaggacttcatgtccaaaacaccaaaagcattggcaacaaaagccaaaattgacaaatgggatctaattaaactaaagagcttctgcacagcaaaagaaactaccattagagtgaacaggcaacctacaaaatgggagaagattttcgcaacctactcatctgacaaagggctaatatccagaatctacaatgaactcaaacaaatttacaagaaaaaaacaaacaaccccatcaaaaagtgggtgaaggacatgaacagacacttctcaaaagaagacatttatgcagccaaaaaacacatgaaaaaatgctcatcatcactggccatcagagaaatgcaaatcaaaaccacacttcccactgggcggttaatagaaacattccaaagcaatgagcaccagtcagaagtaaagctcttaaaacaggacaagaagaaatgggtgggaagctggaatgagaacattcatcagcagctcaaagcacagacttctaagggaatctttcctcaccctctgcctctttgttgtgtcatgatttccaatggttctcaaagtgtggcctgcaaaatcttgtggttctccaataccccttag

SEQ ID NO: 132641 - DNA, 3290 bp, Homo sapiens
atggtaaagggatcaattcaacaagaagagctaactatcctaaatatatatgcacccaatacaggagcaccaagattcataaagcaagtcctgagcgacctacaaagagacttagactcccatacattaataatgggagattttaacaccccactgtcaacattagacagatcaacgagacagaaggtcaacaaggatacccaggaattgaactcagctctgcagcaagcagacctaatagacatctacagaactctccaccccaaatcaacagaatatacatttttttcagcaccacaccacacctattccaaaattgaccacatacttggaagtaaagctctcctcagcaaatgtaaaagaacagaaattataacaaactgtctctcagaccacagtgcaatcaaactagaactcaggattaagaatctcactcaaaaccgctcaactacatggaaactgaacaacctgctcctgaatgactactgggtacataatgaaatgaaggcagaaataaagatgttctttgaaaccaatgagaacaaagacacaacataccagaatctctgggacgcattcaaagcagtgtgtagagggaaatttatagcactaaatgcccacaagagaaagcaggaaagatccaaaattgacaccctaacatcacaattaaaagaactagaaaagcaagagcaaacacattcaaaagctagcagaaggcaagaaataattaaaatcagagcagaactgaaggaaatagagacacaacaaacccttcaaaaaattaatgaatccaggagctggttttttgaaaggatcaacaaaattgatagaccgctagcaagactaataaagaaaaaaagagagaagaatcaaatagacgcaataaaaaatgataaaggggatatcaccaccgatcccacagaaatacaaactaccatcagagaatactacaaacacctctacgcaaataaactagaaaatctagaagaaatggataaattccttgacacatacaccctcccaagactaaaccaggaagaagttgaatctctgaatagaccaataacaggatctgaaattgtggcaataatcaatagcttaccaaccaaaaagagtccaggaccagatggattcacagccgaattctaccagaggtacaaggaggaactggtaccattccttctgaaactattccaatcaatagaaaaagagggaatcctccctaactcatttcatgaggccagcatcattctgataccaaagccaggcagagacacaacaaaaaaagagaatttcagaccaatatccttgatgaacattgatgcaaaaatcctcagtaaaatactggcaaaacgaatccagcagcacatcaaaaagcttatatacaccatgatcaagtgggcttcatccctgggatgcaaggctggttcaatatactgttggatgttctggccagggcaattaggcaggagaaggaaataaagggtattcaattaggaaaagaggaagttaaattgtccctgtttgcagacgacatgattgtatatctagaaaaccccattgtctcagccgaaaatctccttaagctgataagcaacttcagcaaagtctcaggatacaaaatcaatgtacaaaaatcacaagcattcttatacaccaacaacagacaaacagacagccaaatcatgagtgaaatcccattcacaattgcttcaaagagaataaaatatctaggaatccaacttacaagggatgtgaaggacctcttcaaggagaactacaaaccactgctcaaggaaataaaagaggatacaaacaaatggaagaacattccatgttcatgggtaggaagaatcaatatcatgaaaatggccatactgcccaaggtaatttacagattcaatgccatccccatcaagctaccaatgcctttcttcacagaattggaaaaaactactttaaagttcatatggaaccaaaaaaaaccccgcatcgccaagtcaatcctaagccaaaagaacaaagctggaggcatcacactacctgacttcaaactatactacaaggctacagtaaccaaaacagcatggtactggtgccaaaacagagatatagatcaatggaacagaacagagccctcagaaataacgccgcatatctacaactatctgatctttgacatacctgagaaaaacaagcaatggggaaaggattccctgtttaataaatggtgctgggaaaactggctagccatatgtagaaagttgatactggatcccttccttacaccttatataaaaatcaattcaagatggattaaagacttaaacgttggacctaaaaccataaaaaccctagaagaaaacctaggctttaccattcaggacataggcatgggcaaggacttcatgtctaaaacaccaaaagcaatggcaacaaaagccaaaattgacaaatgggatctaattaaactcaagagcttctgcacagcaaaagaaactaccatcagagtgaacaggcaacctacaaaatgggagaaaattttcgcaacctactcatctgacaaagggctaatatccagaatctacaatgaactcaaacaaatttacaagaaaaaaacaaacaaccccatcaaaaagtgggtgaaggacatgaacagacacttctcaaaagaagacatttatgcagccaaaaaacacatgaaaaaatgctcatcatcactggccatcagagaaatgcaaatcaaaaccacagtgagataccatctcacaccagttagaatggtgatcattaaaaagtcaggaaacaacaggtgctggagaggatgtggagaaataggaacacttttacactgttggtgggactgtaaactagttcatccattgtggaagtcagtgtggcgattcctcagggatctagaactagaaataccatttgacccagccatcctattactgggtatatacccaaaggattataaatcatgctgctataaagacacatgcacacatgagaaagcagagatccagaaaagtaaaggaatcagagattatggagaaataggtactagaactgaggatatggactcccagttcagacctctttccgttgttcgggcacaaattatcccctttgaatttccctgggaaggaatacctctgggtggacccttcccccggcattcctgcagctaccctgtgggcctagcccttttgtaccacagtagctcagcagctggaccagtgagaggacacctctccctgcagtggaattccaggatgactagttga

SEQ ID NO: 132642 - DNA, 3640 bp, Homo sapiens
atggggaaaaaacagaacagaaaaactggaaactctaaaacgcagagcgcctctcctcctccaaaggaacgcagttcctcaccagcaacagaacaaagctggatggagaatgattttgacgagctgagagaagaaggcttcagacgatcaaattactctgagctatgggaggacattcaaaccaaaggcaaagaagttgaaaactttgaaaaaaatttagaagaatgtataactagaataaccaatacagagaagtgcttaaaggagctgatggagctgaaaaccaaggctcgagaactacatgaagaatgcagaagcctcaggagccgatgcgatcaactggaagaaagggtatcagcaatggaagatgaaatgaatgaaatgaagcgagaagggaagtttagagaaaaaagaataaaaagaaatgagcaaagcctccaagaaatatgggactatgtgaaaagaccaaatctacgtctgattggtgtacctgaaagtgatgtggagaatggaaccaagttggaaaacactctgcaggatattatccaggagaacttccccaatctagcaaggcaggccaacgttcagattcaggaaatacagagaatgccacaaagatactcctcgagaagagcaactccaagacacataattgtcagattcaccaaagttgaaatgaaggaaaaaatgttaagggcagccagacagaaagcaccacaccacacctattccaaaattgaccacatagttggaagtaaagctctcctcagcaaatgtaaaagaacagaaattataacaaactatctctcagaccacagtgcaatcaaactagaactcaggattaagaatctcactcaaagccgctcaactacatggaaactgaacaacctgctcctgaatgactactgggtacataacgaaatgaaggcagaaataaagatgttctttgaaaccaacgagaacaaagacaccacataccagaatctctgggacacattcaaagcagtgtgtagagggaaatttatagcactaaatgcctacaagagaaagcaggaaacatccaaaattgacaccataacatcacaattaaaagaactagaaaagcaagagcaaacacattcaaaagctagcagaaggcaagaaataactaaaatcagagcagaactgaaggaaatagagacacaaaaaacccttcaaaaaatcaatgaatccaggagctggttttttgaaaggatcaacaaaattgatagaccgctagcaagactaataaagaaaaaaagagagaagaatcaaatagacacaataaaaaatgataaaggggatatcaccaccgatcccacagaaatacaaactaccatcagagaatactacaaacacctctacgcaaataaactagaaaatctagaagaaatggatacattcctcgacacatacactctcccaagactaaaccaggaagaagttgaatctctgaatagaccaataacaggctctgaaattgtggcaataatcaatagtttaccaaccaaaaagagtccaggaccagatggattcacagccgaattctaccagaggtacaaggaggaactggtaccattccttctgcaactattccaatcaatagaaaaagagggaatcctccctaactcattttatgaggccagcatcattctgataccaaagccgggcagagacacaaccaaaaaagagaattttagaccaatatccttgatgaacattgatgcaaaaatcctcaataaaatactggcaaaccgaatccagcagcacatcaaaaagcttatccaccatgatcaagtgggcttcatccctgggacgcaaggctggttcaatatacgcaaatcaataaatgtaatccagcatataaacagagccaaagacaaaaaccacatgattatctcaatagatgcagaaaaagcctttgacaaaattcaacaacccttcatgctaaaaactctcaataaattaggtattgatgggacatatttcaaaataataagagctatctatgacaaacccacagccaatatcatactgaatgggcaaaaactggaagcattccctttgaaaactggcacaagacagggatgccctctctcaccgctcctattcaacatagtgttggaagttctggccagggcaatcaggcaggagaaggaaataaagggtattcaattaggaaaagaggaagtcaaattgtccctgtttgcagacgacatgattgtttatctagaaaaccccatcgtctcagcccaaaatctccttaagctgataagcaacttcagcaaagtctcaggatacaaaatcaatgtacaaaaatcacaagcattcttatacaccaataacagacaaacagagagccaaatcatgagtgaactcccattcacaattgcttcaaagagaataaaatacctaggaatccaacttacaagggatgtgaaggacctcttcaaggagaactacaaaccactgctcaaggaaataaaagaggacacaaacaaatggaagaacattccatgctcatgggtaggaagaatcaatatcgtgaaaatggccatactgcccaaggtaatttacagattcaatgccatccccatcaagctaccaatgactttcttcacagaattggaaaaaactactttaaagttcatatggaaccaaaaaagagcctgcatctccaagtcaatcctaagccaaaagaacaaagctggaggcatcacactacctgacttcaaactatactacaaggctacagtaaccaaaacagcatggtactggtaccaaaacagagatatagatcaatggaacagaacagagccctcagaaataatgccacatatctacaactatctgatctttgacaaacctgagaaaaacaagcaatggggaaaggattccctatttaataaatggtgctgggaaaactggctagccatatgtagaaagctgaaactggatcccttccttacaccttatacaaaaatcaattcaagatggattaaagatttaaacgttagacctaaaaccataaaaaccctagaagaaaacctaggcattaccattcaggacataggcgtgggcaaggacttcatgtccaaaacaccaaaagcaatggcaacaaaagccaaaattgacaaatgggatctaattaaactaaagagcttctgcacagcaaaagaaactaccatcagagtgaacaggcaacctacaacatgggagaaaattttcacaacctactcatctgacaaagggctaatatccagaatctacaatgaactcaaacaaatttacaagaaaaaaacaaacaaccccatcaaaaagtgggcgaaggacatgaacagacacttctcaaaagaagacatttatgcagccaaaaaacacatgaagaaatgctcatcatcactggccatcagagaaatgcaaatcaaaaccactatgagatatcatctcgcaccagttagaatggcaatcattaaaaagtcaggaaacaacagaataaaaagactcacagactcagaaaggaggaaaatgaaatcagaggacaggttgacatgtgaggactccagaaaccttattactttcatacaatggaataaagaacaagaagaagaaagaaaaacca

SEQ ID NO: 132643 - DNA, 1223 bp, Homo sapiens
catgggcatttgagccacttccttgtttagttaaacaagtgccttcaggaactgctcgagcctgatcacatatataccacttcaatttgatgatggaatgctgttgtgcatgacccactttatgtctagatgggtcagaaagcacccagttcatgataggcagttcaggttgcatggtgacttgatgacccatagtcaaaccttcagtttccatcaaagcccagtaacaggccaagagccgtctctcaaaaggagagtagttatctgcagaaaatggaagggccttgctccaaagtcctagaggcctccattgtgattcacctatgggggcctgccaaaggctccaaacagcaaccctatctgccactgacatctcaagcaccgttggatctgccgagtcatatggcccaaatggcagagcagcttgcacagcagcctggacctgttgcagagccttctcctgttccagaccccactcaaaactggcagcctttcgggtcacttgatacatgggctggagtaacacacccaaatgaggaatgtgttccctccaaaatccaaataggcccactaggtgttgggcctctttcttggttgtaggaggggccaaatgcagcaacttatccttcaccttagaggaatatctcgacaggccccacaccactggactcctagaaattttacaggtaccaggatatgtgttaatttgcttaagcaatgaaaccacatctggtacaacagctgcaattggagtcatcacttgggtaagcttacaataatccactgtcattctccaacatccatctgtcttctgcacagaccaaatgggagagttgaacggggatgtggtgggaatcaccacccctgcgtctttcaaatccttgatggtggcactaatctctgcaatccctccagggatgcgatattgtttttgatttactatttttataggaagaagcggctcaaatggcttccatttggcctttcccaccataatagccttcaccctgttctacagatttctgcttatataaaccagaaaactcaagtagttctttttgagtgtagtacacctcttcatgggtcacactctgaacctcatctctaggggcctgctgggactttagtctacttataggtctagaagcaatcaggggtgttgagggtgagtactgaggagaatcaacattaccttgcctggaaactgcctcagcggaggccat

SEQ ID NO: 132644 - DNA, 4227 bp, Homo sapiens
atgcacattgttgtagaaacagctctgtcagcttcatggcagaacaaggccaagcccccagctagggttctgcttcaggtggtccccaatgtgtggttccttgtggctgttgtgtgggaactgtatccatctttggatctcatggatcgttccatagaatgcagttcctcaccagcaacggaacaaagctggacagagaatgactatgacaagctgagagaagaaggcttcagacgatcaaattactctgagctacaggaggacattcaaaccaaaggcaaagatgttgaaaactttgaaaaaaatttagaagaatgtataactagaataactaatacacagaagtgcttaaaggagctgatggagctgaaaaccaaggctcgagaactacgtgaagaatgcagaagcctcaggagccgatgcgatcaactggaagaaagggtatcagtgatggaagatgaaatgaatgaaatgaagcaagaagggaagtttagagaaaaaagaataaaaagaaatgagcaaagcctccaagaaatatgggactatgtgaaaagaccaaatctacgtctgattggtgtacctgaaagtgatggggagaatggaaccaagttgaaaaacactctgcaggatattatccaggagaacttccccaatctagcaaggcaggccaaagttcagattcaggaaatacagagaatgccacaaagatattccttgacaagagcaactccaagacacataattgtcagattcaccaaagttgaaatgaaggaaaaaatgttaagggcagccagagagaaaggagcacccagattcataaagcaagtcctgagtgacctacaaagagacttagactcccacacattaataatgggagactttaacaccccactgtcaacattagacagatcaacgagacagaaagtcaacaaggatacccaggaattgaactcagctctgcaccaagtggacctaatagacatctacagaactctccaccccaaatcaacagaatacacatttttttcagcaccacaccacacgtattccaaaattgaccacatacttggaagtaaagctctcctcagcaaatgtaaaagaacagaaattataacaaactatctctcagaccacagtgcaatcaaactagaactcaggattaagaatctcactcaaaaccgctcaactacatggaaactgaacaacctgctcctgaatgactactgggtacataacgaaatgaagctagaaataaagatgttctttgaaaccaacgagaacaaagacacaacataccagaatctctgggacgcattcaaagcagtgtatagagggaaatttatagcactaaatgcccacaagagaaagcaggaaagatccaaaattgacaccctaacatcacaattaaaagaactagaaaagcaagagcaaacacattcaaaagctagcagaaggcaagaaataactaaaatcagagcagaactgaaggaaatagagacacaaaaaacccttcaaaaaattaatgaatccaggagctggttttttgaaaggatcaacaaaatagatagactgctagcaagactaataaagagaaaaagagagaagaatcaaatagatgcaataaaaaatgataaaggggacatcaccaccaatcccacagaaatacaaactaccatcagagaatactacaaacacctctacgcaaataaactagaaaatctagaagaaatggataaattcctcgacacatacactctcccaagactaaaccaggaagaagttgaatctctgaatagaccaataacaggatctgaaattgtggcaataatcaatagcttaccaaccaaaaagagtccaggaccagatggattcacagccgaattctaccagaggtacaagaaggaactggtaccattccttctgaaactattccaatcaatagaaaaagagggaatcctccctaactcattttatgaggccagcatcattctgataccaaagccaggcagagacacaaccaaaaaagagaattttagaccaatatccttgatgaacattgatgcaaaaaccctcaataaaatactggcagaccgaatccagcagcacatcaaaaagcttatccaccatgatcaagtgggcttcatccctgggatgcaaggctggttcaatatacacatatcaataaatgtaatccagcatataaacagagccaaagacaaaaaccacatgattatctgcatagatgcagaaagggcctttgacaaaattcaacaacccttcatgctaaaaactcttaataaattagtgttggaagttctggccagggcaattaggcaggagaaggaaataaagggtattcaagtaggaaaagaggaagtcaaattgtccctgtttgcagatgacatgattgtatatctagaaaaccccattgtctcagcccaaaatctccttaagctgataagcaacttcagcaaagtctcaggatacaaaatcaatgtacaaaagtcacaagcattcttatacaccaataacagacaaacagagagccaaatcatgagtgaactcccattcacaattgcttcaaagagaataaaatacctaggaatccaacttacaagggatgtgaaggacctcttcaaggagaactacaaaccactgctcaacgaaataaaagaggatacaaacaaatggaagaacattctatgctcatgggtaggaagaattaatatcgtgaaaatggccatactgcccaaggtaatttacagattcaatgccatccccatcaagctaccaatgcctttcttcacagaattggaagaaactactttaaagttcatatggaaccaaaaaagagcccgcattgccaaggcaatcctaagccaaaagaaaaaagctggaggcatcacactacctgacttcaaactatactacaaggctacagtaaccaaaacagcatggtactggtaccaaaacacagatatagaacaatggaacagaacagagccctcagaaataatgctgcatatctacaactatctgatctttgaccaacctgagaaaaacaagcaatggggaaaggattccctatttaataaatggtgctgggaaaactggctagccatatgtagaaagctgaaactggatcccttccttacaccttatacaaaaatcaattcaagatggattaaagacttaaacgttagacctaaaaccataaaaaccctagaagaaaacctaggcattaccattcaggacataagcatgggtaaggacttcatgtctaaaacaccaaaagcaaaggcaacaaaagccaaaattgacaaatgggatctaattaaactaaagagtttctgcacagcaaaagaaactaccatcagagtgaacaggcaacctacaaaatgggagaaaattttcgcaacctactcatctgacaaagggctaatatccagaatctacaatgaactcaaacaaatttacaagataaaaacaaacaaccccatcgaaaagtgggtgaaggacatgaacagacacttctcaaaagaagacatttatgcagccaaaaaatacatgaaaaaatgctcatcatcactggccatcagagaaatgcaaatcaaaagcttccagaggaaggatcaggcagcaatatttgctattctgcagcctccactggtgataaccaggcaaacagggtctggagtggacctgaagcaaactccaacagacctgaagctgagggacctaactgttagaagaaaaatgaacaaacagaaagaaagatagagagaaaccagaggagaagttaaaaattctaaaaaccagagcacctctgctcctccaaaggactgcagttccttggccgatcccaaaaaaatacaaactaccatcagagaatactataaacacctctatccaaataaactagaaaatcaagaagaaatggataaatttctggacacatacaccctcccaagattaaaccaggaagaagttgaatctctgaatagaccaataacaggttctgaaattgaggcaataggaaattatcaaagaaataattgaagaaatttacttccaaagaagtaagttttacttctttgcagaattaaagtcttctgcactgagagcttagcaaaatggataaaatggacccataccaagacattcatcatggaatttcacactattggaaatgcaaagattctgcaggcttcttcgtttacggaagta

SEQ ID NO: 132645 - DNA, 3060 bp, Homo sapiens
atggtaaagggatcaattcaacaagaggagctaactatcctaaacatttatgcacccaatacaggagcacccagattcataaagcaagtcctgagtgacctacaaagagacttagactcccacacattaataatgggagactttaacaccccactgtcaacattagacagatcaacgagacagaaagtcaacaaggatacccaggaattgaactcagctctgcaccaagcagacctaatagacatctacagaactctccaccccaaatcaacagaatatacatttttttcagcaccacaccacacctattccaaaattgaccacatagttggaagtaaagctctcctcagcaaatgtaaaagaacagaaattataacaaactatctctcagaccacagtgcaatcaaactagaactcaggattaagaatctcactcaaagccgctcaactacatggaaactgaacaacctgctcctgaatgactactgggtacataacgaaatgaaggcagaaataaagatgttctttgaaaccaacgagaacaaagacaccacataccagaatctctgggacgcattcaaagcagtgtgtagagggaaatttatagcactaaatgcctacaagagaaagcaggaaagatccaaaattgacaccctaacatcacaattaaaagaactagaaaagcaagagatcaacaaaattgatagaccgctagcaagactaataaagaaaaaaagagagaagaatcaaatagacacaataaaaaatgataaaggggatatcaccaccgatcccacagaaatacaaactaccatcagagaatactacaaacacctctacacaaataaactagaaaatctagaagaaatggatacattcctcgacacatacactctcccaagactaaaccaggaagaagttgaatctctgaatagaccaataacaggatctgaaattgtggcaataatcaatagtttaccaaccaaaaagagtccaggaccagatggattcacagccgaattctaccagaggtacaaggaggaactggtaccattccttctgaaactattccaatcaatagaaaaagagggaatcctccctaactcattttatgaggccagcatcattctgataccaaagccgggcagagacacaaccgaaaaagagaattttagaccaatatccttgatgaacattgatgcaaaaatcctcaataaaatactggcaaaccgaatccagcagcacatcaaaaagcttatccaccatgatcaagtgggcttcatccctgggatgcaaggctggttcaatatacgcaaatcaataaatgtaatccagcatataaacagagccaaagacaaaaaccacatgattatctcaatagatgcagaaaaagcctttgacaaaattcaacaacccttcatgctaaaaactctcaataaattaggtattgatgggatgtatttcaaaataataagagctatctatgacaaacccacagccaatatcatactgaatgggcaaaaactggaagcattccctttgaaaactggcacaacacagggatgccctctctcaccgctcctattcaacatagtgttggaagttctggccagggcaatcaggcaggagaaggaaataaagggtattcaattaggaaaagaggaagtcaaattgtccctgtttgcagacgacatgattgtttatctagaaaaccccatcgtctcagcccaaaatctccttaagctgataagcaacttcagcaaagtctcaggatacaaaatcaatgtacaaaaatcacaagcattcttatacaccaacaacagacaaacagagagccaaatcatgagtgaactcccattcacaattgcttcaaagacaataaaatacctaggaatccaacttacaagggatgtgaaggacctcttcaaggagaactacaaaccactgctcaaggaaataaaagaggacacaaacaaatggaagaacattccatgctcatgggtaggaagaatcaatatcgtgaaaatggccatactgcccaaggtaatttacagattcaatgccatccccatcaagctaccaatgactttcttcacagaattggaaaaaactactttaaagttcatatggaaccaaaaaagagcccgcatcgccaagtcaatcctaagccaaaagaacaaagctggaggcatcacactacctgacttcaaactatactacaaggctacagtaaccaaaacagcatggtactggtaccaaaacagagatatagatcaatggaacagaacagagccctcagaaataatgccgcatatctacaactatctgatctttgacaaacctgagaaaaacaagcaatggggaaaggattccctatttaataaatggtgctgggaaaactggctagccatatgtagaaagctgaaactggatcccttccttacaccttatacaaaaatcaatccaagatggattaaagatttaaacgttagacctaaaaccataaaaaccctagaagaaaacctaggcattacctttcaggacataggcgtgggcaaggacttcatgtccaaaacaccaaaagcaatggcaacaaaagccaaaattgacaaatgggatctaattaaactaaagagcttctgcacagcaaaagaaactaccatgagagtgaacaggcaacctacaacatgggagaaaattttcgcaacctacgcatctgacaaagggctaatatccagaatctacaatgaactcaaacaaatttacaagaaaaaaacaaacaaccccatcaaaaagtgggcgaaggacatgaacagacacttctcaaaagaagacatttatgcagccaaaaaacacatgaagaaatgctcatcatcactggccatcagagaaatgcaaatcaaaaccactatgagatatcatctcacaccagttagaatggcaatcattaaaaagtcaggaaacaacagaatgattccagctaaacctcaaagcagctgcactaaggagctccctacagccacaggatatgtatctctggagtcacagggccacaactga

SEQ ID NO: 132646 - DNA, 3285 bp, Homo sapiens
atggggaaaaaacagagcagaaaaactgcaaactctaaaaagcagagcacctctcctcctccaaaggaacacagttcctcaccagcaacggaacaaagctggacggagaatgactttgacgagctgagagaagaaggcttcagacgatcaaattactctgagctacgggaggacattcaaaccaaaggcaaagaagttgaaaactttgaaaaaaatttagaagaatgtataactacaataaccaatacagagaagtgcttaaaggagctgatggagctgaaagccaaggctcaagaactacgtgaagaatgcagaagcctcaggagccgatgcaatcaactggaagaaagggtatcagcgatggaagatgaaatgaatgaaatgaagcgagaagggaagtttagagaaaaaagaataaaaagaaatgagcaaagcctccaagaaatatgggactatgtgaaaagaccaaatctacgtctgactggtgtacctgaaagtgatggggagaatggaaccaagttggaaaacactctacaggatattatccaggagaacttccccaatctagcaaggcaggccaacattcagattcaggaaatacagagaatgccacaaagatactcctcgagaagagcaacaccaagacacataattgtcagattcaccaaagttgaaatgaaggaaaaaatgttaagggcagccagagagaaagacagatcaacgagacagaaagtcaacaagaatacccaggaattgaactcagctctccaccaagcggacctaatagacatctacagaactctccaccccaaatcaacagaatatacgtttttttcagcaccacaccacacctattccaaaattggccacatagttggaagtaaagctctcctcagcaaatgtaaaagaacagaaattataacaaactatctctcagaccacagtgcaatcaaactagaactcaggattaagaatctcactcaaaaccgctcaactacatggaaactgaacaacctgctcctgaatgactactgggtacataacgaaatgaaggcagaaataaagatgttctttgaaaccaacgagaacaaagacacaacataccagaatctctgggacacattcaaagcagtgtgtagagggaaatttatagcactaaatgcccacaagagaaagcaggaaagatccaaaattgacaccctaacatcacaattaaaagaactagaaaagcaaaagcaaacacattcaaaagctagcagaaggcaagaaataactaaaatcagagcagaactgaaggaaatagagacacaaaaaacccttcaaaaaaatcaatgaatccaggagctggttttttattttttatttttgaaaagatcaacaaaattgatagaccgctagcaagactaataaagaagaaaagagagaagaatcaaatagatgcaataaaaaatgataaagaggatatcaccaccaatcccacagaaatacaaactaccatcagagaatactataaacacctctatgcaaataaactcgaaaatctagaagaaatggataaattcctcgacccatacactttcccaagactaaaccaggaagaagttgaatctctgaatagaccaataacaggatctgaaattgtggcaataatcaatagcttaccaaccaaaaagagtccaggaccagatggattcacagctgaattctaccagaggtacaaggaggaactggtaccattccttctgaaattattccaatcaatagaaaaagagggaatcctccctaactcattttatgaggccagcatcattctgataccaaagcctggcagagacacaaccaaaaaagagaattttagaccaatatccttgatgaacattgatgcaaaaatcctcaataaaatactggcaaaacgaatccagcagcacatcaaaaagcttatccaccatgatcaagtgggcttcatccctgggatgcaagggctggttcaatatacgcaaatcaataaacgtaatccagcatataaacagagccaaagacaaaaaccacatgattatctcaatagatgcagaaaaggcctttgacaaaattcaacaacccttcatgctaaaaactctcaataaattagagaataaaatacctaggaatccaacttacaagggatgtgaaggacctcttcaaggagaactacaaaccactgctcaaggaaataaaagaggacacaaacaaatggaagaacattccatgctcatgggtaggaagaatcaatatcatgaaaatggccatactgcccaaggtaatttatagattcaatgccatccccatcaagctaccaatgcctttcttcacagaattggaaaaaactactttaaagttcatatggaaccaaaaaagagcctgcatcaccaactcaatcctaagccaaaagaacaaagctggaggcatcacactacctgacttcaaactatactacaaggctacagtaaccaaaacagcatggtactggtaccaaaacagaaatatagatcaatggaacagaacagagccctcagaaataacgccgcatatctacaactatgtgatctttgacaaacctgacaaaaacaagaaatggggaaaggattccctatttaataaatggtgctgggaaaactggctagccatatgtagaaagctgaaactagatcccttccttacaccttatacaaaaatcaattcaagatggattaaagacttaaacgttagacctaaaaccataaaaaccctagaagaaaacccaggcagtaccattcaggacataggcatgggcaaggacttcatgtctaaaacaccaaaagcaatggcaacaaaagacaaaattgacaaatgggatctaattaaactaaagagcttctgtacagcaaaagaaactaccatcagagtgaacaggcaacctacagaatgggagaaaatttttgcaacctactcatctgacaaagggctaataatatccagaacctacatgaactcaaacaaatttacaagaaaaaaacaaagaaccccatcaaaaagtgggcgaaggacatgaacagacacttctcaaaagaagacatttatgcagccaaaaaacacatgaaaaaatgctcatcatcactggccatcagagaaatgcaaatcaaaaccactatgagatatcatctcacaccagttagaatggcaatcattaaaaagtcaggaaacaacagaggatctgaagcccagatcaatgctgtcttggtgcttcggacccagcctcatattgagtga

SEQ ID NO: 132647 - DNA, 7444 bp, Homo sapiens
atggggaaaaaacagaacagaaaaactggaaactctaaaacgcagagtgcctctcctcctccaaaggaacgcagttcctcaccagcaacggaaaaaagctggatggagaatgactttgacgagctgagagaagaaggtttcagacgatcaaattactctgagctacgggaggacattcaaaccaaaggcaaagaagttgaaaactttgaaaaaaatttagaagaatgtataactagaataaccaatacagagaagtgcttaaaggagctgatggagctgaaaaccaaggctcgagaactacgtgaagaatgcagaagcctcaggagccgatgtgatcaactggaagaaagggtatcagcaatggaagatgaaatgaatgaaatgaagcgagaagggaagtttagagaaaaaagaataaaaagaaatgagcaaagcctccaagaaatatgggactatgtgaaaagaccaaatctacgtctgactggtgtacctgaaagtgacggggagaatggaaccaagttggaaaacactctgcaggatattatccaggagaacttccccaatctagcaaggcaggtcaatgttcagattcaggaaatacagagaacgccacaaagatactcctcgagaagagcaactccaagacacataattgtcagattcaccaaagttgaagtgaaggaaaaaatgttaagggcagccagagagaaaggtcgggttaccctcaaagggaagcccatcagactaacagcggatctctcggcagaaaccctacaagccagaagagagtgggggccaatattcaacattcttaaagaaaagaattttcaacccagaatttcatatccagccaaactaagcttcataagtgaaggagaaataaaacactttacagacaagcaaatgctgagagattttgtcaccaccaggcctgccctaaaagagctcctgaaggaagtgctaaacatggaaaggaacaaccagtaccagccgctgcaaaatcatgccaaaatacagatcaacgagacagaaagtcaacaaggatacccaggaattgaactcagctctgcaccaagcggacctaatagacatctacagaactctccacaccaaatcaacagaatatactttttttcagcaccacaccacacctattccaaaattgaccacatagttggaagtaaagctctcctcagcaaatgtaaaagaacagaaattataacaaactatctctcagaccacagtgcaatcaaactagaactcaggattaagaatctcaatcaaagccgctcaactacatggaaactgaacaacctgctcctgaatgactactgggtacataacgaaatgaaggcagaaataaagatgttctttgaaaccaacgagaacaaagacacaacataccagaatctctgggacgcattcaaagcagtgtgtagagggaaatttatagcactaaatgcccacaagagaaagcaggaaagatccaaaattgacaccctaacatcacaattaaaagaactagaaaagcaagagcaaacacattcaaaagctagcagaaggcaagaaataactaaaatcagagcagaactgaaggaaatagagacacaaaaaacccttcaaaaaatcaatgaatccaggagctggttttttgaaaggatcaacaaaattgatagaccgctagcaagactaataaagaaaaaaagagaggagaatcaaatagacacaataaaaaatgataaaggggatatcaccaccgatcccacagaaatacaaactaccatcagagaatactacaaacacctctatgcaaataaactagaaaatctagaagaaatggataaattccttgacacatacactctcccaagactaaaccaggaagaagttgaatctctgaatagaccaataacaggagctgaaattgtggcaataatcaatagtttaccaaccaaaaagagtccaggaccagatggattcacagctgaattctaccagaggtacaaggaggaactggtaccattccttctgaaactattccaatcaatagaaaaagagggaatcctccctaactcattttatgaggccagcatcattctgataccaaagccgggcagagacacaaccaaaaaagagaattttagaccaatatccttgatgaacattgatgcaaaaatcctcaataaaatactggcaaaccgaatccagcagcacatcaaaaagcttatccaccatgatcaagtgggcttcatccctgggatgcaaggctggttcaatatacgcaaatcaataaatgtaatccagcatataaacagagccaaagacaaaaaccacatgattatctcaatagatgcagaaaaagcctttgacaaaattcaacaacccttcatgctaaaaactctcaataaattaggtattgatgggacgtatttcaaaataataagagctatctatgacaaacccacagccaatatcatactgaatgggaaaaaactggaagcattccctttgaaaactggcacaagacagggatgccctctctcactgctcctattcaacatagtgttggaagttctggccagggcaatcaggcaggagaaggaaataaagggtattcagttaggaaaagaggaagtcaaattgtccctgtttgcagacgacatgattgtttatctagaaaaccccatcgtctcagcccaaaatctccttaagctgataagcaacttcagcaaagtctcaggatacaaaatcaatgtacaaaaatcacaagcattcttatacaccaacaacagacaaacagagagccaaatcatgagtgaactcccattcacaattgcttcaaagagaataaaatacctaggaatccaacttacaagggatgtgaaggacctcttcaaggagaactacaaaccactgctcaaggaaataaaagaggatacaaacaaatggaagaacattccatgctcatgggtaggaagaatcaatatcgtgaaaatggccatactgcccaaggtaatttacagattcaatgccatccccatcaagctaccaatgactttcttcacagaattggaaaaaactactttaaagttcatatggaaccaaaaaagagcccgcatcgccaagtcaatcctaagccaaaagaacaaagctggaggcatcacactacctgacttcaaactatactacaaggctacagtaaccaaaacagcatggtactggtaccaaaacagagatatagatcaatggaacagaatagagccctcagaaataacgccgcatacctacaactatctgatctttgacaaacctgagaaaaacaagcaatggggaaaggattccctatttaataaatggtgctgggaaaactggctagccatatgtagaaaactgaaactggatcccttccttacaccttatacaaaaatcaattcaagatggattaaagatttaaacgttagacctaaaaccataaaaaccctagaagaaaacctaggcattaccattcaggacataggcgtgggcaaggacttcatgtccaaaacaccaaaagcaatggcaacaaaagccaaaattggcaaatggtacctaattaaactaaagagcttctgcacagcaaaagaaactaccatcagagtgaacaggcaacctacaacatgggagaaaattttcgcaacgtactcatctgacaaagggctaatatccagaatctacaatgaactcaaacaaatttacaagaaaaaaacaaacaaccccatcaaaaagtgggcgaaggacatgaacagacacttctcaaaagaagacatttatgcagccaaaaaatacgtgaaaaaatgctcatcatcactggccatcagagaaatgcaaatcaaaaccactatgagataccatctcacaccagttagaatggcaatcattaaaaagtcaggaaacaacagcaaaaagaacaaagctggaggaatcatgccagctgacttcaaactatactacaaggctatgggaacaaaaacagcatgggacatggatgaaactgaaaaccatcatgctcagcaaactaacacaagaacagaaaaacaaacaccacatgttctcactcataagtgggagttgaacaatgagaacacttggatacaggaaggcgaacatcacacaccggggctggtgtgagatggtatctcattgtggttttgatttgcatttctctgatggccagtgatgatgagcattttttcatgtattttttggctgcataaatgtcttcttttgagaagtgtctgttcatgtccttcgcccactttttgatggggttgtttgtttttttcttgtaaatttgtttgagttcattgtagattctggatattagccctttgtcagatgagtaggttgcgaaaattttctcccatgttgtaggttgcctgttcactctgatggtagtttcttttgctgtgcagaagctctttagtttaattagatcccatttgtcaattttggcttttgttgccattgcttttggtgttttggacatgaagtccttgcccacgcctatgtcctgaatggtaatgcctaggttttcttctaggatttttatggttttaggtctaacgtttaaatctttaatccatcttgaattgatttttgtataaggtgtaaggaagggatccagtttcagctttctacatatggctagccagttttcccagcaccatttattaaatagggaatcctttccccgttgcttgtttttctcaggtttgtcaaagatcagataattgtaggtatgcggcgttatttctgagggctctgttctgttccattgatctatatctctgttttggtaccagtaccatgctgttttagttactgtagccttgtagtatagtttgaagtcaggtagtgtgatgcctccagctttgttcttttggcttaggattgacttggcgatgcgggctcttttttggttccatatgaaatttaaagtagttttttccaattctgtgaagaaagtcattggtagcttgatggggatggcattgaatctgtaaattaccttgggcagtatggccattttcacgatattgattcttcctacccatgagcatggaatgttcttccatttgtttgtatcctcttttatttccttgagcagtggtttgtagttctccttgaagaggtccttcacatcccttgtaaattggattcctaggtattttattctctttgaagcaattgtgaatgggagttcactcatgatttggctctctgtttgtctgttgttggtgtataagaatgcttgtgatttttgtacattgattttgtatcctgagactttgctgaagttgcttatcagcttaaggagattttgggctgagacgatggggttttctagataaacaatcatgtcgtctgcaaaaagggacaatttgacttcctcttttcctaattgaataccctttatttccttctcctgcctgattgccctggccagaacttccaacactgtgttgaataggagtggtgagagagggcatccctgtcttgtgccagttttcaaaggaatgcttccagtttttgcccattcagtatgatattggcagccttgcatcccagggatgaagcccacttgatcatggtggataagctttttgatgtgctgctggattcggtttgccagtattttattgaggatttttgcatcaatgttcatcaaggatattggtctaaaattctcttttttggttgtgtctctgcccggctttggtatcagaatgatgctggcctcataaaatgagttagggaggattccctctttttctattgattggaatagtttcagaaggaatggtaccagttcctccttgtacctctggtagaattcggctgtgaatccatctggtcctggactctttttggttggtaaactattgattattgccacaatttcagctcctgttattggtctattcagagattcaacttcttcctgctttagtcttgggagagtgtatgtgtcgaggaatttatccatttcttctagattttctggtttatttgcgtagaggtgtttatagtattctctgatggtagtttgtatttctgtgggatcggtggtgatatcccctttatcattttttattgtgtctatttgattctcctctctttttttctttattagtcttgctagcggtctatcaattttgttgatcctttcaaaaaaccagctcctggattcattgattttttgaagggttttttgtgtctctatttccttcagttctgctctgattttagttatttcttgccttctgctagcttttgaatgtgtttgctcttgcttttctagttcttttaattgtgatgttagggtgtcaattttggatctttcctgctttctcttgtgggcatttagtgctataaatttccctctacacactgctttgaatgcgtcccagagattctggtatgttgtgtctttgttctcgttggtttcaaagaacatctttatttctgccttcatttcgttatgtacccagtagtcattcaggagcaggttgttcagtttccatgtagttgagcggctttgagtgagattcttaatcctgagttctagtttgattgcactgtggtctgagagatagtttgttataatttctgttcttttacatttgctgaggagagctttacttccaactatgtggtcaattttggaataggtgtggtgtggtgctgaaaaaaatgtatattctattgatttggggtggagagttctgtagatgtctattaggtccgcttggtgcagagatgagttcaattcctgggtatccttgttgactttctgtctcattgatctgtctaatgttaacagtgaggtgttaaagtctcccattattaatgtgtgggagtctaagtctctttgtaggtcactcagaacttgctttatgaatctgggtgctcctgtattgggtgcatatatatttaggatagttagctcttcttgttgaattgatccctttaccattatgtaatggccttctttgtctcttttgatcttcccttcttgcttcatttcattcatttcatcttccattgctgataccctttcttccagttgatcgcatcggctcctgaggcttctgcattcttcacgtagttctcgagccttggttttcagctccatcagctcctttaagcacttctctgtattggttattctagttatacattcttctaaatttttttcaaagttttcaacttctttgcctttggtttgaatgtcctcccgtagctcagagtaatttgatcgtctgaaaccttcttctctcagctcgtcaaagtcattctccatccagctttgatccgttgctggtgaggaactgcgttcctttggaggaggagaggcgctctgcattttagagtttccagtttttctgttctgttttttccccat

SEQ ID NO: 132648 - DNA, 5095 bp, Homo sapiens
atggaaggtgaaatgaatgaaatgaagcgagaagggaagtttagagaaaaaagaataaaaagaaatgagcaaagcctccaagaaatatgggactatgtgaaaagaccaaatctacgtctgattggtgtacctgaaagtgatggggagaatggaaccaagttggaaaacactctgcaggatattatccaggagaacttccccaatctagcaaggcaggccaacgttcagattcaggaaatacagagaacgccacaaagatactcctcgagaagagcaactccaagacacataattgtcagattcaccaaagttgaaatgaaggaaaaaatgttaagggcagccagagagaaagacagatcaacgagacagaaagtcaacaaggatacccaggaattgaactcagctctgcaccaagcggacctaatagacatctacagaactctccacctcaaatcaacagaatatacatttttttcagcaccacaccacacttattccaaaattgaccacatacttggaagtaaagctctcctcagcaaatgtaaaagaacagaaattataacaaactatctctcagaccacagtgcaatcaaactggaactcaggattaagaatctcactcaaaaccgctcaactacatggaaactgaacaacctgctcctgaatgactactgggtacataacaaaatgaaggcagaaataaaaatgttctttgaaaccaacgagaacaaagacacaacataccagaatctctgggacacattcaaagcagtgtgtagagggaaatttatagcactaaatgcccacaagagaaagcaggaaagatccaaaattgacaccctaacatcacaattaaaagaactagaaaagcaagagcaaacacattcaaaagctagcagaaggcaagaaataactaaaatcagagcagaactgaaggaaatagagacacaaaaaacccttcaaaaaattaatgaatccaggagctggttttttgaaaggatcaacaaaattgatagaccgctagcaagactaataaagaaaaaaagagagaagaatctaatagacgcaataaaaaatgataaaggggatatcaccaccgatcccacagaaatacaaactaccatcaggagaatactacaaacacctctacgcaaataaactagaaaatctagaagaaatggataaattcctcgacacatacactctcccaagactaaaccaggaagaagttgaatctctgaatagaccaataacaggctctgaaattgtggcaataatcaatagtttaccaaccaaaaagagtccaggaccagatggattcacagccgaattctaccagaggtacaaggaggaactggtaccattccttctgaaactattccaatcaatagaaaaagagggaatcctccctaactcatgttatgaggccagcatcattctgataccaaagccaggcagagacacaacaaaaaaagagaattttagaccaatatccttgatgaacattgatgcaaaaatcctcaataaaatactggcaaaacgaatccagcagcacatcaaaaagcttatccaccatgatcaagtgggcttcatccctgggatgcaaggctggttcaatatacgcaaatcaataaatgtaatccagcatataaacagagccaaagacaaaaaccacatgattatctcaatagatgcagaaaaagcctttgacaaaattcaacaacccttcatgctaaaaactctcaataaattagaattggaagaaactactgtaaagttcatatggaaccaaaaaagagcccacatcgccaagtcaatcctaagccaaaagaacaaagctggaggcatcacactacgtgacttcaaactatactacaaggctacagtaaccaaaacagcatggtactggtaccaaaacagagatatagatcaatggaacagaacagagccctcagaaataacgctgcatatctacaactatctgatctttgacaaacctgagaaaaacaagcaatggggaacggattccctatttaataaatggtgctgggaaaactggctagccatatgtagaaagctgaaactggatcccttccttacaccttatacaaaaatcaattcaagatggattaaagacttaaacgttagacctaaaaccataaaaaccctagaagaaaacctaggcattaccattcaggacataggcatgggcaaggacttcatgtctaaaacaccaaaagcaatggcaacaaaagccaaaattgacaaatgggatctaattaaactaaagagcttctgcacagcaaaagaaactaccatcagagtgaacaggcaacctacaaaatgggagaaaattttcacaacctactcatctgacaaagggctaatatccagaatctacaatgaactcaaacaaatttacaagaaaaaaacaaacaaccccatcaaaaagtgggcaaaggacatgaacagacacttctcagaagaagacatttatgcagccaaaaaacacatgaaaaaatgctcatcatcactggccatcagagaaatgcaaatcaaaaccacaatgagataccatctcacaccagttagaatggcaatcattaaaaagtcaggaaacaacaggtgctggagaggatgtggagaaataggaacacttttacactgttggtgggactgtaaactggttcaaccattgtggaagtcagtgtggcaattactcagggatctagaactagaaataccatttgacccagccatcccattactgggtatatacccaaatgactataaatcatgctgctataaagacacatgcacacgtatgtttattgcggtattattcacaatagcaaagacttggaaccaagccaaatgtccaacaatgatagactggattcagaaaatgtggcacatatacaccatggaatactatgcagccataaaaaaggatgagttcatgtcctttgtagggacatggatgaaattggaaatcatcattctcagtaaactatcgcaagaacaaaaaaccaagcaccgcatattctcactcatagaaataaaaactaccataagagaatactataaacacttctacacaaataaactagaaaatctagaagaaattgataaattcctggaaacatacaccctcctaagtctaaaccaggaggaagtcgaatctctgaatagaccaataacaagtagtgaaattgaggaagtaattaatagcttaccaaccaaaaaagtccaggaccagacaaagtcacaaccagattctatcagagaccacagtacaattaaactacaactcaggattaagaatctcactcaaaactgctcaactacatggaaactgaacaacctgctcctgaatgactactgggtacataacgaaatgaaggcagaaataaagatgttctttgaaaccgacgagaacaaagacacaacataccagaatctctggaacacattcaaagcagtgtgtagagggaaatttataccactaaatgcccacaagagaaagcaggaaagatccaaaattgacaccctaacatcacaattaaaagaactagaaaagcaagagcaaacacattcaaaagctagcagaaggcaagaaataactaaaatcagagcagaactgaaggaaatagagacacaaaaaacccttcaaaaaattaatgaatccaggagctggttttttgaaaggatcaacaaaattgatagaccgctagcaagactaacaaagaaaaaaagagagaagaatctaatagacgcaataaaaaatgacaaaggggatgtcatcaccgatcccacagaaatacaaactaccatcagagaatactacaaacacctctatgcaaacaaactagaaaatctagaagaaatggataaattcctcgacacataccctctcccaagactaaaccaggaagaagttgaatctctgaatagaccaataacaggatctgaaattgtggcaataatcaatagcttaccaaccaaaaagagtccaggaccagatggattcacagccgaattctaccagaggtacaacgaggaactggtaccattccttctgaaactattccaatcagtagaaaaagagggaatcctccctaactcattttatgaggccagcatcattctgatacccaagccgggcagagacacaaccaaaaaagagaattttagaccaatatccttgatgaacattgatgcaaaaatcctcaataaaatactggcaaaccgaatccagcagcacatcaaaaagcttatccaccatgatcaagtgggcttcatccctgggatgcaaggctggttcaatagacacaaatcaataaatgtaatccagcatataaacagagccaaagacaaaaaccacatgattatctcaatagatgcagaaaaggcctttgacaaaattcaacaacctttcgtgctaaaaactcccaataaattaggtattgatgggacgtatttcaaaataataagagctatctatgacaaacccacagctaatatcatactgaatgggcaaaaactggaagcattccctttgaaaactggcacaagacagggataccctctctcaccactcctattcaacatagtgttgcaagttctggccaaggcaattaggcaggagaaggaaataaagggtattcaattaggaaaagaggaagtcaaattgtccccgtttgcagacgacatgattgtatatctagaaaaccccattgtctcagcccaaaatctccttaagctaataagcaacttcagcaaagtctcaggatacaaaatcaatgtacaaaaatcacaaacattcttatacatcagcaacagacaaacaatgagccaaatcatgagtgaactctcattcacaattgcttcaaagagaataaaatacctaggaatccaacttacaagggatgtgaaggacctcttcaaggagaactacaaaccactgctcaaggaaataaaagaggatacaaacaaatggaagaacattccatgctcatgggtaggaagaatcaatatcgtgaaaatggccatactgcccaaggtaatttacagattcaatgccatccccatctag

SEQ ID NO: 132649 - DNA, 2660 bp, Homo sapiens
ctaatgaacattgatgcaaaaatcctcaataaaatactggcaaaccaaatccagcagcacatcaaaaagcttatccactatgatcaagtcagcttcatccccaggatgaagcctgacaaaaataagcaatgaggaaaggatagcatgttgatcactacaggtcgacgaacatgggcttagatcaagctctccacggcaagaccgcgggacgataatgacgaaatgctgagcgtaacaagacgaagcgatagccatgacctggcggacatgcgctgctgacgacgctgatgcggagataagatcgatcgacccgacgggcacagtcgacagggaggacgagaaagcacactgtgagacgagcaagtggtagtgattgtcctcgatggaggcggagcatgtacgatgatcgacagcgtagccaatggatgcgaagtgcggacggcaattgaggctggaagcatcgacgagaatcgatgatctccgatacctggacttggaagctttcttaactgctgcttctctctgaggtgtcagactctgggaccacagatttcttgctatagcattgtcccatctcaagccagacccactgggatcccctgtccctgcaactgctgctccatcttccctgttgcttgtccaaagacaccagctactttctcccagccagttgctgtatctctccctggatgcatttgtagacccaggtgaacctgtatccgcttcactttctgctctgacaggaagtacaggtaggatccctgcagtccacagctcagaatcattcctggattttggtctgtatgtcctggactcacccaatctagtcacacggctcatcctgggaaagttcactatgttttcattgtgatgaacgcgaggtgactgtgcccatgtctgagagtctaggtgagtgtgtctgtgctgtttcaccatagtatattgatgtgtgagaagcagagaacctggatttctattttcataggtctctatagtaagagaatccatataaggagctgaactttggaactcaccctgagaaatctcatccgtaccgggatctgacttagttgatgagatcctggactttgagctgatagctataatgacatgagactttggggactcttcctttcttctgttgtggagtagtagactgatttcatcttgatagtctgggtcagtcatcccaactaacactgtaactcccttcttagcctgttgacttaaatgtaggaggagcccaaactgtccaggtggcaatcttaacttccagtttaatggaatcattgttgcatctcctggtggcagcattcctccctctggaactaagactgctaggccagcagaacataatgtcgtgggaacaggaagcaaaaattttgctagtggatcactaggggtgatggtgggtggtgccacttccaccccttgattcctggacctgtgaatcctagcagtgaattccatgagcacgagcccattttgcacttctttaggcaaaaagcgagtgccttgatcagaggcaatgctggatggaataccatgatggtggataaggcattctttgagtccatggatggtagtcttggaaaaagtgttgcgtgcaggataggcaaacccatatccagagtaagtgtctattccagtaaggtcaaacgtctgccctttccatgatagaggaggtccgatataatcaaccaataagtccagtgtgtttgctacttcttgctcaccagatccaatcagcataatgtcatcaatgtaatggaccagtgtgatatcttgtgaaagcaaaaagcaatcaagatctttccaaataagattatgatgcaaagctggaaagttgatatgcccctgaggtaggactgtaaaggtatattgctggccttgccagttgaagtcaaattgcttcttatgggccttatggatagagatggagaaaaaggcacttgccaagccagtggctgcataccaggtaccaggagatgtgttaatttgctcaagcaatgaaaccccacatctggtacaacagctgcaattggagtcaccacttggttaagcttacaataatccactgtcattctccaagatccatctgtcttctgacctctataagctcctactttaactggaggaccacagtgacattttgggtcccctggaatcaacgtcagctcagagccagtgtccagtagtccccaaagtgtctgatcatttcccttttcccaatgcacagttaccctggtaaaaggccagaggtctccctggcgaggctgtgcatgcatcttctgttgcaggtcagccactagcatgataagagcttgtgtctgtttgtccacaatttcagttctttttctacaggagataagcctctcagtcagggcaatcctagcagatttgaggttcaatatctgcttctgaagctgggagacagaatccttgagttcataattttctttcatcactttttccactgaatttaggggcaaccaaccagctttattatgttccttggttctccacatatggtcaaaggtattatgtgtagagtcactaaactccttgcctctcatgagcaatgaatcaagtgtgtcaaatgcatttattttggataactccctaaacagctcatgccaaggactatcagtgttctccat

SEQ ID NO: 132650 - DNA, 13234 bp, Homo sapiens
atggggaaaaaacagagcagaaaaactggaaactctaaaaagcagagcacctctcctcctccaaaggatcgcagttcctcaccagcaatggaacaaaggtggacagagaatgactttgacgagttgagagaagaaggcttcagacgatcaaactacgagctacaggaggaaattcaaaccaaaggcaaagaagttaaaaactttgaaaaaaatttagatgaatgtataactagaataaccaatagagagaagtgcttaaaggagctgatgaagctgaaagccaagcctcgagaactatgtgaagaatgcagaagcctcaggagccaatgcgatcaagtggaagagagggtatcagtgatggaaaatgaaatgaatgaaatgaagcgagaaaggaagtttagagaaaaaagaataaaaagaaacgaacaaagactccaagaaatatgggactatgtgaaaagaccaaatctacgtctgattggtgtacctaaaagtgatggggagaatggaaccaagttggaaaacactctgcaggatattatccaagagaacttccccaatctagcaaggcaggccaacattcagattcaggaaatacagagaacgccacaaagatactcctcgagaagagcaactccaagacacataattgtcagattcaccaaagttaaaatgaaggaaaaaatgttaagagcagccagagagaaagactttaaaccaacaacgatcaaaagagacaaagaaggccattacataatggtaaagggatcaattcaacaagaagaactaactatcctaaatatatatgcacccaatacaggagcacccagattcataaagcaagtcctgagtgacctacaaagagacttagactcccacacattaataatgggagactttaacaccccactgtcaacattagacagatcaacgagacagaaagtcaacaaggatacccaggaattgaactcagctctgcaccaagcagacctaatagacatctacagaactctccaccccaaatcaacagaatatacatttttttcagcaccacaccacacctattccaaaattgaccacatacttggaagtaaagctctcctcagcaaatgtaaaagaacagaaattataacaaactatctctcagaccacagtgcaatcaaaccagaactcaggattaagaaactcactcaaaactgctcaactacatggaaactgaacaacctgctcctgaatagtcattcaggatacataacgaaatgaaggcagaaataaagatgttctttgaaaccaacgagaacaaagacacaacataccagaatctctgggacgcattccaagcagtgtgtagagggaaatttatagcactaaatgcccacaagagaaagcaggaaaagatccaaaattgacactctaacatcacaattaaaagaactagaaaagcaagagcaaacacattcaaaagctagcagaaggcaagaaataactgaaaatccgagcagaactgaaggaaattggggacacaaaaaaaccccttcaaaaaattaatgaatcccaggagctgggttttttgaaaggatcaacaaaattgatagaccgcttagcaaggacttaataaagaaaaaaagagagaagaaatcaaatagacacaataaaaaaatgataaagggaatatcaccaccaccgatcccacaggaaatacaaactacccatccagagattactacaaacacctctacgcaaataaactagaaaatctagaagaaatggataaattccttgacacatacgctctcccaagactaaaccaggaagaagttgaatctctgaatagaccaataacagggctctgaaattgtggcagtaatcaatagcttaccaacccaaaaaaagtccaggaccagatggattcacagccgaattccaccagaggtacaaggaggagctggtaccattccttctgaaactattccaatcaatagaaaaagagggaatcctccctaactcattctatgaggccagcatcatcctgataccaaagctgggcagagacacaaccaaaaaagagaattttagaccaatatccttgatgaacattgatgcaaaaatcctcaataaaatactggcaaaacgaatccagcagcacatcaaaaaagcttattcaccatgatcaagtgggcttcatccctgggatgcaaggctggtccactatacacaaatcaataaatgtaatccagcacataaacagaaccaaagataaaaaacacatgattatctcaatagatgcagaaaaggcatttgacaaaattcaacaacccttcatgctaaaaactctcaataaattaggtattgatgggacgtatctcaaaataataagcgctatctatgacaaacccacagccaatatcatactgaatgggcaaaaactggaagcactccctttgaaaactggcacaagacagggatgccctctttcaccacatactaccattaacatagtattctgccccatagtgttctggccagggcaatcaggcaagagaaggaaataaagggtattcaattaggaaaagaggaagtcaaattgtccctgtttgcagacgacatgattgtatatctagaaaaccccattgtctcagtccaaaatctccataagctgataagcaacttcagcaaagtctcaggatacaaaatcaatgtgcaaaaatcacaagcattcttatacaccaataacagagaaacagagaaccaaatcatgagtgaactcccattcacaattgcttcaaagagaataaaatacctaggaatccaccttacaagggacgtgaaggacctcttcaaggagaactacaaaccactgctcaatgaaattaaagaggatacaaacaaatggaagaacattccatgctcatgggtaggaagaatcaatattgtgaaaatggccatactgcccaaggtaatttatagattcaatgccatccccatcaagctaccaatgactttcttcacagaattggaaaaaaactactttaaagttcatatggaaccaaaaaagagcccacatcgccaagtcaatcctaagccaaaagaacaaagctggaggcatcatgctacctgacttcaaactataccacaaggctacagtaaccaaaacagcatggcactggtaccaaaacagcatggtactggtaccaaaacagagatatagatcaatggaacagaacagagccctcagaaataatgccgcatatctacaactatctgatctttgacaaacctttgcttgagaaaaacaagcaatggggaaaggattccctatttaataaatggtgctgggaaaactggctagccatatgtagaaagctgaaactggatcccttccttacaccttatacaaaaatcaattcaagatggattaaagatttaaacgttagacctaaaaccataaaaaccctagaagaaaacctaggcattaccattcaggacataggcgtgggcaaggacttcatgtccgaaacaccaaaagcaatggcaacaaaagccaaaattgacaaatgggatctaattaaactaaagagtttctgcacagcaaaagaaactaccatcagagtgaacaggcaacctacaacatgggagaaaattttcgcaacctactcatctgacaaagggctaatatccagaatctacaatgaactcaaacaaatttacaagaaaaaaaaaaaaacaaccccatcaaaaagtgggcaaaggacatgaacagacacttctcaaaagaagacatttatgcagccaaaaaacacatgaagaaatgctcatcatcactggccatcagagaaatgcaaatcaaaaccactatgagatatcatctcacaccagttagaatggcaatcattaaaaagtcaggaaacaacaggaaacatgagtctgtgatgaaagatataagtgaatccaaattcaagtttaattttggaaaccatatgagcacctgggggaaggggaggtttttggcagagcttcagcaggctgaaacatccctgcctgatggctctgaagagaacagagatctcccagcacagcatttgagctctgataagggacagactgcctccttaagtgggtccctgacccctgacccccgagcagcctaactgggaggcaccccccagcaggggcacactgacacctcacacggcagggtattccaacagacctgcagctgagggtcctgtctgttagaaggaaaactaacaaacagaaaggacatccacaccgaaaacgcatctgtacatcaccatcatcaaagaccaaaagtagataaaaccacaaagatggggaaaaaacagaacagaaaaactggaaactctaaaacgcagagcacctctcctcctccaaaggaacgcagttcctcaccagcaacggaccaaagctggatggagaatgattttgacgagctgagagaagaaggcttcagacgctcaaattactctgagctacgggaggacattcaaaccaaaggcaaagaagttgaaaactttgaaaaaaatttagaagaatgtataactagaataaccaatacagagaagtgcttaaaggagctgatggagctgaaaaccaaggctcgagaactacgtgaagaatgcagaagcctcaggagccaatgcgatcaactggaagaaagggtatcagcaatggaagatgaaatgaatgaaatgaagcaagaagggaagtttagagaaaaaagaataaaaagaaacgagcaaagcctccaagaaatatgggactatgtgaaaagaccaaatctacgtctgattggtgtacctgaaagtgatgcggagaatggaaccaagttggaaaacactctgcaggatattatccaggagactttccccaatctagcaaggcaggccaacgttcagattcaggaaatacagagaacgccacaaagatactcctcgagaagagcaactccaagacacataattgtcagattcaccaaagttgaaatgaaggaaaaaatgttaagggcagccagagagaaaggtcgagttaccctcaaagggaagcccatcagactaacagcggatctctcggcagaaaccctacaagccagaagagagtgggggccaatattgaacattcttaaagaaaagaattttcaacccagaatttcatatccagccaaactaagcttcataagtgaaggagaaataaaatactttacagacaagcaaatgctgaccgattttgtcaccagcaggcctgccctaaaagagctcctgaaggaagcgctaaacatggaaaggaacaaccggtaccagccactgcaaaatcatgccaaaatgtaaagaccatcgagactaggaagaaactgcatcaactaacgagcaaaatcaccagctaacatcataatgacaggatcaaattcacacataacaatattaactttaaatgtaaatggactaaattctccaattaaaagacacagactggcaagttggataaagagtcaagacccatcagtgtgctgtattcaggaaacccatctcatgtgcagagacacacataggctcaaaataaaaggatggaggaagatctaccaagcaaatggaaaacaaaaaaaaggcaggggttgcaatcctagtctctgataaaacagactttaaaccaacaaagatcaaaagagacaaagaaggccactgcataaaggtaaagggatcaattcaacaagaggagctaactatcctaaatatttatgcacccaatacaggagcaccaagattcataaagcaagtcctgagtgacctacaaagagacttagactcccacacattaataatgggagactttaacaccccactgtcaacattagacagatcaacgagacagaaagtcaacacggatacccaggaattgaactcagctctgcaccaagcggacctaatagacatctacagaactctccaccccaaatcaacagaatatacatttttttcagcaccacaccacacctattccaaaattgaccacatagttggaagtaaagctctcctcagcaaatgtaaaagaacagaaattataacaaaccatctctcagaccacagtgcaatcaaactagaactcaggattaagaatctcactcaaagccgctcaactacatggaaactgaacaacctgctcctgaatgactacttgggtacataacgaaatgaaggcagaaataaagatgttctttgaaaccaacgagaacaaagacacgacataccagaatctctgggacgcattcaaagcagtgtgtagagggaaatttctagcactaaatgcccacaagagaaagcaggaaagatccaaaattgacacccctaacatcacaattaaaagaactagaaaagcaagagcaaacacattcaaaagctagcagaaggcaagaaataacttaaaatcagagcagaactgaaggaaatagagacaaaaaaaaacacttcaaaaaattaatgaatccaggagctggtttttttgaaaggatcaacaaaattgatagaccgctagcaagactaacaaagagaaaaagagagaagaatcaaatacacgcaataaaaaatgataaaggggatatcaccaccgatcccacagaaatacaaactaccatcagagaatactacaaacacctctatgcaaataaactagaaaatctagaagaaatggataaattcctcaacacatacactctcccaagactaaaccaggaagaagttgaatctctgaatagaccaaataacagggatctgcaattgtggcaataatcaatagtttaccaaccaaaaagagtccaggaccagatggattcacagccgaattccaccagaggtacaaggaggaactggtaccattccttctgaaactattccaatcaatagaaaaagaaggaatcctccctaactcattttatgaggccagcatcattctgataccaaagccgggcagagacacaaccaaaaaagagaattttagaccaatatccttgatgaacattgatgcaaaattcctcaataaaatactggcaaacccgaatccagcagcaccatcaaaaagcttatccaccatgatcaaatgggcttcatccctggggatgcaaggctcctttcaatatacacaaatcaataaatgtaatccagcatataaacaagagccaaagacaaaaaccacatggttatcttcaataggatgcaggaaaagggccttttgacaaaattcaacaacccttcatgctaaaaactatcaataaaataggtattgatgggatgtatttcaaaataataagagctatctatgacaaaaccacagccaatatcatactgaatgggcaaaaactggaagcattccctttgaaaaccggcacaagacagggatgccctctctcacctcaccactcctattcaacatagtgttggaagttctggccagggcaatgaggcaggagaaggaaataaagggtattcaattaggaaaagaggaagtcaaattgtccctgtttgcagacgacatgattgtatatctagaaaaccccattgtctcagcccaaaatctccttaagctgataagcaacttcagcaaagtctcaggatacaaaatcaatgtacaaaaatcacaagcattcttatacaccaacaacagacaaacagagagccaaatcatgagtgaactcccattcacaattgcttcaaagagaataaaatacctaggaatccaacttacaagggatgtgaaggacctcttcaaggagaactacaaaccactgctcaaggaaataaaagaggacacaaacaaatggaagaacattccatgctcatgggtaggaagaatcaatatcgtgaaaatggccatactgcccaaggtaatttatagattcaatgccacccccatcaagctaccaatgactttcttcacagaattggaaaaaactactttaaagttcatatggaaccaaaaaaagagcccgtattgccaagtcaatcctaagccaaaagaacaaagctggaggcatcacactacctgacttcaaactatactacaaggctacagtaaccaaaacagcatggtactggtaccaaaacagagatatagatcaatggaacagaacagagccctcagaaataacgccgcatatctacaactatctgatctttgacaaacctgagaaaaacaagcaatggggaaaggattccctatttaataaatggtgctgggaaaactggctagccatatgtagaaagctgaaactggatcccttccttacaccttatacaaaaatcaattcaagatggattaaaaaaaaagatttaaacgttagacctaaaaccataaaaaccctagaagaaaacctaggcattaccattcaggacataggcgtgggcaaggacttcatgtccaaaacaccaaaagcaatggcaacaaaagccaaaattgacaaatgggatctaattaaactaaagagcttctgcacagcaaaagaaactaccatcagagtgaacaggcaacctacaaaatgggagaaaattttcgcaacctactcatctgacaaagggctaatatccagaatctacaatgaactcaaacaaatttacaagaaaaaaaacaaacaaccccatcaaaaagtgggcgaaggacatgaacagacacttctcaaaagaagacatttatgcagccgaaaaaacacatgaaaaaaatgctcatcatcactggccatcagagaaatgcaaatcaaaaccactatgagatatcatctcacaccagttagaatggcaatcatgaaaaaagtcaggaaacaacaggcttatgagggtgcacggaaagaagagattcctgtggcagaaacaaggggtgtgtgaggtggaaatacaggcgcaacgcgagtcggcccgcgatggaacggacagggaggacgcggaaagtccgcacgctgaagtcacagtgcccaggggcacgcgcactgaaattttaaccttgtgggcctcaagggatcgtcctgcgtcagcgtgtggagtaactgtcccaaaaggcagcactacccacccaggtggcatggacagggtctgtggtgtggacactgctgtgctccactggatgaaacaggttcagggaattagcaatctggaagtggagacaggacccagacgcagggacatggatgaagctggaagccgtcactctcagcaaactaacataggaacagaaaaccaaacaccgcatgttctcactcataagtggcagctgaacagaaactctgcctgtgacaagctgcacaagcctcactcagtgcctggcggggttgcagctggagacgtgggaggaaaaacaatttctaatcctggtgtttgtgcaatagagtatcaggtggacggttcacctcacatttgggaagatgtgaacaaaggtgtctacattgaagaggacagagctcctctcatggaacgcagttcctcaccagcaatggaacaaagctggatggagaatgactttgacgagctgagagaagaaggcttcagacgatcaaattactctgagctacgggaggacattcaaaccaaaggcaaagaagttgaaaactttgaaaaaagttcagaagaatatataactagaatagccaatacacagaagtgcttaaaggagctgatggagctgaaaaccaaggctccagaactacgtgaagaatgcagaagcctcaggagccaatgcgatcaactggaagaaagggcatcagtgatagacacacatagtctcaaaataaaaggatggaggaagatctaccaagcaaatggaaaacaaaaaaaggcaggggttgcaatcctagtctctgataaaacagactttaaaccaacaaagatcaaaagagacaaagaaggccattacataatggtaaagggatcaaatcaacaagaagagctaactatcctaaataaatatgcacccaatacaggagcacccagattcataaagcaagtcctgagtgacctacaaagagacttagactcccatacattaataatgggagactttaacaccccactgtcaacattagacagatcaacaagacagaaagtcaacaaggatacccaggaattgaactcagctctgcaccaagcggacctaatagacatctacagaactctccaccccaaatcaacagaatatacatttttttcagcaccacaccacacctatttcaaaactgaccacatagttggaagtaaagttctcctcagcaaatgtaaaagaacagaaattataacaaactgtctctcagaccacagtgcaatcaaactagaactcaggattaagaaactcactcaaaaccactcaactacatggaaactgaacaacttgctcctgaatgactactgcgtacataacgaaatgaaggcagaaataaagatgttttttgaaaccaacgagaacaaagacacaacataccagaatctctgggacgcattcaaagcagtgtgtagagggaaatttatagcactaaatgcccacaagagaaagcaggaaagatccaaaattgacaccctaacatcacaattaaaaaaactagaaaagcaagagcaaacacattcaaaagctagcagaaggcaagaaataactaaaatcagagcagaactgaaggaaatagagacacaaaaaacccttcaaaaaattaatgaatccaggagctggttttttgaaaggatcagcaaaactgataaaccgctagcaagactaataaagaagaaaagagagaagaatcaaatagatgcaataaaaaatgataaaggggatatcaccaccgatcccacagaaatacaaactaccatcagagaatactacaaacacctctacgccaaataaacttgaaaatctagaaggaatggataaattcctcgacacatacactctcccaagactaaaccaggaagaagttgaatctctgaatagaccaataacaggagctgaaattgtggcaataatcaatagcttaccaaccaaaaagagtccaggaccagatggattcacagccgaattctaccacaggtacaaggaggaactggtaccattccttctgaaactattccaatcaatagaaaaagagggaatcctccctaactcattttatgaggccagcatcatcctgataccaaagccaggcagagacacaacaaaaaaagagaattttagaccaatatccttgatgaacattgatggaaaaatcctcaataaaatactggcaaaccgaatccagcagcacatcaaaaagcttatccaccatgatcaagtgggcttcatccctgggatacaaggctggttcaatatacgcaaatcaatcaatgtaatccagcatataaacagaaccaaagacaaacaccacatgattatctcaatagatgcagaaaaggcctttgacaaaattcaacagcccttcatgctaaaaactctcaataaattaggtattgatgggacgtatctcaaaataataagagctatctatgacaaacccacagccaatatcatactgaatgggcaaaaactggaagcattccctttgaaaactggcacaagacagggatgccctctctcaccactcctattcaacatagtgttggaagttctggccagggcaattaggcaggagaaggaaataaagggtattcaattaggaaaagaggaagtcaaattgtccctgtttgcagacgacatgattgtatatctagaaaaccccattgtctcagcccaaaatctccttaagctgataagcaacttcagcaaagtctcaggatacaaaatcaatgtacaaaaatcacaagcattcttatacaccaacaacagacaaacagagagccaaatcatgagtgaactcccattcacaattgcttcaaagagaataaaatacctaggaatccaacttacaagggatgtgaaggacctcttcaaggagaactacaaaccactgctcaaggaaataaaagaggatacaaacaaatggaagaacatgccatgctcatgggtaggaagaatcaatatcgtgaaaatggccatactgcccaaggtaatttacagattcaatgccatccccatcaagctaccaatggctttcttcacagaattggaaaaaactactttaaagttcatatggaaccaaaaaagagcccgcatcgccaagtcaatcctaagtcaaaagaacaaagctggaggcatcacactacctaacttcgaactatactacaaggctacagtaaccaaaacagcatggtactggtaccaaaacagatatatagaccaatggaacagaacagagccctcagaaataacaccgcatatctacaactatctgatctttgacaaacctgggaaaaacaagcaatggggaaaggattccctatttaataaatggtgctgggaaaactggctagccatatgtagaaagctgcaactggatcccttccttacaccttatacaaaaatcaattcaagatggattaaagacttaaacgttagacctaaaaccataaaaaccctagaagaagacctaggcattaccattcaggacataggcatgggcaaggacttcatgtctaaaacaccaaaagcaatggcaacaaaagacaaaattgacaaatgggatctaattaaactcaagagcttctgcacagcaaaagaaaccaccatcagagtgaacaggcaacctacaaaatgggagaaaattttcgcaacctactcatttgacaaagggctaatatccagaatctacaatgaactccaacaaatttacaagaaaaaaacaaacaaccccatcaaaaagtgggcgaaggacatgaacagacacttctcaaaagaagacatttatgcagccaaaaaacacatgaaaaaatactcatcatcactggccattagagaaatgcaaatcaaaaccacaatgagataccatctcacacccgttagaatggcaaccattaaaaactcaggaaacaacaggtcattgtgtttttataaggaaaacctaagcctttgtctggcgatccttctctctgttcctgtgcaagaaggaggggccagaagttttctggccccagcaggaggcgtggcaggccgagcaacaagtcactatggcggacacatggcgactgcagagaggctgtcagtggagctatctgggcaagccctgaaggaattccaaaagggccctttatctccaaaacagtttaag

SEQ ID NO: 132651 - DNA, 312 bp, Homo sapiens
atgcaggaccccaacgcagacactgagtggaatgacatcttaacgcaaaaagggtatcttaccccccaaggaaagtctgaaagaattggaagaggaggcagaagaggagcagcgcatcctccagcagaatctgccccgatatttgtttacctggaaggagatatcaaggctcagtttattggtcctctggtgtttggtggcatgaacctgacaagagatgagttggaatggaaactgtctgaatctggagcaattatgatggacctggaggaaaaccctaagaagccgattgaagatgtattgctgtcatca

SEQ ID NO: 132652 - DNA, 1201 bp, Homo sapiens
aagaggcgtggcggcgctgtgcgcgtgcacaaaagagagctgaggggcgggggcgctgcggcacagctggttttgagcaactgaactggaaacaagatgcatgtttcccaacgcatacactgaatgggaatgacatcttaacgcaaaaagggtatcttaccccccaaggaaagtctgaaagaattggaagaggaggcagaagaggagcagcgcatcctccagcagtcagtggtgaaaacatatgaagatatgactttggaagagctggaggatcatgaagacgagtttaatgaggaggatgaatgtgctattgaaatgtgcagacagcagagactggctgagtggaaagcaactaaactgaagaataaattcggagaagttttggagatctcagggaaggattatgttcaagaagttaccaaagctggcgaagggctttgtgggtcatctttgcacctttacaaacaaggaattcccctctgtgccctggataaatcagcacctcagttggactttgccaggaagtttccctgatgtcaaatttatcaaagccatttcaacaacctgcatacccaattatactgataggaatctgccccacgatattggtttaccctggaaggagatatcaagggctcagtttattggtcctctggtgtttggccggcatgaaccctgaccaagagatgagttgggaatggaaactgtctgaatctggagcaattatgacagacctggaggaaaaccctaagaagccgattgaagacgtgttgcttgtcctcagtgcggcgctctggtcctcatgaagaggggacagcgattccgagggtgacttgagggctacagcttctatcacatgccgaactttcttgtgacaaattgtctggatttctttaagaaaaggaaaagcaagaatgaatccttctggtttttagttttgtataaattatgtttcaaatctttacattttagaaataataattgctggaaattctgttaaatattttggaactcttttttttttttaaattatagtatttcctctaaaaaaaattaaaaccgagccatttgtatggcaaatgtctgttttcctcatttatattttaagtaagccataaaacctagtcactattttttgacatataactataaaaagaaatacagttttaaatgtgaataaattatacagtggaaaattgca

SEQ ID NO: 132653 - DNA, 2313 bp, Homo sapiens
atggggtttcgccatgttggccaggctggtctcaaactcctgacctcagatcctaaggagattgttttcaaatttatggtgaaatttttcccagtggaccctggacatctgcgggaagaacttacaaggccccgatcgaaaagcctgggagggccgccgaactacccccggagggaggagccagtccgaacccaaggcgccaccgccgcagaagcggagcgaggcagcattcgcctccatggcccactcgccggtggctgtccaagtgaatgggatgcaggtgaggaagcgcacgccgcccccgccgcccacgtgactgcttgggagcccggtgcgccctcggtgctgggcaccggcgacaagggacggccccagggctcccctgagggcagggccggtcactatggccagcttcacaacatcacaaatactccaggattaacaggcactcagcttcaagtaaagttcgtgctgatattttacatatttattactcaagtccttgccatctttctggctatcaaaggaataaaaccgcttggggaggttactgggttaaatgaagtaaaggcaagttgttctgccacagaaagtgaacaaggacaattagtgttgaaacatgtgggagtgaggcaggaaaattgctgttgtagtcagaggtgtagtcaagatctgataaaaactgcagtgcctggtgatgactactccttgatgtccgtcatccactccccagtcacactaacccaggtgacccagaggaaagtggtcttctcttcagcactaggagtgaatcttgattacctaagccagtcaaggttatcgctaatgctggtaagggcgatcggtgcgtgcctcttcggttattaccccagctggagaatggagggatgtgctgctaggcgatcaggttgggcatcgtcaggtatttcacggtctcgacgttgtaaagagacggccagtgccaagcttgcatgccagcagtggctccaagtagcgaagcgagcaggactgggcggcggccaaagcggtcggacagtgctccgagaacgggtgcgcatagaaattgcatcaacgcatatagcgctagctgtggaatgtgtgtcagttagggtgtggaaagtccccaggctccccagcaggcagaagtatgcaaagcatgcatctcaattagtcagcaaccagaaatcggaggaagaagaatatatgaaaacatttaacatttctcaacaagatctagaattagtagaagtagcgacagagaagattacaatgctttatgaggataataaacatcatgtgggagcggcaattcgtacgaaaacaggagaaatcatttcggcagtacatattgaagcgtatataggacgagtaactgtttgtgcagaagccattgcgattggtagtgcagtttcgaatggacaaaaggattttgacacgattgtagctgttagacacccttattctgacgaagtagatagaagtattcgagtgattccaacctatggaactgatgaatgggagcagtggtggaatgcctttaatgaggaaaacctgttttgctcagaagaaatgccatctagtgatgatgaggctactgctgactctcaacattctactcctccaaaaaagaagagaaagggaatgacaatggataaaagtgagctggtacagaaagccaaactcgctgagcaggctgagcgatatgatgatatggctgcagccatgaaggcagtcacagaacaggggcatgaactctccaacgaagagagaaatctgctctctgttgcctacaagaatgtgaaaacagagaggaatgagaagaagcagcagatgggcaaagagtaccgtgagaagatagaggcagaactgcaggacatctgcaatgatgttctgtactctcccccttttccaatggatgtggcttcctgtgagcagactgctgtgattgttgtgtctcttctggggtctagctgctcagcgagtctacctggctctgggctggtactgggggttgtctgcacagagtcctgtgatgtgaaccatctatgggtctctcagccagcaataccagcgcctgtttcagtggcgatatcggagggtgcaatggactctgtgaaggtccttagctttggtggtttaatgttctttgtgctgattggcctcttgccaggaggtggagctttccagaaagcatcagctgtagtagtgtggagaggaattggtggtgggcagggtcctagaactcccttgtcttccactaccagggtggataggaaaggaccaccaggtgggggtggggctaggagtgtctga

SEQ ID NO: 132654 - DNA, 1761 bp, Homo sapiens
ccctttataatcgccgccgccgccgccgctgcagccactgcaggcaccgctgccgccgcctgagtagtgggcttaggaaggaagaggtcatctcgctcggagcttcgctcggaagggtctttgttccctgcagccctcccacggtgagtgcggcgcggggtccgaccggggcccccgggggcccaaactcgaagcccctctctggctgctgcgacgacgggtttaaccttgggagacagcagtgggggaaccccctcccattttgcagtaaaaccatttcatcatccttgcactggacttggagtcaggtaaatttggttgaaatcttgcctgcaatattttctagctttctgaatcttcagcatgttaatctctggttcttggctgcagccatgaaggcagtcacagaacaggggcatgaactctccaacgaagagagaaatctgctctctgttgcctacaagaatgtggtaggcgcccgccgctcttcctggcgtgtcatctccagcattgagcagaaaacagagaggaatgagaagaagcagcagatgggcaaagagtaccgtgagaagatagaggcagaactgcaggacatctgcaatgatgttctggtaagaggccagtgcttctgttttgaacagtggtttctaaatagtattaatttaatgtataaatgcagactctcaaattattttaggtatctttctgaagtggcatctggagacaacaaacaaagtaagtaatatctttaaaaagaaattcgaccagtaatggagccagtcttctttcacagggactttttaacgattttaattcgtcttggtctggcactaaatttctcagtcttttactatgagattctaaactctcctgaaaaggcctgtagcctggcaaaaacggtgagaaagaccctttgtgatatctaaccatagcaaaacagtgcttgtgttattaacttcattttattcctgaacatacttagggacaatctcactgtaagtactacttccacagggtttatagtctctttcctattcacctacttaataattcactgttatcttcaagaggggatttgtaccattaaatgtagttacagttttaagttgttaaatttgttataaatgactgctgaagttttgacctttgcaatcatccctatctgcagtgacacaggaataattttaaactgtcgagtgagataagattatacatactgggccacttacctagggaacttttagtagccctgctttgattatacttcctttctcttgcagctgtggacatcggaaaaccagggagacgaaggagacgctggggagggagagaactaatgtttctcgtgctttgtgatccgttcagtgtcactctgtaccctcaacatatatcccttgtgcgataaaaaaaaaaaaaaaaaaaaaaaagagaatcgtacgtcgactttcgatttttcacagcctcagcctaggaaaaatggttcatgggataaacagctggtatttgtatctaaaactcagattggtcacataaatgccacggcattccgaagttttgattttgattaacattgacaggattactgtgtgtttaatttttttaaaaactgaacactgtgattatggggttttgtaatttagcagaactcttactggtaggaaaaaatagacctgaattatgtgtaacttttttgggaaggtttaatctgatatcaaaataatcattgaaatacaattccattgtaaagttgtacagaaagtt

SEQ ID NO: 132655 - DNA, 1649 bp, Homo sapiens
  misc_feature (1)...(1649): n = a,t,c or g
tcagacactcctagccccacccccacctggtggtcctttcctatccaccctggtagtggaagacaagggagttctaggaccctgcccaccaccaattcctctccacactactacagctgatgctttctggaaagctccacctcctggcaagaggccaatcagcacaaagaacattaaaccaccaaagctaaggaccttcacagagtccattgcaccctccgatatcgccactgaaacaggcgctggtattgctggctgagagacccatagatggttcacatcacaggactctgtgcagacaacccccagtaccagcccagagccaggtagactcgctgagcagctagaccccagaagagacacaacaatcacagcagtctgctcacaggaagccacatccattggaaaagggggagagtacagaacatcattgcagatgtcctgcagttctgcctctatcttctcacggtactctttgttccctgcagccctcccacgggaatgacaatggataaaagtgagctggtacagaaagccaaactcgctgagcaggctgagcgatatgatgatatggcttgcagcagtgaaaggcatgtcacagaacaaggggcatgaacgtctccaacgaagagaagaaatcttgctctcttgttgcctacaaagaatgttggtaggcgcccgccgcttccttcctgggcgtgtcatctccagcatttgagcatgaaaacagagaaggaatgagaagaaagcagcagatgggcaaaagagtacccgtgagaagatagaaggcagaacttgcaggacattctgcaattgatgtttctgggagctgttgggacaaatatctttattccccaatgctacacaacccagaaaagtaaaggtgttctactttgaaaaatgaaaaggagattatttttaggtatcttttctgaaagtggcaatcgtgaagacaacaaacccaaccaacttgtgtcggaacttccccagccagggnttacccaggaagcaatttgaaaatttagttaagaaagaaaatgcagccctacacaccccaattcggtcttggtgctggcacctaaatttcctcagtctttttactatgagattcctaaactccccctgaaaaaggcctggtaagcctgggcaaaaacgggcattttgattgaagcaatttgctgaatttggatacgctggaatggaagagtcttattaaagacagcacttctgattcatggcagttacttaggggacaatcctcactctgtgggacatccggaaaaccaggggagacgaaggagacgctggggagggagagaactaatgtttctcggtgctttggtgatccgtttcagtgtcactctgtaccctcaacatatatcccttgtgcgataaaaaaaaaaaaaaaaaaaaaaaggaaatttgcccggcaattttgattttttcaaaccctcaccctagaaaaaagggtcctggggaaaaccggcgggttttggtttttaaaacccaaatgggccccataagtgcccgggttttccaaatttttgattttgattaactttgccgggattacggggggttaaatttttaaaaaacggaacactgggataagggggttttggaatttagcaaaacttttactgggaaaa

SEQ ID NO: 132656 - DNA, 336 bp, Homo sapiens
gctgcaagcgagctcagccctggcctggctgaccctggaggtgctggcctatgctcatgtactggctcaccttccacctggtgcggtgagcgcgcccgctgaacctcccgctgctgctgctgctgctgggggccactgtggccgccgaactcatctcctgcctgcaggccccaaggtccaccctgtctggccacaggcaccgcctccatcccatgtcccgcccagccccgcccccaacccaaggtgctgagagatctccagctgcacaggccaccgccccagggcgtggccgctgttacagaaacaataaaccctgatgggcatggaaaaaaaaaa

SEQ ID NO: 132657 - DNA, 397 bp, Homo sapiens
  misc_feature (1)...(397): n = a,t,c or g
cggacgcgtgggcggacgcgtgggtggacactgtcaacaccgacctcaccaccatcgacctggtggccttcttgggctacaaatatgtcgggtgagtacccccgcccttcacgccagccccagcccttgggccttgtcctcacacagcctcctctccctcccccaggatgattggcggggtcctcatgggcctgctcttcgggaagattggctactacctggtgctgggctggtgctgcgtagccatctttgtgttcatnnnnnnnnnnnnnnnnnnnnnnnnnnnnnnnnnnnnnnnnnnnnnnnnnnnnnnnnnnnnnnnnnnatccggacgctgcggctgaagatcttggcagacgcagcagctgagggggtcccggtgcgtggggcccggaac

SEQ ID NO: 132658 - DNA, 600 bp, Homo sapiens
ggaattcggatgaatggcagagcttgcacctgccagtccatctgacatcaaagccagtgtctctaatggtgacaccaccctcctctgcagcaggaggcagagctgtgggatgaatgaggttcgccaggtctcccttacctatcctgggtccccagctccttctcactctcttcccttgcagcctcgaagcggaggatccctgtgtcccagccgggcatggccgacccccaccagcttttcgatgacacaagttcagcccagagccggggctatggggcccagcgggcacctggtggcctaagttatcctgcagcctctcccacgccccatgcagccttcctggctgacccggtgtccaacatggccatggcctatgggagcagcctggccgcgcagggcaaggagctggtggataagaacgtgagtgggcggggctggtgggagtggggggatgcacggggccacagggcttcagacttgagctctgcctccccagatcgaccgcttcatccccatcaccaagctcaagtattactttgctgtggacaccatgtatgtgggcagaaagctgggcctgctgttcttcccctacctacacca

SEQ ID NO: 132659 - DNA, 1230 bp, Homo sapiens
atgatgtccagtcctgtcagtcagaacctggaggatgttttcttcactgaggttttgaaagataaaacatgcacaaggcaggtggacacgaacaccaaaaatgtctttgggcaaccgaggttgagggcatccctccgagacctccggtcaccacggaagaactacaaatccaccatcgaggatgacctgaagaaactcatcatcatggacaacctggggccagagcaggagagagacacgggacagtcaccgcagaagggcctgcagcggacgctgtcggacgagagcctgtgcagcgggcgccgggagcccagcttcgccagccccgctggcctagagccagggctgcccagcgacgtgctcttcaccagcacctgcgccttcccgtccagcacgctgcctgcacgccgccagcaccagcacccccacccgcccgtcggccccggtgccacccctgccgccggcagcggctttcccgagaagaaatgtactgcgcacaccacccgcatcaaaagccacgagccagctggagttggccgtgccccagatgcaccctgtaaccccccttacccacctcctaacccccccacaactgaaagacagggcttcaaggagtcacagagccccaggccagagcccgagcctggtgcctgggactctctcaatagccgcagcagggatttagcactggctgttccgtctgcctggaatgttcctcccccagccaccatctcagcctcggagctctcgctggctgatgggcgggaccgccccctgcggcgcctggaccctgggctgatgcccctgcctgacacagctgctggcctcgagtggtccagcctggtgaacgcagccaaggcatacgaagtgcaaagagccgtctcactcttctctctgaacgacccggccctgagcccggacatcccgcctgcacacagtcctgtccacagccacctgagcctggagaggggacccccgacccccaggaccacccctaccatgagcgaggagccacccctggatctgacaggcaaggtgtaccagctggaggtgatgctgaaacagctgcacactgacctgcagaaggagaagcaggacaaggtggtgctccagtcagaggtggccagcctgcggcagaacaaccagcggctgcaggaggagtcgcaggccgccagcgagcagctgcgcaagtttgcggagatcttctgcagggagaagaaggagctctga

SEQ ID NO: 132660 - DNA, 1566 bp, Homo sapiens
gccctttttttttttttttgccatgcccatcagggtttattgtttctgtaacagcggccacgccctggggcggtggcctgtgcaggctggagatctctcagcacctttgggttgggggcgaggctgggcgggacatgggatggaggcggtgcctgttgcgcagacagggtggaccttggggcctgcaggcagggagatgagttcggcggccacagtggcccccagcagcagcagcagcagcgggaggttcagcgggcgcgctcaccgcaccaggtggaaggtgagccagtacatgagcataggctgcgccgccgccaccgccatggtcaggtacatgcgcagctggttccgggccccacgcaccgggacccccttcagctgctgcgtctgccaaagatcttcagccgcagcgtcccggatcattgaacacaaagaatggccacgcagcaccagcccagcaccaggtagtagccaatcttcccgaagagcaggcccatgaggaccccgccaatcatcccgacatatttgtagcccaagaaggccaccaggtcgatggtggtgaggtcggtgttgacagtgaccagatagaggctgagcaggatggccagcacctccagggtcagcccagcccagggctgagctcgcttgcagccccaggaggtctggggagaacctatcctgggtccccagcgcaagaccagcccaccaaaacgtaggtgatgaaagccattgccgctccatataggcccggaagagagaggagggtgcagggtagggggagggtgaaacctggaatgtagaggtcccggggcattgacttcaaaagcgggggggccaaccggggtgtccctgttggtaactgcaacttccccaatccctggtgtaaggtaggggaaagaacagcaaggcccagctttctgccccacatacatggtgtccaccagcaaagtaatacttgaagcttggtgatggggatgaagcggtcgatgttcttatccaccagctccttgccctgcgcggccaggctgctcccattagccatggccatgttggacaccgggtcagccaggaaggctgcatggggcgtgggagaggctgcaggataactcaggccaccaggtgcccgctgggccccattagccccggctctgggctgaacttgtgtcatcgaaaagctggtgggggtcgccaatgcccggctgggacacagggatcctccgcttcgaggctgagtgggtatccctgcaaagccatgaggccctccatgaatccctcttcgtatgccttggctgcgttcaccaggctggaccactcgaggccagcagctgtgtcaggcaggggcatcagcccagggtccaggcgccgcagggggcggtcccgcccatcagccagcgagagctccgaggctgagatggtggctggatggggagggtggagatggcagtggttgagtgtgacaatgcgggagcatctggaattttgatgaagattgcacagacggtgggaggcaaggagccagctgggtggggaggctagtgtggctacaaggcggggagggcggcgcat

SEQ ID NO: 132661 - DNA, 464 bp, Homo sapiens
  misc_feature (1)...(464): n = a,t,c or g
tccctaggccatttcctaagtcccgccttcctccaggaattatcgggggtgaatatgacccaaagacctaaccccatcttgcccagggcgaggcggccccaatgacagatttccctttnagacccagcaggggtcggccaactgatggccggctgtcattcatgtgattgatttgtaatttcatttctggagctccatttgtttttgtttctaaactacagatgtcaactccttggggtgctgatctcgagtgttattttctgattgtggtgttgagagttgcactcccagaaaccttttaagagatacatttatagccctaggggtggtatgacccaaaggttcctctgtgacaaggttggccttgggaatagttggctgccaatctccctgctcttggttctcctctagattgaagtttgttttctgatgctgttcttaccagattaaaaaaaagtgtaaat

SEQ ID NO: 132662 - DNA, 2198 bp, Homo sapiens
gagaggggcgggcgctctattccagagaccgagtggcagggcggccactcgtggcggggctctttccccgtttcgcctcagctacccctcagctccggtagtcgccagtccggggtcgtcgccgtttggggcgggagctgctcggccccgccgccgtccccgtcgccgcttccgggtccaggcccctcgggccgcctgcccgccgtcatgatgtctgcgggtgctgcttctgaagcggacctggccggtggaggtgcccgagaccggagcccgaccgctgggggcattttgcgctcgcaccctgaggcagtccctgctgtgcaccttgggggtacagttctaatacccgatttacaattacattgaactacaaggatcccctcactggagatgaagagaccttggcttcatatgggattgtttctggggacttgatatgtttgattcttcaagatgacattccagcgcctaatataccttcatccacagattcagagcattcattcactccagaataatgagcaaccctctttggccaccagctccaatcagactagcatgcaggatgaacaaccaagtgattcattccaaggacaggcagcccagtctggtgtttggaatgacgacagtactgttaggggcctagtcaaaattttgaagctgagtcaattcaagataatgcgcatatgggcagagggcacaggtttctatccctccagaaccccatgctcctggtagttgaatccggtggaagggcaagtgccaccattcattagagaccttgtatcaattagctgactgttcctgatgccaatgatgccttgatagtgttggatacatccttctcatgttggagtcaggttacatacctcagggcacccgaagccaaagcactgtccatgccggagaagtgggaagttgagcggggtgtataagctgcagtacatgcatcctctctgcgagggccagttcggttacttctcacctgtgtgcctttggggaaacctgattgttgtaaatgctacactaaaaatcaacaatgaggttaggaagtgttgaaaaggttgcagcttgttacccgaatctttttatttgcaaagagaaactaggggaaaatgtagccaacatatacaaagatcttcagaaactctctcgcctctttaaagaccagctggcgcatcctcttctggcttttacccgacaagcactggaacctaccagatgtatttgggttggtcgtcctcccattggaactgaaactacggatcttccgacttctggatgttcgttccgtcttgtctttgtctggcggtttgtcgtgacctctttactgcttcaaatgacccactcctgtggagggttttttatatctgcgtgaattttcgagacaatactgttcagagttcaaggacacagattgggaaagaactgtacagggaaggagggcacatacaaaggaaaaggaatccccgaaagggcgggttttgtggatgctcctggccattcgtcaaactcacaaccattccattctattcccaacccctttggcaccctaggggccatttccctaagctccccgcctttcctccagggatttattcgggggggtggaatatggaccaaaggaccaacatttccctatgttgggaggacccaatcaagttcactcaattcctgggtcctgggggagacgcccaagccaagtttccttccactgagaccacgctttgatccagtttggccccacttcccaggaccttaacccccatctttgccacgggcgagggcgggccccaatgaccagatttccccttttagaccccagcaggggtcgggccaactcataggccggctgtcaattcatgtggattggatttgttaattttcatttctgggagctccattttgtttttgttttttaaattacagatgtcaacgtccttggggtgctgatctccgagtgttatttttctgaattgtggtgttgagagttgcactccccagaaacccttttaagagatacatttataagccctaggggtggtaatgaccccaaaggttccctctggtgacaaggttgggccttgggaaatagttggctgccaatctcccctgctcttggttctcctctagattgaagtttgtcttctgatgctgttcttaccgagattaaaaaaaaagtgtaaattaaaaattat

SEQ ID NO: 132663 - DNA, 1503 bp, Homo sapiens
gctgtgctctggaagcttctggatcctaggctcatctccacagaggagaacatgcacgcagcagagatcatggggcccctctcagcccctccctgcacagagcacatcaaatggaaggggctcctgctcacagcattacttttaaacttctggaacttgcctaccactgcccaagtcatgattgaagcccagccacccaaagtgtccgaggggaaggatgttcttctacttgtccacaatttgccccagaatcttactggctacatctggtacaaagggcaaatcagggacctctaccattacattacatcatatgtagtagacggtcaaataattatatatggaccggcatacagtggacgagaaacagtatattccaatgcatccctgctgatccagaatgtcacccgggaggacgcaggatcctacaccttacacatcataaagcgaggtgatgggactagaggagtaactggatatttcaccttcaccttatacctggagactcccaagccctccatctccagcagcaacttaaaccccagggaggccatggagactgtgatcttaacctgtaatcctgagactccggacgcaagctacctgtggtggatgaatggtcagagcctccctatgactcataggatgcagctgtctgaaaccaacaggaccctctttctatttggtgtcacaaagtatactgcaggaccctatgaatgtgaaatatggaactcagggagtgccagccgcagtgacccagtcaccctgaatctcctccatggtccagacctccccagaattttcccttcagtcacctcttactattcaggagagaacctcgacttgtcctgcttcgcagactctaacccaccagcacagtattcttggacaattaatgggaagtttcagctatcaggacaaaagctctttatccctcagattactccaaagcataatgggctctatgcttgctctgctcgtaactcagccactggcgaggaaagctccacatccttgacaatcagagtcattgctcctccaggattaggaactttttgctttcaataatccaagtagcagccctgatgtcatttttgtatttcaggaagactggcaggagatttatggaaaagactatgaaaaggactcttgaatacaagttcctgataacttcaagatcataccactggactaagaactttcaaaattttgatgaacaggctgataccttcatgaaattcaagacaaagaagaaaagaactccatttcattggactaaataacaaaaggataatgttttcataattttttattggaaaatgtgctgattttttgaatgttttatcctccagatttatgaatttttttcttcagcaattggtaaagtatacttttgtaaacaaaaattgaaacatttgcttttgctctctgagtgccccagaattgggaatctattcatgaatattcatatgtttatggtaataaagttatttgcacaagttt

SEQ ID NO: 132664 - DNA, 1513 bp, Homo sapiens
atggggcccctctcagcccctccctgcacacagcgcatcacctggaaggggctcctgctcacagcattacttttaaacttctggaacttgcctaccactgcccaagtcacgattgaagccgagccaaccaaagtttccaaggggaaggacgttcttctacttgtccacaatttgccccagaatcttgctggctacatctggtacaaagggcaaatgaaggacctctaccattacattacatcatacgtagtagatggtcaaataattatatatgggcctgcatacagtggacgagaaacagtatattccaatgcatccctgctgatccagaatgtcacccgggaggacgcaggatcctacaccttacacatcgtaaagcgaggtgatgggactagaggagaaactggacatttcaccttcaccttatacctggagactcccaagccctccatctccagcagcaacttataccccagggaggacatggaggctgtgagcttaacctgtgatcctgagactccggacgcaagctacctgtggtggatgaatggtcagagcctccctatgactcacagcttgcagttgtccaaaaacaaaaggaccctctttctatttggtgtcacaaagtacactgcaggaccctatgaatgtgaaatacggaacccagtgagtgccagccgcagtgacccagtcaccctgaatctcctccagcattcttggctgattgatgggaagttccagcaatcagcacaagtgttctttatcccccaaatcactaaaacatatagaggggtctatgtctgtttcatccataactcagccactgctggaacaaatctcataatcaagaggatcatagtccctgatacactgagaaaaagaggcaaccatgaaaaggtggaaagttctgatgacatagaaaatagcaatcagcctttctcacatcccaaggccttcaaaaatatacaagtgcagcatggccagtatggaattcaccgaaaactaatcaccaagctagaaaagtggcttgattctggtctcccctgtgttatttctgctgaaacatccagtcccaggccaggctgctcagtatcttcagggtttcagggccatgggaagtcccattattactcatctctagaatgtccttggaaatggaagttgcagagaaatcacatctatgggggcaaagtaggatggaatttggaaggggcccaccagttgcacattccagcgaagctgcccaagccctacatcaccatcaacaacttaaaccccagggagaataaggatgtcttagccttcacctgtgaacctaagagtgagaactacacctacatttggtggctaaatggtcagagcctcccggtcagtcccagggtaaagcgacccattgaaaacaggatcctcattctacccagtgtcacgagaaatgaaacaggaccctatcaatgtgaaatacaggaccgatatggtggcatccgcagttacccagtcaccctgaatgtcctct

SEQ ID NO: 132665 - DNA, 2250 bp, Homo sapiens
atggccatactgcccaaggtaatttacagattcaatgccatacccatcaagctaccaatgactttcttcacagaattggaaagaactactttaaagttcatatggaaccaaaaaagagcctgcatcgccaagtcaatcctaagccaaaagaacaaagctggaggcatcacactacctgacttcaaactatactacaaggctacagtaaccaaaacagcatggtactggtaccaaaacagagatatagatcaatggaatagaacagacccctcagaaataacacctcatatctacaactatctgatctttgacaaacctgagaaaaacaagcaatggggaaaggattccctatttaataaatggtgctgggaaaactggctagccatatgtagaaagctgaaactggatcccttccttacaccttatacaaaaatcaattcaagatggattaaagacttaaatgttagacctaaaaccataaaaaccctagaagaaaacctaggcattaccattcaggacataggcatgggcaaggacttcatgtctaaaacaccaaaagcaatggcaacaaaagccaaaattgacaaatgggatctaattaaactaaagagcttctgcacagcaaaagaaactaccatcagagtgaacaggcaacctacaaaatgggagaaaattttcacaacctactcatctgacaaagggctaatatccagaatctacaatgaactcaaacaaatttacaagaaaaaaacaaacaaccccatcaaaaagctcatctccacagaggagaacacacagacagcagagaccatggggctcctctcagcccctccctgcacacagcgcatcacctggaaggggctcctgctcacagcatcacttttaaacttctggaacccacccacgactgcccaagtcacgattgaagcccagccaaccaaagtttctgaggggaaggatgttcttctacttgtccacaatttgccccagaatcttactggctacatctggtacaaagggcaaatcagggacctctaccattacattacatcatatgtagtagacggtcaaataattatatatgggcctgcatacagtggacgagaaacaatatattccaatgcatccctgctgatccagaatgtcacccaggaagacgcaggatcctacaccttacacatcataatgggaggtgatgagaatagaggagtaactggacatttcaccttcaccttatatctggagactcccaagccctccatctccagcagcaaattaaaccccagggaggccatggaggctgtgagcttaacctgtgatcctgagactccggacgcaagctacctgtggtggatgaatggtcagagcctccctatgtctcacaggttgcagttgtctgaaaccaacaggaccctctttctattgggtgtcacaaagtacactgcaggaccctatgaatgtgaaatacggaacccagtgagtgccagccgcagtgacccattcaccctgaatctcctccagcattcttggctgattgatgggaagttccagcaatcagcacaagtgttctttatcccccaaatcactaaaacatatagaggggtctatgtctgtttcatccataactcagccactgctggaacaaatctcataatcaagaggatcatagtccctgcgaagctgcccaagccctacatcaccatcaacaacttaaaacccagggagaataaggatgtcttaaacttcacctgtgaacctaagagtgagaactacacctacatttggtggctaaatggtcagagcctcccggtcagtcccagggtaaagcgacccattgaaaacaggatcctcattctacccagtgtcacgagaaatgaaacaggaccctatcaatgtgaaataagggaccaatatggtggcatccgcagttacccagtcaccctgaatgtcctctatggtccagacctccccagaatttacccttcattcacctattaccgttcaggagaagtcctctacttgtcctgttctgcggactctaacccaccggcacagtattcttggacaattaatgggaagtttcagctatcaggacaaaagctctttatcccccaaattactacaaagcatagcgggctctatgcttgctctgttcgtaactcagccactggcaaggaaagctccaaatccatgacagtaaaagtctctggtggcattgccttagcagacacctctttcagctgcagctaa

SEQ ID NO: 132666 - DNA, 421 bp, Homo sapiens
cggagactcccaagccctccatctccagcagcaacttaaaccccagggaggtcatggaggctgtgcgcttaatctgtgatcctgagactccggatgcaagctacctgtggttgctgaatggtcagaacctccctatgactcacaggttgcagctgtccaaaaccaacaggaccctctatctatttggtgtcacaaagtatattgcaggaccctatgaatgtgaaatacggaacccagctcttcttaatgactgccacaacacaaacactgagaaaaagaagcaaccagaaaaggtggaaagttctgatgacatagaaaatagcaatcagcctttctcacatcccaaagccttcaaaaatatacgagtgcagcatggccactatggaattcaccgaaaactaatcaccaagctagaaacatg

SEQ ID NO: 132667 - DNA, 403 bp, Homo sapiens
gcaggatcctacaccttacacatcataaagggagatgatgggactagaggagtaactggacgtttcaccttcaccttacaccgcatccaaacctcagaggagtgagagcaaatggtcagctgattagtctgcactccagaactaaatcacctgcttcaaccatcagagtcagtgcaaaaaaatgtccaggcctcctcctcagatcttaaccaccatcactgaacctgaaatcctgtgtttcccaaagtgtccttgtcactgtcatgagaggatcaaggagaggaccttgttttcttttcccactcacactctacaccaccacaggcccagcgagagagacacacactcaggagctctcacatgacaaatgaaggaatggaatgaagaaatgaatgatccaaaa

SEQ ID NO: 132668 - DNA, 435 bp, Homo sapiens
tggagactcccaagccctccatctccagcagcaacttataccccagggaggacatggaggctgtgagcttaacctgtgatcctgagactccggacgcaagctacctgtggtggatgaatggtcagagcctccctatgactcacagcttgcagttgtccaaaaacaaaaggaccctctttctatttggtgtcacaaagtacactgcaggaccctatgaatgtgaaatacggaacccagtgagtgccagccgcagtgacccagtcaccctgaatctcctccagcattcttggctgattgatgggaagttccagcaatcagcacaagtgttctttatcccccaaatcactaaaacatatagaggggtctatgtctgtttcatccataactcagccactgctggaacaaatctcataatcaagaggatcatagtccctg

SEQ ID NO: 132669 - DNA, 786 bp, Homo sapiens
ttagcccacaggtccaaggctgatttttgtcacagtgaagttcaggtagtaagaattctcactggtggctgttgaggatggtggtggtggggatgggtcatatggagaattagcagtgggagactgctgactaaccagtgtacttctgggaattgcaaatgcatgaaatggcacccattctagactagtcgcggcagtgttggtgatggccacagaccaggaacgaccttgacgtttatccgtagggaacttcgaggcctctcttagcagctggagtgcatcccggggacttgggagctctggaaagaggagcaggaaagggccatggccggaggaggcctgaaaaagatcatctctgccacagagaagaagctggctcggatgctgctggccccctctgcttcctggtgctgttcgggaccctgagtctttcacgggagcacctgatggggaaagcctggacccgtgtcggtgtccctcctgcaaggagtgctgggaaaatgaactttccagcttcctccttgcgaaggcagaacattccccatgtgtactggtggcatttaaaaactgcagggcagccagagaacatggactgtgttccaccgggagagttcctggcgggatgtcccggtgcagaagcccgtcccaaggtgggtatttgagctgaggaactgagaagccggtttctgcctgaccataggacaccaagggctttaggacctgagtggcacatcgtgtcctggtgacatctgagttacctggggcgtgcacagcagcctccagcat

SEQ ID NO: 132670 - DNA, 606 bp, Homo sapiens
aggaggccatggaggctgtgatcttaacctgtgatcctgcgactccagccgcaagctaccagtggtggatgaatggtcagagcctccctatgactcacaggttgcagctgtccaaaaccaacaggaccctctttatatttggtgtcacaaagtatattgcaggaccctatgaatgtgaaatacggaaccccagttgagtgccagccgccagtgacccagtcaccctggaatctcctccgctcttatttaatggacttgccacaacagaaacactgagaaaaagaggcaacccatgaaaacgtggaaagttctgacgacagaaaatagcaatcagcctttctcacatcccaaagctttaaaaaatatatgagtgcagcatggccagtatggaattgaccaaaaactaatcatcaagctagaaacgtggtgagagaaaaaaaaagggcaagaatatctttggcttatcacctcccacttttgcctactaatctgatgctgaaaagaaatgctcactgaagcattttagattttgaatctttcagatttgggatgctaaaccagtaagcatatgacaaatatttcagaataaaaaaatgtcagaaatcc

SEQ ID NO: 132671 - DNA, 1974 bp, Homo sapiens
ggggggccgtgcggacctggggaagaggattccaaacagaaaaatgccaagcatcacttttaaacttctggaacccgcctaccactgcccaagtcacgattgaagccgagccaaccaaagtttccaaggggaaggacgttcttctacttgtccacaatttgccccagaatcttgctggctacatctggtacaaagggcaaatgaaggacctctaccattacattacatcatacgtagtagatggtcaaataattatatatgggcctgcatacagtggacgagaaacagtatattccaatgcatccctgctgatccagaatgtcacccgggaggacgcaggatcctacaccttacacatcgtaaagcgaggtgatgggactagaggagaaactggacatttcaccttcaccttataccgtcattccttggactctgctctatctttagaggtcactggctcaagtcagccactatgagacacctgggaaaactgccccaccttgtggctccactgcctgatgactgaactgacctccggacttgactctgttctcccctgtgttatttctgctgaagtacccagtcccaggtcaggctttccagtatccaaagggtttaaagacaattggaagttccatcacccatctctaggatgtccttggcaagggaagctgcagagaaaacatacctcgggcggcaaagtaagactgaaactaagaagattccagcactgcatgctccaagtgaggaccacaagtggagactcccaagccctccatctccagcagcaacttataccccagggaggacatggaggctgtgagcttaacctgtgatcctgagactccggacgcaagctacctgtggtggatgaatggtcagagcctccctatgactcacagcttgcagttgtccaaaaacaaaaggaccctctttctatttggtgtcacaaagtacactgcaggaccctatgaatgtgaaatacggaacccagtgagtgccagccgcagtgacccagtcaccctgaatctcctcccgaagctgcccaagccctacatcaccatcaacaacttaaaccccagggagaataaggatgtcttagccttcacctgtgaacctaagagtgagaacttacacctacatttggtgggttaaatggtcagagccttcccggttcagttcccagggtaaagcgacccatttgaaaacagggtcctcatttttaccccgtgttcaaggggaattgaaacagggaccctattcaatgtgaaatacagggaccgatatggtgggcatccgcagttacccagtcaccctggaatgtcctctattactacaaagcatagcgggctctatgcttgctctgttcgtaactcagccactggcatggaaagctccaaatccatgacagtcaaagtctctgctccttcaggaacaggacatcttcctggccttaatccattatagcagccgtgatgtcatttctgtatttcaggaagactggcagacagttgctttcattcttcctcaaagtatttaccatcagctacagtccaaaattgctttttgttcaaggagatttatgaaaagactctgacaaggactcttgaatacaagttcctgataacttcaagatcataccactggactaagaactttcaaaattttaatgaacaggctgatacttcatgaaattcaagacaaagaaaaaaacccaattttattggactaaatagtcaaaacaatgttttcataattttctatttgaaaatgtgctgattctttgaatgttttattctccagatttatgcactttttttcttcagcaattggtaaagtatacttttgtaaacaaaaattgaaacatttgcttttgctccctaagtgccccagaattgggaaactattcaggagtattcatatgtttatggtaataaagttatctgcacaagttcaaaaaaaaaaaaaaaaccc

SEQ ID NO: 132672 - DNA, 2008 bp, Homo sapiens
gggcgggacaactggtctgagtactatggctgattttcgctgtctggcattgagaagccacacgccccttttgcttaggaggcctctctgctggaggatgacgatggcatggtttatctaaggccactgacaagtcatcaatataggacagcacagctgagagccatgctcaggaagtttctggatcctaggctcagctccacagaggagaacacgcaggcagcagagaccatggggcccctctcagcccctccctgcacacagcgcatcacctggaaggggctcctgctcacagcatcacttttaaacttctggaacccgcctaccactgcccaagtcacgattgaagccgagccaaccaaagtttccaaggggaaggacgttcttctacttgtccacaatttgccccagaatcttgctggctacatctggtacaaagggcaaatgaaggacctctaccattacattacatcatacgtagtagatggtcaaataattatatatgggcctgcatacagtggacgagaaacagtatattccaatgcatccctgctgatccagaatgtcacccgggaggacgcaggatcctacaccttacacatcgtaaagcgaggtgatgggactagaggagaaactggacatttcaccttcaccttatacctggagactcccaagccctccatctccagcagcaacttataccccagggaggacatggaggctgtgagcttaacctgtgatcctgagactccggacgcaagctacctgtggtggatgaatggtcagagcctccctatgactcacagcttgcagttgtccaaaaacaaaaggaccctctttctatttggtgtcacaaagtacactgcaggaccctatgaatgtgaaatacggaacccagtgagtgccagccgcagtgacccagtcaccctgaatctcctcccgaagctgcccaagccctacatcaccatcaacaacttaaaccccagggagaataaggatgtcttagccttcacctgtgaacctaagagtgagaactacacctacatttggtggctaaatggtcagagcctcccggtcagtcccagggtaaagcgacccattgaaaacaggatcctcattctacccagtgtcacgagaaatgaaacaggaccctatcaatgtgaaatacaggaccgatatggtggcatccgcagttacccagtcaccctgaatgtcctctatggtccagacctccccagaatttacccttcattcacctattaccattcaggagaaaacctctacttgtcctgcttcgcggactctaacccaccagcagaatattcttggacaattaatgggaagtttcagctatcaggacaaaagctctttatcccccagattactacaaagcatagcgggctctatgcttgctctgttcgtaactcagccactggcatggaaagctccaaatccatgacagtcaaagtctctgctccttcaggaacaggacatcttcctggccttaatccattatagcagccgtgatgtcatttctgtatttcaggaagactggcagacagttgctttcattcttcctcaaagtatttaccatcagctacagtccaaaattgctttttgttcaaggagatttatgaaaagactctgacaaggactcttgaatacaagttcctgataacttcaagatcataccactggactaagaactttcaaaattttaatgaacaggctgatacttcatgaaattcaagacaaagaaaaaaacccaattttattggactaaatagtcaaaacaatgttttcataattttctatttgaaaatgtgctgattctttgaatgttttattctccagatttatgcactttttttcttcagcaattggtaaagtatacttttgtaaacaaaaattgaaacatttgcttttgctccctaagtgccccagaattgggaaactattcaggagtattcatatgtttatggtaataaagttatctgcacaagttcaa

SEQ ID NO: 132673 - DNA, 1755 bp, Homo sapiens
ggcacgagaggacagcacagctgacagccgtgctcagagagtttctggatgctaggcttatctccacagaggagaacacacaagcagcagagaccatgggaaccctctcagcccctccctgcacacagcgcatcaaatggaaggggctcctgctcacagcatcacttttaaacttctggaacctgcccaccactgcccaagtcacgattgaagccgagccaaccaaagtttccgaggggaaggatgttcttctacttgtccacaatttgccccagaatcttaccggctacatctggtacaaagggcaaatgagggacctctaccattacattacatcatatgtagtagacggtgaaataattatatatgggcctgcatatagtggacgagaagcagcatattccaatgcatgcctgctgatccagaatgtcacccgagaggacgcaggatactacaccttacacatcataaagggagatgatgggactagaggagtaactggacgtttcaccttcaccttacacctggagactcctaagccctccatctccagcagcaacttaaatcccagggagaccatggaggctgtgagcttaacctgtgaccctgagactccagacgcaagctacctgtggtggatgaatggtcagagcctccctatgactcacagcttgaagctgtccgaaaccaacaggaccctctttctattgggtgtcacaaagtatactgcaggaccctatgaatgtgaaatacggaacccagtgagtgccagccgcagtgacccagtcaccctgaatctcctcccgaagctgcccaagccctacatcaccatcaacaacttaaaccccagggagaataaggatgtcttaaacttcacctgtgaacctaagagtgagaactacacctacatttggtggctaaatggtcagagcctcccggtcagtcccagggtaaagcgacccattgaaaacaggatcctcattctacccagtgtcacgagaaatgaaacaggaccctatcaatgtgaaatacgggaccgatatggtggcatccgcagtgacccagtcaccctgaatgtcctctatggtccagacctccccagaatttacccttcattcacctattaccgttcaggagaagtcctctacttgtcctgttctgcggactctaacccaccggcacagtattcttggacaattaatgaaaagtttcagctaccaggacaaaagctctttatccgccatattactacaaagcatagcggggctctatgtttgctctgttcgtaactcagccactggccaaggaaagctccaaatccatgacaagtcgaagtctctggttaagtgggatcccaagcatcgttgggcaatagggttttaggtgggagtctatctgggcatttcagaggaaggagtcagggaaaacaattgtatttcccagcctgtgtcccatgggcacaagcaaatcccaaattctcctcctggaaccctccaaatttgtctaagaacttcgaaaactttaacaaacaggctgatatcttcataatattcccagcctagacccaagcaggaagaacattgatttcattgaaataattgataataatgaagataatgtttttatgatttttatttgaaaatttgctgattctttaaatggtttgttttctacattgatggaatttttctcttaattaatctatctacagcttatagcagttcaataaactatacttctgggaaccgtaaaaaa

SEQ ID NO: 132674 - DNA, 14301 bp, Homo sapiens
atggccacggagaagaggctcagtgcagaaggaggaaggacagcacagctgacagccgtgctcaggaagtttctggatcctaggctcatctccacagaggagaacacacaggcagcagagaccatggggcccctctcagcccctccctgcacagagcacatcaaatggaaggggctcctgctcacaggtgaggagaggacttcctgggagaggacaggaggaggaagcagagtgactggatggggtatcctggagaggatggggttctaaaaaataaaagaagccagcacttagggaggctgaggtgggtggatcacgagatcaggagttcaagatcagtctggccaacacagtgtagacgtgtctctaccaaaaaatacaaaaaattaaccaagtatggtggtgtgctcctgtaatcccagctttcgggaggctgaggcaggataatcacatgaacccaggaggcagaagttgcagctagccgagacagcaccactgcacgccagcctgggtgacagtacgagactccatttcaaaaaaaaaaaaaaaaaagaataaaaagaagaaagaaaaaaagggaaagaaggctctgttggagcctggataggggaaaatacaccagagagggacaggggtcaaaataggaaagtcacattgaaccggaattggtaagaggtagtaaaatcttaagtgttctgttttcctgattaatcatcaggggccaccacattttgaaaaatgataataatgactatatcagatgacacctcaaataaaaatgtaaccagggcatgaaacactttcctcagcaaaaaacctcaacaattgggggaaaaaaaacacccagggcatggagggccctgagaactctcacatctacaggagtctgcatcctgttccaggcactggggtgcaaccaacatgacaaaagtctctgtcctcacagagctcacactctcatggggaggaagacagacatgcaaagagatatagaatgtgaggtcaggtgttgacaagaaccctagagggagcagagcagggaaaggtcagaaagggaagacccagggtctctgaagcaggcatcaggaaagaagtctaaggatgccctgatgtgagcaggacctgagggcagtgtggagggggccgtgcggacccctggggaagaggattgcaaacagaaaaatgccaaggtcaggagtgttgaaggaatgggggtcatgctgctgaccttgacctagtaggacagtaggacacacacacatacacacacacaaacacacatgcccttttgtgtgtgtgtgtttgtatgtgtgtgtgtgcatatcttcaaggctgatgattgaagagaccttctcaggacacagggccccatcttttcaccccaatacataggtccaaatattaactgatgctgtctctacctcctagcatcacttttaaacttctggaacctgcccaccactgcccaagtaataattgaagccaagccacccaaagtttccgaggggaaggatgttcttctacttgtccacaatttgccccagaatcttactggctacatctggtacaaagggcaaatgacggacctctaccattacattacatcatatgtagtacacggtcaaattatatatgggcctgcctacagtggacgagaaacagtatattccaatgcatccctgctgatccagaatgtcacacaggaggatgcaggatcctacaccttacacatcataaagcgaggcgatgggactggaggagtaactggatatttcactgtcaccttatactgtgagtgattccgcatgatccctgggtgttggggggcaggggtcatttctacttcacacacacagaattgtcaggcctggactctgcctgtgtcactctctgcattatgtcccatgctggggtttgggcatttagtgcaggacacacacagaggagacacatttcaacagatcagaattcctttcccgcatccagaccctgcagacactcgctgcagaggaaggacagtctgatggggggactcagcaggaggagatcagtctcagccaagcacctcatgccctcttcataaatttgaccctgagaaagaccctggaaaactgagtagggcttggcctgaggggcccactgagataccctcagagaacctcagctctggaagcctcaatcccagacccctgtccctaaatccttgctccaggtaaagctgaggagcctgtgccaggactgggttgtggcttctttggcagggcttactgggaccaaggatttaccagctgtctgaggactgtgtctcctggagctgttcaccagccagggctcagtcctcagagcctcatctgggcaaggacagagctttcttcacctgacactcagagtggagaggacagaaagacaagctttgtaggccatcagccaactgccttaggaggcctaggacactccatagaaagtctaatatccccagaagcagaaacagaagagagaagatgcaccaggtagccgtttgtccacagggatctgacgcaaaggtgctttctcatggaagcaaattaataataaatgctgtttgtgtgaacacctccactgtgccaagcattaagtcagttgactgtgaatactttaacatttattcacagatagcatgaaaagccacagtccatttgccatttagctcatttgattgagagaaaactgaggcacaggaaggcacagtcactgagccacagtcacacaaacacaaaggggagatcggggtcacatgaggtctgtctgcagccacaggcccatcctctcctctaccagaagtgagggcttactgggttccaaggaccccatagtcatttattgactcaaatcctctcttcttaggcatccaaacctcagaggagtgagagcaaatggtcagctgattagtctgtactccagaactaaatcactggcttcaaccgccagagtcagtgcaaaaaaaatgtccaggtctccccctcagatcttaacctccatcactgaatgtgaaatcctgtgtttcccaagtgtccatgtcaccgtcatgagaggatcaaggagaggaccttgttttctttccccactcacaccctgcctcagcacaggcccagtgagagagacacactcaggagctctcacataacaaatgaaggaatggaatgaagaaatggatgatccaaaacctctttagagactggatcttggaatcagaatcctaggaggttctagccacacctgtcccttgtccttcagaggctgacacccatgtttcatccccccactacctcttgaccctaaagccaccccacctcatgcaactctgaagttctttggccaccggagggttctcagggctctttggtcctggactgtggagctgggggcacctggtccctggggtttttgaagtcagtgtctccctcactgctcactgccatggtgtctctgcctctctctgcttctctgtgtccctcatcttcctcccacttcattctgactggcaagccctgtcctgcacagcttcttcctccaaccctaggccttccccagacactccctctaactaggctggctgttctgttcccttcccgctaacactgtggcctggcccacctcccaggaaataggaaaggtgcagaaatcacctggagttgccactcctgccaggcttcctctcgagccaatgtccccaggtcactaagagaaaccttccactgtattcccatccagggctctttccctttgtgaggctgacctgtggacaagaccatgggacagggataggcagttcccccatccacccttgtaattgccagacaagttcctctggcctcctgcacacaaaaaaatataaaataaaataaaatttattgaaatggtggtttgcagtaaagaaagattttaagaactccaagtctgccaaacaggagggtggaggtttattattactcaaatcagcctccccagtggatcaggtgttagagattttcaaggatagtttcaggggcacaggactaaaaaatgagtactgctgattggtgatggaatcatgcgggcggagggaaatgatctgttagtgcttgaatctgcctctaggtaggggccacatgactggctgagccattaggcataggtatggatgaggtcagccggttgtcagaaggcaaaagaatgagaaacatttcaaaagaccaatctcacgttctacaatagtgatgttatctataggagcaattataggagcaattaagcccataggctcatttcacccatttcactagtgactccatcctcaacctgctatggagctcacattctccggtcactttctagagacttctggcttcctgtcaggcataaaacaagcttgaaatttgtcactcggttctaacactaagtaaaaagctgaacaaactcaaaagtcaacaactcattaaaatccttcagagatggctgggcacagtggctcacgcctataatcccagcactttgggaggctgaggcgggcacaaggtcaggagatagagaccatcctggctaacatggtgaaaccccgtctctactaaaaatacaaaaaattagctgggcatggtggtggtcacctgtagtcccagctacttgggaggccgaggcaggagaatggcatgaacccaggaggtggagcttgcagtgagctgagatcatgccactgcagctggggtgacagagcgagactctgtctcagaaaaaaaaatgctgttagagaaatgaagaatgcttttgatgcttactgatagaccgcacagagctgaggaaagaatccctagcttgagaatgtgtcaatagaaacttccaaaactgaaacaggaaagctcaaaaagagtggggaaaaaaagcggaacaacatattcaacttcatatttaatattttgttttgacaatagcaatttttaaattttgtagttgtgggacaactacaaaggctgtcacatacacttaacgggaatacttgtggtttggggaccagatggaggtggccaggtaggtcctatctcatggttttactgcctgtgccacatacaactatttcctcatgatgatgccgttttcataagttggagttcttcgtgtggggagacacaagagccattggcatctcacttagactcttcctaattcacacaaacttaaattttagtggtgtttcctgaccttaagagaaaatgaagaagacatttcacatacctgttttggggtcctccccatgttttgtaactctgcacagaaattagaagcaggttctttctatatttactaacataacacacatcacttcttttaatttggcatccttcctccttttatgtaattgacacactaaccagttcggtccttttaacaggactctctctacttaaggagttgctaatttcaaatcacctttggcatctttctttgagcataatgtgatcctgctggaattcatggcacacctaaaccttattttggtctcaagagaaatatgactaccagcaattgatcttagatgtttggaccatcagtaaaaatttccacttatgaaaacattttaaggtttcctccaaattttttttgttactagagtcagaatataacatgaggtctaaactcctgacaactttttatgggaaaattacagtattacaaattgagcatcggaaatccagaaatccacaatctgaaatgctcaaaactcaacacttctgaccactgatgtgatgctaaaaagaagtgctcactcgcgcattgtggattttaaatttttcagatttgggatgctaaaccagtacatatactgcaaatattccaaaataaaaaaaattagaaatccaaaacactttgttttaagctttctgcataaggagcactgtatctgcatgaagtataggcacgaggctgcacaggagatctctagaacctcctcatcctgcataacagaaaccgcacacccacggaacaacgccctatacccgtgatttcagttgctgcaaactactattctaatctctgattccctctggaatccactgatatgaggtacatagagtagtcaaactcagaatcagagagtagaatgtctaataagagaaagtatctgcaagacttcttcccaaatattggtctaatatccaccaaacacataaggtccctgagggccagacttctgtcatctgttcatgtttgccctttccaccagtcagttctgcatttgcaaacatcaacatgtatttctagaaagatccatatggtcctcaactgccctctacagggggaagggagcatcatggacccagaacagggatcatggtcttgggccaaacctatcagctcttgcctgtccctttcactctttgtaggtcattccttggactctgctctatctttagagtcattggctcaactcagtcactatgagacacctggaaaactgccccaccttgtggctccactgcctgatgactgaactgacctccaggcctgactctggtctcccctgtgttatttctgctgaagtacccagttccaggccaggctttctaatacccaaagggcttaaggacaatgggaagttccatcatccatctctaggatgtccttggcaagggaagctgatgagaaaacatacctcagggggcaaagtgagactgaaactaacaagattccagcactgcatgccccaagtaaggaccaaaaggtgggccaggcaggcagttggagacggagggactcagagaggcaccaggggctgtgactgctggtcctgtgtctttccatgacccaatgctgctgctcaattcacatttgagaaagtccatgcttctcctacataaagcaggcagcctcacaatcactgagccctcaggttgccatgcatctgtcttgtaacacacacacctgccatgggcttttaaggacttgggtgggctgagaggttggaaatgccaactctgattgaaaaatgcctttggaggaatcaaaggtgccacacagggcaatcttctctctgttttctgcacagcggagactcccaagccctccatctccagcagcaacttaaaccccagggaggtcatggaggctgtgcgcttaatctgtgatcctgagactccggatgcaagctacctgtggttgctgaatggtcagaacctccctatgactcacaggttgcagctgtccaaaaccaacaggaccctctatctatttggtgtcacaaagtatattgcaggaccctatgaatgtgaaatacggaacccagtgagtgccagccgcagtgacccagtcaccctggaatctcctccgtgagtatcttctgttcctctgtgagccaggctgccatcccaaatacaagtggccagaggccaggcctctcagtccctctcaggtccaagtacagagacctttatccctgaacatcaaagctggccatgactttctgctccaggcaaaccagagtaggcctaggcttgatcaacaataagagagaagaggcttctcctgtcatgggagactcaggttccacagcttgtgatggaagaaacaggtgaatgtctcaggctccagatcagtgaacacagcggggatttggctgggacttcagtgttgcaacttggctcacagggtcactgtgactgtgtcccttccacagaccaggattttcccttccctctgacaatatcgcctgtgacattattctctttgctccgcatggcctggatgctcccaccgtttcttcctcatacacctattaccatacaggggaagtccccaagctctcctgcctcacagactctcacccactggcagagcattcttggctgattgatgggaagttccagcaatcagcacaagtgttctttataccccaaatcactaaaacatatagaggggtctatgtctgtttcatccataactcagccactggtggaacaaatctcataatcaagaggatcatagtccctggtaagtggatccctggagcattggcaccatgttttccagtaaagtctatctagctgtcagggaagagccacctgctctctgcaaagggagagggaaaatcaaaacccaggaaagggaatatgtttctgctccaaaaccaccagcttctgcctgtccccttcactctttctagatcattctttagacaatacactaacaatgaacaatctgaaaggaagttaaggaaagaatttcaattcacattaacatcaaaaggaataaaatattttggaataagtttaaccaaaaaggtcaaatgattataccctgaaaactacaaaacattgctgaaagaaattaaagacgatatcaatatatggaaacacatttcattttcatggattggaagaagcaatattgttagaaaggcaatactacccaattgagttgcagattcaatgcaacccctaccagaatcccagtaacattttttgcagaatttagaaaactctgtcctaaatctgagctgacaggctcttcttaatgactgccacaacacaaacactgagaaaaagaagcaaccagaaaaggtggaaagttctgatgacatagaaaatagcaatcagcctttctcacatcccaaagccttcaaaaatatacgagtgcagcatggccactatggaattcaccgaaaactaatcaccaagctagaaacatggtgagagaaaaaaaagggcaagaatatatctggcttatcacctcccacttttgcctactaatctgatgctgaaaagaaatgctcactgaagcattttacattttgaatctttcagatttgggatgctaaaccagtaagtatatgacaaatatttgagaatcaaaaaatatcagaaatccaaaacactttttgtcctaaaacttatgcataagagataatctgtgtgaactataggcatcaagctctacagcagatctctagaacctctccaacttgtataactgaaactgcacacccatgaacaacttctgattctccccactcccagctcctggcttccagcagcctcgtctcatattcaatctggaatcaacttacatgaggtccctagattagtggaacccatggaatcagagagtagaatgtccaatgaaagaaaatatttgcaaaacttctctccaaatttgtctcatatccatcaaacacacatggtccatgaggactagatttccagcagttcattcccaccctttccaccactcagttctgcatttgcaaatgtccacatgtatttctagaaagatccacatggtcctcacctgccctctgcagaaggagaggaaacttaaagaacccaggacagggaacatgcttctgctccaaagccaccagctcttgcctgtccccttcactctttctagatcattccttgcactctgctctatctttagaggtcactggttcaagtaagtcatcatgaaacacctgcaaaaaaactgccccacctggtgcctctagtgcctgatgactgaactgacctacaggcttgactctggtcttccctgtgttatttctgctgaaacatccagtcccaggccaggctgctcagtatctgcagggtttcaggacaatgggaagtcccattattactcatctctagaatgtccttggaaatggaagctgcagagaaatcacatctaggggggcaaagtaggatgtaatttggaaggggcccagcagttgcacattccaggtaaggaacccagggtgagccagccagtcaactgattatggagggactgggaggggtaccaggggctgtgactcccactgacgtgtctgtccatgacccaacactgctgctcaattgacacttgagaaagtctgtgcttccctaagacagagcaggaggcctcacagtctttgagcccttagatcatcatacatctgtcttgtgacacatgcaccagctactggctttcaaggactcatgtgggttgacaggtgggagatgccaactctgaatgaaggatgcctgtggaggaatcaaaggtgccacacaggacaatcttctgttatccacacagcgaagctgcccatgccttacatcaccatcaacaacttaaaccccagggagaagaaggatgtgttagccttcacctgtgaacctaagagtcggaactacacctacatttggtggctaaatggtcagagcctcccggtcagtccgagggtaaagcgacccattgaaaacaggatactcattctacccagtgtcacgagaaatgaaacaggaccctatcaatgtgaaatacgggaccgatatggtggcatccgcagtaacccagtcaccctgaatgtcctctgtgagtatcctttgttcctctgtgggccaggacaccagcttaactccaaacgaccagaggccaggcctctcagtctctctccggtccaagtatagacaactttacttctggacatcagacctggccatgactccctgccctgggaaatcctgggtaggcacagccttaaccaagaatataaggggaggggcgctcttgtcatgggacactaggggcccacagcttgtaatgagagaaacaggggaatacctcaggcttgggcttagtaaacatagatgggatttggctgtcacttgaggttgtgtcttggttcagagggtcactgtgtccctttaagagaccaggagcatccccttcccttggatgacatcacctgtggctttattctctttcctccagatggtccagacctccccagaatttacccttcattcacctattaccgttcaggagaaaacctcgacttgtcctgctttgcggactctaacccaccggcagagtattcttggacaattaatgggaagtttcagctatcaggacaaaagctctttatcccccaaattactacaaatcatagcgggctctatgcttgctctgttcgtaactcagccactggcaaggaaatctccaaatccatgatagtcaaagtctctggtaagtggatcccagcatccttggcaatagggttttaggtggagtctatctggctttcagagaagagtcaggaaaacatttgtattcccagactgtgtcccatgggcacaagcaaatcccaaattctcctcctgaaccctcccaacttatctctacagactctcttctgcttgtttttctgttttctcatggctgaccttgtgtctggcctgagaaaggtagggagggggctttatcagccctgagccctatgtggtagaagaggcttcacagagggacaagaaggagagtcctcaagatcaagttgcttctcgctgtcacgaacacatccccttctgccatgtctttgttttcttgtacctattccatgagctacaaggaacatctgaggctttgaaacaagctcacacttttcccccaaatgagaggaggaagccctttgggtgagggaggagcagctcagactctgcttcctgctctgctccgggctcctctggtgactggcctggccctgcctgactccacctggggtggaaccaacatgtgtggagaaagggccctggtggcctgtcctgaagttggctaaatcgagctgccagttgaagccaagcctcccccgggccaggctgcagggaaataagaagagagggagcttcagggctgactcctgagctgcatcctggctctgaagtcaccagctgtatgaggctttgggcacagcacgtgggacacagcacggaggacagtgactgatgcagagctagagaaatagggagattcacccctggggctctgcatggcaggaaaggggcagtgccaaaaagtgtgtaattatagagagggcaagaccacgagacactttatatatatctaatattagacttaccattaactaagtgtgcaatttagtgttgtgtaactatcacactatccatttccagaactttttcctcttaccatattaaacctctgtacccaataaacagtaactctcactccttctccccctaacccttaacacccaccattctactttctgtctctatgtaactggctattctaactatcttttataaatggaattatataataattatccttttgtgtctggcttatttcagttggcataatatcttcaaggttcatccattttgcacgatgtattgtaattttcttccttgttaaggttgaataacatttcaatgtatagatacatctcatttgcctacccacttatctttcaatggacttttcagttgtttccatttttggctagtgtgagtaatgcttctctgtacatcagtgtacaaatatttcttcaaatttctttcaattctatagggagtatgtccagaaggggaattgctggatcaaatggtaatttattgtttaattttttgaaaaacagccacactactttttacattggctataacatttcccattcccatcagcaatgcactagagctccaatttttccatctacttggaaacacctgttgtttagtgttgctgtcattgttgttgtttatcaaagccatcctaaagtgtgtgaggtgttgtaacattgtggttttgatttgcatatctctaagtattcgtgatgctgaggaactttgcatgggctatataaaaggttttgatttttatgaagtctgatttatccattttatttgttgcctatgcttttgttgttacaaccaagaaatcattgtgaaatccactatcatgaagtttttcttctaagagttgtatagtttttactcttacatttagatctttgatctattgtgggttaatttttgtacatggtgttaggtaaaggttccactcttcttgcccttggatatccacctttcccaatatcatttggtgagaacactgtcccttccccattgaacgatcttggcacactcgatgaaaatcatttggccatatatgcaagcatttctttctgggctatgatatttcattaatttctatgtcctcctttatgccagtaccacactgtattgattactggggctttgtagtaaatgctgaaatcaggaagtgtgagtcctccagcttcattcttcctcttcaaagctgtgtgtctatttagagtcatgagatgcaatataaattttaggacagatttttctttttctgcaaaaatgtcactgagattctgataggaattgtattgaatctgcagctcactttgggcagcactgtcctcctaacaatattgagtcttccaattcatgaacacaaaatgtctttcaatttattgatgtcatctttcatttctttcagcaatactttgtagatttcaggtataatcatttcacctctttggttaaacttattcctaaatattttattctttttgatgtgaatataaattgaaattatttttcttaatttcccttcagattgttcatggttagtgtattgaaatacaactgatgtttgaatgttgattttgtattgtgcaacattactgaatttattaattctaataggtttgttccatctttaggattttctacaaataagttcaagttatctataaacagaaataattttactccttccttccaatttgaatgtctttttaaaaattcttccctaatttttctgattagacctttcactactatgttgaataaaagtgtcaatagcaggcatccttgtcttttcctgctcatacagggaaagttttcagtctttctctgttatgtaagatgttagcattgggtttttcacatattgcctttatgttgaggtggttgccttccattcttagaatgtttttattatgaaaaaatactgaatttcatcaaatgcttttattgattcaatcttcttactgattatagttatattcatatttttgtgtgtttctaggagtttgtctatttcatctaggttatccaatttattggcatacaattatttatagtactttcataatcattattttattagaattggtagtaatcgcttcatttttcttttttctttttcttttaagacagagagacaggctctcactctgtaggccaccctaggatggaatacagtggtgtgattatggctcactgcagcctcaacctcctgggctcaagcaattctccttcttcagcctcccaagatgctaggactacaggtgcatgtcaacatgcccagctaattggttttttttttttttgtagagacagcatctccccaggttacctatgctggtccaaacacctggtttcaagaaatccttctgctgtgacctcccaaagtgctaggattaaaacatgacccaccatg

SEQ ID NO: 132675 - DNA, 2076 bp, Homo sapiens
gaggaaggacagcacagctgacagccgtactcaggaagcttctggatcctaggcttatctccacagaggagaacacacaagcagcagagaccatggggcccctctcagcccctccctgcacacacctcatcacttggaagggggtcctgctcacagcatcacttttaaacttctggaatccgcccacaactgcccaagtcacgattgaagcccagccacccaaagtttctgaggggaaggatgttcttctacttgtccacaatttgccccagaatcttgctggctacatttggtacaaagggcaaatgacatacgtctaccattacattacatcatatgtagtagacggtcaaagaattatatatgggcctgcatacagtggaagagaaagagtatattccaatgcatccctgctgatccagaatgtcacgcaggaggatgcaggatcctacaccttacacatcataaagcgacgcgatgggactggaggagtaactggacatttcaccttcaccttacacctggagactcccaagccctccatctccagcagcaacttaaatcccagggaggccatggaggctgtgatcttaacctgtgatcctgcgactccagccgcaagctaccagtggtggatgaatggtcagagcctccctatgactcacaggttgcagctgtccaaaaccaacaggaccctctttatatttggtgtcacaaagtatattgcaggaccctatgaatgtgaaatacggaacccagtgagtgccagccgcagtgacccagtcaccctgaatctcctcccaaagctgtccaagccctacatcacaatcaacaacttaaaccccagagagaataaggatgtcttaaccttcacctgtgaacctaagagtgagaactacacctacatttggtggctaaatggtcagagcctccctgtcagtcccaggggtaaagcgacccattgaaaacaggatcctcattctacccaatgtcacgagaaatgaaacaggaccttatcaatgtgaaatacgggaccgatatggtggcatccgcagtgacccagtcaccctgaatgtcctctatggtccagacctccccagcatttacccttcattcacctattaccgttcaggagaaaacctctacttgtcctgcttcgccgagtctaacccacgggcacaatattcttggacaattaatgggaagtttcagctatcaggacaaaagctctctatcccccaaataactacaaagcatagtgggctctatgcttgctctgttcgtaactcagccactggcaaggaaagctccaaatccatcacagtcaaagtctctgactggatattaccctgaattctactagttcctccaattccattttctcccatggaatcacgaagagcaagacccactctgttccagaagccctataagctggaggtggacaactcgaggtaaaattccaggggaaaacccctggtaccctggacaggtgagcccactcagaactcacccaaaatgttcggacaccccataacaacagcctacctcaaactgtaacccccaggataacaagttgatgaccttcacactgtgggacagtttttcccaaagatgtcagaacaagactccccccatccatgataaaggctccccacccctcttaaactgtcccttgcctcatgccctgccctctttccacctgggccaggataatgccagtccattagaatttccacatgtagtagccttcctgagggtaacaacagagtgtccagatatgtcatcctcaaccctcaaacttttacggtaacatctccagggggaatgtgggctctctccaatcttggcatacagggctccccaatagaaatgaacacagagatattgcctgtgtgtttgcagagaagatggtttctataaagagtaggaaagctgaaattatagtaaagtctcctttaaatgcccattgtgtgggatggctctcaccatttcctaaggagatacagtgtaaaaacgtgacagtaatactgattctagcagaataaaacatgtaccacatttgctaaaaaaaaa

SEQ ID NO: 132676 - DNA, 2977 bp, Homo sapiens
gagaacaaccatcgtaatggatgtaaggtggtatctcactgtagttgtgatttttattttcctaatgattagtgatgttgagcatgttttcatgtgcttattggccatttgtaaattaattttacatttcctcctttgtaatgtaagaggtagcacaccgtgcattgttctgcttcttgtttttctcactgtgcggtgtatcttggaaaccttccccagtgcacagacagaaggatacctcattctttgccacagctgaccagtatccatgatgtggatcatggctcatgacccagttctctatggataaacgtcagggtcgttcccggtctgtgaccatcaccaacactgccgtgactagtctagaatgggtgccatttcatgcatttgcaattcccagaagtacactggttagtcagcagggggcgacatcacacacagataacactcaggaaatggattcccctggacaggaacctggctttgctaaggaggtagaggtggagcctggtttccagcccttgccccaaatgacccttctggtccctgccatgtgcctgctccttcatggtgcctgctctgccaagggtttttgtgcagctccccacttcctcctggcatcacccatggggaaggggcaagtaccactcaaccccttctccttcacccttagcgaggagcttgatctgcctcaatccctcaagaggaaccccaagggatgtatagcaagaagggctaagcccatcctggctgcagagaggcataagagattgatcctgcacacctccacgaaggaaaataccctcttggacaaccgggtcatcgaatgtctaaccatggaagctgtagcaaagttcaacataatgaaagagagggagggtccttctcaccagccagcactcagcccacccaaagcaagatggcacatcctctggcagaagctcatgttcacagcctcacttttaaccttctgggaacctgcccaccactgccagagtcactactgaagccatgccattcaatgccacagaggaggaggaggaggagttttttctacttgcccacaatttgccccagaatcttacccgggctacaatctgggtacaaaagggcaaatgaggcacctctaccattacattacatcatatgtagtagacggtgaaataattatatatggggcctgcatatagtggacgagaaacagcatattccaatgcatccctgctgatccagaatgttcacccgggaggaccgcaggatcctacaccttacacatcataaaagcgaggtgatgggactggaggagtaactggacgtttcaccttcaccttatacctggagactcccaaaccctccatctccagcagcaatttcaaccccagggaggccacggaggctgtgatcttaacctgtgatcctgagactccagatgcaagctacctgtggtggactgaatggtcagaagcctccctatgactcacagcttgcagctgtccaaagccaacaggaccctctacctatttgggtgtcacaaactatactgcaggaccctatggaatgtgaaatacggaacccagtgagtgccagtcgcagtgacccagtcaccctgaattctcctcccggaagctgcccaagccctacatcaccatcaacaacttaaaacccaggggaggaataaggatgtcttaggcctttcacctgtgaacctaaggagtgaggaactacaccttacatttggtgggttaaacggttcaggagcctccccgtcagtcccggggtaaagcgaccccatttgaaaaacaggatccctcattcctaccccagtgttcacgaggaaatggaaacagggaccctattcaatgtggaattacggggaccgatatggtgggcatccgcagtttacccagttcaccctggaatgtcctcttatgggtccaggacctccccaggattttaccctttcatttcacctattaccgttcagggaggaagtcctcttacttgtcctgttctggcgggactctaaacccaccgggcacagtattcttgggacaattaatggaaaagttttcagcttaccaggggacaaaagctcttttattccggccatattactacaaagcatagcgggctctatgtttgcctctgttcgtaactcagccactggaagggaaagctccaaatccatgacagtcgaagtctctgactgggacattaccctgaattctactagtacctccaattccattttctcccatgggaatcactaaggaggcaaggacccactctgttccagaaggccctataaggtgggagggtgggacaacttcaatgttaaatttcatgggggaaaaccctttgttacctggaaggcatgaggccacttcaggaacttcacccaaaatatttcggacaaccttaaccaacagatgctcaaactgtaaaccaggacaacaagtggatgactttcacactgtggaccagtttttccccaagaatgtcagaacaagactcccccatcaggatgggggctctccccccccccttaactgtcccttgcctcatgccctgcctctttccacttgggcaggataatgccagttcattaggaatttccacatgtagtataggagcttcttgaggagtaacaacagagtgttcagattatgttcatcttcaaccttcaaactttttacgttaacatcttcagggggggaaatgtggggctctctcccaccttgccatacagggctccccaataggaaatggaacacagagtatattgccctgtgtgtttggcaggaggaaggtggtttgtatgaagacgtagggaaagctgaaattataatagagtccccctttaaatccacattgtgtggatggctcttgtccgtttcctaagagatacattgtaaaacgtgacagtaagactgattctagcagaataaaacatgtactacatttgctaaaaaaaaaa

SEQ ID NO: 132677 - DNA, 1134 bp, Homo sapiens
atgggtaaagactactaccagacgttgggcctggcccgcggcgcgtcggacgaggagatcaagcgggcctaccgccgccaggcgctgcgctaccacccggacaagaacaaggagcccggcgccgaggagaagttcaaggagatcgctgaggcctacgacgtgctcagcgacccgcgcaagcgcgagatcttcgaccgctacggggaggaaggcctaaaggggagtggccccagtggcggtagcggcggtggtgccaatggtacctctttcagctacacattccatggagaccctcatgccatgtttgctgagttcttcggtggcagaaatccctttgacaccttttttgggcagcggaacggggaggaaggcatggacattgatgacccattctctggcttccctatgggcatgggtggcttcaccaacgtgaactttggccgctcccgctctgcccaagagcccgcccgaaagaagcaagatcccccagtcacccacgaccttcgagtctcccttgaagagatctacagcggctgtaccaagaagatgaaaatctcccacaagcggctaaaccccgacggaaagagcattcgaaacgaagacaaaatattgaccatcgaagtgaagaaggggtggaaagaaggaaccaaaatcactttccccaaggaaggagaccagacctccaacaacattccagctgatatcgtctttgttttaaaggacaagccccacaatatctttaagagagatggctctgatgtcatttatcctgccaggatcagcctccgggaggctctgtgtggctgcacagtgaacgtccccactctggacggcaggacgatacccgtcgtattcaaagatgttatcaggcctggcatgcggcgaaaagttcctggagaaggcctccccctccccaaaacacccgagaaacgtggggacctcattattgagtttgaagtgatcttccccgaaaggattccccagacatcaagaaccgtacttgagcagaactgcctggttggcgtccacaagcaatacctctcgttccagcaggaccaagggagccagcctccaaacgggctgggcgtcctgaaggctggccaaaccggagctcaaggtcctgcccaggactag

SEQ ID NO: 132678 - DNA, 606 bp, Homo sapiens
atggacattgctgacccattctctggcttccctatgggaatgggtggcttcaccaacatgaactttggccgctcccgccctgcccaagagcccacccgaaagaagcaagatcccccagtcacccacgaccttcgagtctcccttgaagagatctacagcggttgtaccaagaagatgtaccaagaagatgaaaatctcccacaagcggctaaaccccgacggaaagagcattcgaaacgaagacaaaatcttgaccatcgaagtgaagaaggggatcagcctcccggaggctctgtgtggcacacagtgaacgtccccactctggacggcaggaccattcccgtcgtgttcaaagatgccatcaggcctggcatgcgacgaaaagttcgtggagaaggccttcccctccccaaaacgccagagaaacgtggggacctcattattgaattggaagtgatcttccccgaaaggattccccagacatcaagaaccatacttgagcagattctttcaagctacctgagctacctgagctccccaggactgaccagggacctatccagagctcaaggatttctggatctttctaccagttgtggaccatga

SEQ ID NO: 132679 - DNA, 2548 bp, Homo sapiens
  misc_feature (1)...(2548): n = a,t,c or g
actggtcggcggcggaaccggtggacggcgacagcgggtcggcgggccgcaggcggggcccgtggccaaaaactacctaccacccgtgggccgtggcccgcggcgcgtcagagaaggagatcaagcgggcctaccgccgccaggcgctgcgctcccacccagacaagaacaaggagcccggcgccgaggagaagttcaaggagatcgccgaggcctatgaggtgctcagagacccgcgcaagcgcgagatcttcgaccactaccgggaggaagccctaaagggcagcggccccagtggcgggtagcggcggtggtgccaatgctacctctttcagctacacattccatggagagcctcttgccatgtttgctgagttcttcggtggcagaaatccctttgacacctttttttgggcagccggaacggggaggaaggcatggacattgatgacccattctctggcttccctatggggcatggggtggctttaccaacgtgaacttttggccgctcccgctctgcccaagagcccgcccgaaagaaagcaagattccccaagtcacccacgaccttcgagtctcccttgaaggagatcttacagcggctgtaccaagaagatgtaccaagaagatgaaaatctcccacaagcggcttaaacccccgacggaaagagcattcgaaacggagacaaaatattgaccatccgaagtgaaagaaggggttggaaagaagggacccaaatcacttttccccaaggaaggagaccagacctccaacaacatttccagctgatatcgtctttgttttaaaggacaagccccacaatatctttaagagagatggctctgaatgtcatttatcctgccaggatccagcctccgggaggcttctgtgtgggctgcacagtgaactgtccccactctgggacgggcaggaccgatacccgtcgtattcaaagaatgttatcaaggcctgggcatgcggcggaaaagttcctgggagaatggcctccccctcccccaaaacacccgagaaaacgtgggggacctcattatttgaggttttgaagtgatctttccccgaaaggattccccaggacatcaagaaccgtacttgaggcaggttctttccaatatagctatcttgaggttccccaaggattgaccaggggaccttttccagagctcaaggatttctgggaccttttcttaccagttgtgggaccatgagagggtggggaggggcccaggggagggctttcgtactggctgaatgttttccagagcatatattacaatctttcaatagtcgcacactagacttcagtggtttatcgagctattagggcatcaggtggtggggacagcaggaaaagagcattccagtctgccccactgggtctcggcagccctccccgggaatgggccccacatccaccctccaagtcccctggccaaggggtgagaggcaagaccaagcaagattggactttgattcctcctgtgtcttttttgattctggctggtagataatgtcaacctgcagtctttggattcccagaccctggtacactcctccttttgctgttgtgtgatcagcttggtgcttagtctgtatttgtctcccatggtcttgctctttctcctgggagaattctgtcttctcttttgggccattttcaaaattgaggaacctaaactattcctgcagaactgcctgggttggcgtccacaaggcaatacctcttcgttccagcagggaccaaggggagccagccttccagttgagtgacttcaggcaagtgcaagccacctctcccttggatggtctggggagcctggccctcaacaagggggcctttcctgaccttttggctccaagtggaagctgaatgtcctcactttgtgggtcaacactcttttacatttcttgtaaagggcaatcttgggcacacgttgggggtttaaccagtgggcccagggtaattttttttgttttcatgggactatgggactcttttcaaaggggatcttgatcctttttgaatttttgcaacagcccccctagatacaaatccctttttggataaaaggggtcttttgctttcctgatttaccaggagcacttgtggaaccgtcctgtaaaatatgtttttttataattcccatgtattagttgggtgtaccacttcaaaaacctgtcccccggcagcccagtgcctctctgttataggggccataatgggaattctgaaggaaatcttggggaggggaaggggagttggggaccaaatgtcttgttccctgggggggcccagtcccagtgcttcagacctttaggactcattgttaagttggccactgcccaacctggaggacccaaagtgtgtgacntaagtcaatgacatgtgcgacagcattaaaagacttgatgctacacctcatggatcaaactactgggggtcctttattaagggcccctgagggggccctgcttttgggtagcagacaggctgtcaggattctccttatagggagcctttttaaa

SEQ ID NO: 132680 - DNA, 1548 bp, Homo sapiens
tcaactccatcgaatagctccaaccccagcggcccaccgagccccaactccccccacaggagccagctccccctcgaaggcctggagcagccggcctgtgacacctgaagccgccagctcgccacaggggccagggagctggagatggcctccagcgtcagtgccaagactgagcgggccctccagtgttgtccaaggaaatgtagaatcactttgtagatatggagatgaagaagacaaatctttattataatattgatcagttttatgccgcattgttcgtggcagtagaccacatctgttcgtctgcacagctgtgaggcgatgctgttccatcagctcctcggaggccgtcacgtcgaacaccgggttgcggaagccgaggggcgctccagccggggccgccgcctcgtgcctcctccacctgagcctccccgcgcggcgcagcagcggcggcgccaccagcaggaccagcagcgccagcagcacggcagccgccacgccgcccgccagcccagccgcggagctgccccagacgtgtgcgcccgactcccgcatggtcgcctccaggacgccgagggcctcgccgttctcggcgacgtccgccaggagggcccgggccagccgccccgctccgcctgtctcgggcccattctccaccagcaccacctggatctccgtatcggcctcacggagccgggacgagcgtggcaccttggacacggccacctgcagcccgtggtactgaggcagacccaggaaggtgtccagtatccgcgcccggtaccgctccaggtcaaatgcggggccgtgggtcagcaacacaacggctccacagaggtcacagcactgcccctggggccggagggcgctgtggcaggcggcctgggggcagcggccgcccaggggctggagcagggccgcgcagatccacggctgcgcctccgcgttgccgcagacgcagcccgacgggtccgcgcagtcctcggggcccacgctcagcgcgcccggcccgtggaagcgtaggcggcccgcgcgggacgccaggaaaacagccaggtcctcgtcgcgcgtgaacgtccggcccagagccgagatgctgcggacacgcacggggctagcgccagggccgagccccacgcggaaggaggcactaggcggaaagaagacgtcgtcgtggcggcagggcacgcgctcggcgtccacgaagaagaggccaggtgcctcgtccccagagcgccacaggtgcgggtcatgccaggagaagcggtcagagtcgcggaagacggcaggttcgcccgcgccacagtccaggtgcgagcccacgtctgagacgccgaatccggctcctgaagccaggacgagttccccatccagcggcaggagcttgtccgccgggaactcaacggcgccgccggcgcacggggtccggttctggctccagttggctgcgacgtcgaagtccgtgttggggacccagagtttggagaccgcctgggtcagtgcgcagagctgcagccacagcaggacccggcccaggacgcccat

SEQ ID NO: 132681 - DNA, 357 bp, Homo sapiens
gtgcgattcatctttctgtctctaggtcttagcatgtgcacggcacagagcaggcgctcagagtgccttcagtgaaggaataaatgaccataccaccaggcacagagtgaggcctttagaaaccctgagcatcatcgggtgcgcccaccacttctgtatgtgactcaaagtaagtgtaaggaaatccagttctgttttgtttctgaaatactagatgtcaggaagggtgtttaggtgtcaggctttggtggcctacactgtgctttcggaattattcactgaggcgaaagaacagagattagctactgatgaaggacaaaaagaattttctgctgaatcctgaatttgccaggatga

SEQ ID NO: 132682 - DNA, 1851 bp, Homo sapiens
atggccagcaaagaacattggcaagaaatgacaaagggcttaggaggaaaatcagaaaaatggggtatcttgagagctgaaagaagggagtttcaaaaagcagggcctggtcaactgtgtcaaaaccagctgagagtgacgtggaaccaaacctgcagtatctctgagatatgcatgtaccaagttctaaaagttagaaatacaaagactgctcagaatgaccacagaatgtatcagacacacgaagcaaaaaaagttcggctctccgggcctccaaccgcccttaccgggcaatgcgaagtccagggcggacagcacagccctgccagcactccctgcccagcagaaagagaccaagcaacaagaaccaggggagagcagctaggagccaggagggagttcgccttcgcgaatggagcgtgccgaagccgctccagcccagagtctgctggcggcaccggaactgggcagggttggggggccccccatctgggcccggccttagcgagacgagtgacagggccgccccagcatgggtctcccgggccgcggacccgccccacgccgtatccagcacgctgtcctcccgccccatctttgtgccggccatcgtgtggtcgcgtctgcgcgctccgcccggtctgccggcgtgagaaagagctcgtgtcgttcccaagttcagaccagaggggacggcgaagcgcgaaaaagttccctgcgcccaccgctgcctggacaggggacgaggcctgtcggcgcgggccggcggcgcctcccggggacaaggggcggttgcgccccgcagcggccggactcccggaggcccggaagctcctggggctggcgtaccctgagcgccggaggctggcagcatgtgcacggcacagagcaggcgctcagagtgccttcagtgaaggaataaatgaccataccaccaggcacagagtgaggcctttagaaaccctgagcatcatcggcattttgctgggtatgcctcctaaactgtgtgaacagaaaactttgattgcatcagaaactttaaaaacacagtctaccatgaaatatgtacagacgtgtgctgaaagcagctttagcataactgtgttacattcctcttctaaaggaaggcctaagccgcccctttggggaggaattcgcagctgtcttcatacagattcccgggctgcggccggcggcgtggcctgcagtcggcggctacacctggactggcgtcgcgttcctgcgcaggggtgggtcctgcgggttggatgccgggctcggggaggaggtggcgggcgcccgcggggaaggtatcccagtgcccgacagccaagcagggagcacggctccacagctcctttgcatgtaggggaaaaggaaatgtctttgcggcgaagtcgggattcaactttgcacatggtgatcgtgcgtggctcgcgaagctgccaggcttttgaaaatgtattcgataaggcgttggtccgaagtgagtggatggttagaaacagtggtgtcattttagacttagcggaagtggagtgcaggaacgctacatgcagttctcccatcagttgtgaaagtcgttgtaatgcggatctcgcagtctttgtggttctgggatcagaaggaagcccctggtcacatgtagaatcctttgagcagcaagatgctgtagaaggacagccattcatgggatctatggcgcactctgtgctagggcagaatgccagggaagagctgcctgtcttcagcgcccttgctgggaaccacacgccagaacccgaccctgccatgctttgtgcttcaggcagcaggaccccacccctaacagagtctcaagtcagacactaa

SEQ ID NO: 132683 - DNA, 383 bp, Homo sapiens
gacaccatagtgtctgctcctgtctcatgggctagacctagatatgtgactgccattaacttcaaggaggcatcccccacatctgtggaagtgagagagcccaggacgagtgtcaacaaggccctccaaagtcgctgtagtactcttgctcctacagttactttgacgagccagtggagttaaggaacagttctttctttaggtggaatcacagttcagattcctattggaaaaaaaagtccagcaaagatactgaaccagttctgaaacccccaggttattcagccaggtatgaatgcaaaactgtggggtcgtcctagtgaatccaggcatttctccgaaaaaattggtgatatcatgacgacataaaaacccttgtaagg

SEQ ID NO: 132684 - DNA, 777 bp, Homo sapiens
atactacgcccttttacgtaagggacttgatcatcgcagattttgttatccacagggtcgtgaaaccaattcccccatgctgagggactcctggaataatactaacttcacagagttctgaggactaagccacagaacaaatgtagagtgcttgtcacagtgcctggcaggtcctaacccttaggaaatgttagctgtagtcacagaagctttcaaacagctcgtgtagactatagtcttatatatgttctagcttggggccaaaaaaaggaagtttgggagctcagaaactggcaaacacatgctttaatgaaattgaaaaacaagctgagagagcccaggacgagtgtcaacaaggacctccaaagtcactgttgtactcttgctcctacagttactttgacgagccagtggagttaaggagcagttctttctctagctgggatgacagttcagattccgagtatgaaacacatttgcttcacctcaaattagtttaacctaatttggctgtttttaattgcagacctactgctcgccgcaagccagattatgagccagttgaaaatacagatgaggcccagaattctttttgcaaaactgcccacaatctttggagcctaacatttccttttccttgtcttctctagtatgagaccagggcccgcctagagagctggtctctgtcatgtctacggtatgaacacatttcatctggataggactgtttccttttccaagatattttagcaaccattattcgatgctctgatctct

SEQ ID NO: 132685 - DNA, 369 bp, Homo sapiens; identical to SEQ ID NO: 122077

SEQ ID NO: 132686 - DNA, 381 bp, Homo sapiens; identical to SEQ ID NO: 120249
  misc_feature (1)...(381): n = a,t,c or g

SEQ ID NO: 132687 - DNA, 846 bp, Homo sapiens
atgactggcgaggcctcaggaaacttacaatcacagcggaaggcaaagaggaaggaggcacgtcttacatgtttagagccggtggaagaggatcacaactccttgccagcaagggaagaaaaccagacagagaatgagtctgacgaattgacagaagcaggcttcagaaggtgggtaataacaaactcctccaggctaaaggagcatgttgtaacccaatgcaaggaagctaagaactttgaaaaaagcttaaaggaattgctaactagaataaccagtttagaggataacataaattacttgatggagccgagaaacacagcacgagaacatcgtgaagcttactcaagtatcaatagccaaattgatcaagcagaagaaaagataccagagattgaagatcaacataatgaaataaagcgtgaagacaagattagagaaaaaagaatgaaaaggaacaaacaaagcctccaagaaatatgggactatgtgaaaagaccaaatctatctttggctggtgtacctgaaagtgacgaggagaatggaatcaagctgaaaaacactcttcaagatattatccaggagaacttccccaacctagcaaaacaggccaacattcagattcaggaaatacagagaacaccacaaagatactccttgagaaaaacaaccccaagacacataattgtcagatacaccaaggttgaaataaaggaaaaaatgttaagggcagccagagagaaagatcaggttacccacaaagggaagcccatcagactgacagcagagctctgcagaaaccgtacaagccagaagagagtagggggccaatattcaacattctaa

SEQ ID NO: 132688 - DNA, 1442 bp, Homo sapiens
atgtaggaagcatgactggcgaggcctcaggaaacttacaatcacagcggaaggcaaagaggaaggaggcacgtcttacatgtttagagccggtggaagaaccaggctcaggaacacatcctcccatgtgttatctagcaccaccaatgtggaagtgccaaaaaccagaaacaggaatcaaagaaggtgacagggatcacaactccttgccagcaagggaagaaaaccagacagagaatgagtctgacgaattgacagaagcaggcttcagaaggtgggtaataacaaactcctccaggctaaaggagcatgttgtaacccaatgcaaggaagctaagaactttgaaaaaagcttaaaggaattgctaactagaataaccagtttagaggataacataaattacttgatggagccgagaaacacagcacgagaacatcgtgaagcttactcaagtatcaatagccaaattgatcaagcagaagaaaagataccagagattgaagatcaacataatgaaataaagcgtgaagacaagattagagaaaaaagaatgaaaaggaacaaacaaagcctccaagaaatatgggactatgtgaaaagaccaaatctatctttggctggtgtacctgaaagtgacgaggagaatggaatcaagctgaaaaacactcttcaagatattatccaggaaaacttccccaacctagcaaaacaggccaacattcagattcaggaaataccagagaacgccacaaagatactccttgagaagagcaactccaagacacataattgtcagattcaccaaagttgaaatgaaggaaaaaaatgttaagggcagccagagagaaaggtcggggttacccacaaagggaagcccatcagactaacaggcggatctctcggcagaaactctacaagccagaagacagagtgggggccaatattcaacattcttaaagaaaagaatttttcaacccagaatttcatatccagccaaacctaagcttcataagtgaaggagaaataaaatactttacagacaagcaaatgctgagagatttttgtcaccaccagggcctgcccttaaaagagctcctggaaaggaaggcacttaaacattggaaagggacaacccggtaccagccactgcaaaaacatgccaaattgtaaaagaccattcgagactaggaagaaactgcatcaactaacgagcaaaatcaccagctaacatcataatgacaggatcaaattcacatataacaatattaactttaaatgtaaatggactaaatgctccagttaaaagacacagactgggcaaattggataaagaatcaagacccatcagtgtgctgtattcaggatacccatctcacatgcagagacacacataggctcaaaataaagggatggaggaagatctgccaagcaaatggaaagc

SEQ ID NO: 132689 - DNA, 2216 bp, Homo sapiens
  misc_feature (1)...(2216): n = a,t,c or g
acccgactgcagacataccgacccgcaatccgggtcgacccacgcgtccgcattgttaaagctcggcgctgacaagatctgaggcttttctatttgaaggacacaatgttttccaaactagcacatttgcagaggtttgctgtacttagtcgcggagttcattcttcagtggcttctgctacatctgttgcaactaaaaaaacagtccaaggccctccaacctctgatgacatttttgaaagggaatataagtatggtgcacacaactaccatcctttacctgtagccctgggagagaggaaaaggtattttacttatggggatgtaggaaggcagaaaatattttggacttcctggagttcttacagtgncttgtccaaccaaggggcattgtcaccccaagattgtgaaatgctctggaagagtcaagtgggacaaaattgacctttaacatctagaagctttctataataacggtactttggtgaatatgagggagtattattactaaaccttttcaacctaccacaaagttcttccctatgaatacaggagtggaggctggagagactgcctggtaaactagcttcgtaagtgggggctattaccgtgaagggcattcagaaatacaaagtcaaagattgtttttgcagctgggaacttctggggtaggacgttgtctgctatctccagttccacagacccaaccagttacgatggttttggaccattttatgcccgggatttcgacatcattccctattaatgatcttgcccgcacatggagcagtgctctttcaaggatccaaaatgtgggctggcgtttcatgggtaggaaccaattcaggggtgaagcaggcgtttgttgttccggatccagggttacctaatggggagtgcggagagctctggcaccagggaccaggttctctttatttgcttgatggaaatacagacaggattggccagaacttggtaggatgggctggctgttgattatgaaaatgtcagacctgatatagtcctccttggaaaggccctttctgggggcttataccctgtgtctgcagtgctgtgtgatgatgacatcatgctgaccattaagccaggggagcatgggtccacatacggtggcaatccactaggctgccgagtggccatcgcagcccttggaggtttttagaagaagaaaaccttgctgaaaatgcagacaaattgggcattatcttgagaaatgaactcatgaagctaaccnttcctgnatgttggtaactgcccgtaagaaggaaaaagggatttatttaaacgcctanttggccattaaaggaaaccaaaagatttgggatgcttgggaaaggtgtgtctacgacttcaggataatggacttctgcccaagccaacctcagtggcgacattatcgaggtttgcgcctccgcatggtgatcaaggaggatgagcttcgagagtccattgaaattattaacaagaccatcttgtctttctgagggtagccagctgttttcagtgggtccctggggagccagctgggagacaggtgggtcctgttaaaagctttatttcctaatgtggggcacattcccactccccatgagttcttcaaaaacttttttttttgaatatatttttttttcagtttgatacataatagaaccaacgttttatggaacctgccgttttgctttggtaacgtaacttaaataatgtatgggcctctattatttcagttgaaagtgtttttgaagtgccatgtgtacctttccctaaggtggaaatgcatcctatataccagaccagccctccaaatccaagtcccttccagtataaattgatatatgtttttataaatttcccctcacgggtataagtgtttccatatttggaaaaaagttaccccccgggggaattgccataaaaggccttccatccttataaagtgaaatccattgttatttgaattttaggaaggattaatggttaagtgtatataaaatacctaatattaagtaaacttcatattggccaacccccagggttgtattctatggatgtcattattttgaattaagaattagtgtttaacattcctaaattgttttgagtgcctgaatattaatttgtaaaaaatgttaattttcaatacttctttaaatttaaaataaagcttatatttcaaatgtcaaaaaaaaaaaaaaaaa

SEQ ID NO: 132690 - DNA, 348 bp, Homo sapiens
ggcacgagcaaaggggcttgagaaggcccggaggcgaagccgaagagaagcaactgtgccccggagaagagaagctcgcccattccagactgggaaccagctttcagtgaagatggcagggccagaactgttgctcgactccaacatccgcctctgggtgggcctacccatcgttatcatcactttcttcgtaggcatgatccgccactacgtgtccatcctgctgcagagcgacaagaagctcacccaggaacaagtatctgacagtcaagtcctaattcgaagcagagtcctcagggaaaatggaaaatacattcccaaacagtctttcttgacacgaaaatatta

SEQ ID NO: 132691 - DNA, 801 bp, Homo sapiens
atgccccggagggcggagaactgggacgaggccgaggtaggcgcggaggaggcaggcgtcgaagagtacggccctgaagaagacggcggggaggagtcgggcgccgaggagtccggcccggaagagtccggcccggaggaactgggcgccgaggaggagatggaggccgggcggccgcggcccgtgctgcgctcggtgaactcgcgcgagccctcccaggtcatcttctgcaatcgcagtccgcgcgtcgtgctgcccgtatggctcaacttcgacggcgagccgcagccctacccaagcgctgccgcctggcacgggccgccgcatccacagctaccgaggcgtgctgggatttcggccacaacgtccgaccgaaagtttttaagcagggacatgacattgtcagatttatatactgaaaagctcacccaggttgccaagtggtttggaggggaaagactgctgtcgaggaagcagttaggtagttgtgaaaacccaggtcacctttggctcttcagagatgcagggacacacgatgggcttctggttaaccaaactgaattatttgtgccatctctcaatgttgacggacagcctatttttgccaatatcacactgccagtgtatactctgaaagagcgatgcctccaggttgtccggagcctagtcaagcctgagaattacaggagactggacatcgtcaggtcgctctacgaagatctggaagaccacccaaatgtgcagaaagacctggagcggctgacacaggagcgcattgcacatcaacggatgggagattga

SEQ ID NO: 132692 - DNA, 1398 bp, Homo sapiens
ttacttggagtgctgcaaggcaaaggtgcactttttgtaagttgcatacagcaagaggatagagcgcagcatctgtttgcacatagtgactgtcatctgaatctgaggctccttcagtccaatgggccactggtgctccctgctaatgattttgcaaaaggctgacttgtctgaaactctgaaagtcccggtccactttggtggctgagctgtgataaccctgccaaagacagaatctactccactgaggcggatgggctggggcttcctgaccagtcctttgttgttcatcgtgcgcaactctgatgtgtggcagggtaacttgggactcactccagattccaggaatgggctgtctaggactagagtgacctcttgaaagcacagctgcacttcaaggtcggacggtgtgtgtgggaagcagggggaggccttgaatgggtgcttggaggaaggtgtaggtgtcgtgtgccgcagccattggaaactctcatccagtggggtccatggtgaccagagctggtatcctgccattgacagtccttttcccttccgcttgcctctgctcgacttcccttgcgcttgcccttcggtagctttccgttggctccgcttccctttgctttcctttcctttcccttcgcgtccgtcgctttccttggcttgcgtctcttccttcgtttgcgttagctttcggacgctgcgtttgtttcgtttccgttctttttgttcgttgcggttgctgtgtttgcgtcgtgtcgttcgtttccgcgctcctttccctccctgccttggttgttttccctccgcgctgtgtttccgttcctgttcttccgtcgttacttccgtggctcccttctggctctccctgcctttcgccttgccgttcctgccgtgtttccgtgcccttgcttcgtacactctcccagtatcaccatcagctctgagggactgtcttctttctaaaatgacccacaggaagccaagaatttttaggactgaagggtcaatcacagtcactcgttcattcagctgaagagggaactggagcactgggactcggtagctgtggatgcggcggcccgtgccaggcggcagcgttgggtagggctgcggctcgccgtcgaagttgagccatacgggcagcacgacgcgcggactgcgattgcagaagatgacctgggagggctcgcgcgagttcaccgagcgcagcacgggccgcggccgcccggcctccatctcctcctcggcgcccagttcctccgggccggactcttccgggccggactcctcggcgcccgactcctccccgccgtcttcttcagggccgtactcttcgacgcctgcctcctccgcgcctacctcggcctcgtcccagttctccgccctccggggcat

SEQ ID NO: 132693 - DNA, 4864 bp, Homo sapiens
acgcagctccgccccgcgtccgacccgcggatcccgcggcgtccggcccgggtggtctggatcgcggagggaatgccccggagggcggagaactgggacgaggccgaggtaggcgcggaggaggcaggcgtcgaagagtacggccctgaagaagacggcggggaggagtcgggcgccgaggagtccggcccggaagagtccggcccggaggaactgggcgccgaggaggagatggaggccgggcggccgcggcccgtgctgcgctcggtgaactcgcgcgagccctcccaggtcatcttctgcaatcgcagtccgcgcgtcgtgctgcccgtatggctcaacttcgacggcgagccgcagccctacccaacgctgccgcctggcacgggccgccgcatccacagctaccgaggtcacctttggctcttcagagatgcagggacacacgatgggcttctggttaaccaaactgaattatttgtgccatctctcaatgttgacggacagcctatttttgccaatatcacactgccagtgtatactctgaaagagcgatgcctccaggttgtccggagcctagtcaagcctgagaattacaggagactggacatcgtcaggtcgctctacgaagatctggaagaccacccaaatgtgcagaaagacctggagcggctgacacaggagcgcattgcacatcaacggatgggagattgaagatttctgttgaaacttacactgtttcatctcagcttttgatggtactgatgagtcttgatctagatacaggactggttccttccttagtttcaaagtgtctcattctcagagtaaaataggcaccattgcttaaaagaaagttaactgacttcactaggcattgtgatgtttaggggcaaacatcacaaaatgtaatttaatgcctgcccattagagaagtatttatcaggagaaggtggtggcatttttgcttcctagtaagtcaggacagcttgtatgtaaggaggtttatataagtaattcagtgggaattgcagcatatcgtttaattttaagaaggcattggcatctgcttttaatggatgtataatacatccattctacatccgtagcggttggtgacttgtctgcctcctgctttgggaagactgaggcatccgtgaggcagggacaagtctttctcctctttgagaccccagtgcctgcacatcatgagccttcagtcagggtttgtcagaggaacaaaccaggggacactttgttagaaagtgcttagaggttctgcctctatttttgttggggggtgggagaggggaccttaaaatgtgtacagtgaacaaatgtcttaaagggaatcatttttgtaggaagcattttttataattttctaagtcgtgcactttctcggtccactcttgttgaagtgctgttttattactgtttctaaactaggattgacattctacagttgtgataatagcatttttgtaacttgccatccgcacagaaaatacgagaaaatctgcatgtttgattatagtattaatggacaaataagtttttgctaaatgtgagtatttctgttcctttttgtaaatatgtgacattcctgattgatttgggtttttttgttgttgttgttttgttttgttttgtttttttgggatggagmctcactcttgtcacccaggctggagtgcagtggcgccatctcggctcactgcaacctctgcctcctgagttcacgtaatcctcctgagtagctgggattacaggtgcctgccaccacgctggccaatttttgtacttttagtagagacagtgtttcgccatgttggccaggctggtttcaaactcctgacctcaggtgatccgcccacctcagcctcccaaaatggtgggattacaggtgtgtgggccaccgtgcctggctgattcagcattttttatcaggcaggaccaggtggacttccacctccagcctctggtcctaccaatggattcatggagtagcctggactgtttcatagttttctaaatgtacaaattcttataggctagacttagattcattaactcaaattcaatgcttctatcagactcagttttttgtaactaatagatttttttttccacttttgttctactccttccctaatagctttttaaaaaaatctccccagtagagaaacatttggaaaagacagaaaactaaaaaggaagaaaaaagatccctattagatacacttcttaaatacaatcacattaacattttgagctatttccttccagcctttttagggcagattttggttggtttttacatagttgagattgtactgttcatacagttttataccctttttcatttaactttataacttaaatattgctctatgttagtataagcttttcacaaacattagtatagtctcccttttataattaatgtttgtgggtatttcttggcatgcatctttaattccttatcctagcctttgggcacaattcctgtgctcaaaaatgagagtgacggctggcatggtggctcccgcctgtaatcccagtactttgggaagccaaggtaagaggattgcttgagcccagaacttcaagatgagcctgggctcatagtgagaacccgtctatacaaaaaatttttaaaaattagcatggcggcacacatctgtaatcctagctacttggcaggctgaggtgagaagatcattggagtttaggaattggaggcggcagtgagtcatgagtatgccgctgcactccagcctgggggacagagcaagaccctgcctcaaaaaaaaaaaaaaaaaaaattcaggccgggaatggtggttcacgcctgtaatcccagcactttggggggtcgaggtgggcagatcacctgaggtcaggagttcgagaccagcctggccaacatggtaaaaccccatttctactaaaaaatacaagaattagctgggtgtggtggcgcatgcctgtaatcctagctactcaggaggctgaggcaggagaatcacttgaccccaggaggcgaagattgcagtgagctgatatcgcaccattgtactccagcctgtgtgacagagcaatactcttgtcccaaaaaaaaaaaaaattcaaatcagagtgaagtgaatgagacactccagttttccttctactccgaattttagctcctcctttcaacattcaacaaatagtcttttttttttttttttttttttggggatggagtctccctctgttgcccaggctggagtgcagaggtgcgatctctgctcactacaagctctgcctcccgagttcaagtgattctcctggctcaccctcctgagctgggattacaggcgcctgccaccatgcctggctaattttgtgtttttagtggagacggggtttcaccatgttgtccaggatggtcttgatctcctgaccttgtgatccacccacctcagcctcccaaagtggtgggattacaggtgtgagccaccgcgtccagccagctttattattttttttaagctgtctttgtgtcaaaatgatagttcatgctcctcttgttaaaacctgcaggccgagcacagtggctcatgcctgtaatcccagcattttgggagaccaaggcggatggatcacctgaggtcaggagctcaagaccagcctggctaacatggtgaaacctcatctccacttaaaatacaaaaattgccggccgcggcggctcatgcctgtaatcccagcactttgggaggcctaggcgggtggatcacgacgtcaggaaatcgagaccatcctggctaacacgggtgaaaccccatccctactaaaaatacaaaaaaaaattagccgggcgtggtggtgagcgcctgtagtcccagctactcgagagcctgaggcaggagaatggcatgaacctggaaggtggagcttgcagtgagctgagatggtgccactgcactctaacctgggcgacagagtgagactccgtctcaaaaaaaaaaacaaaaaccaaaacttatccaggtgtggcggtgggcgcctgtgaggcaggcgaatctcttgaacccgggaggcggaggttgcagtgagccaagatcacaccattgcactccagcctgggaaacaagagtgaaattccatctcaaaaccaaattttcaaaaaaaaaacatgccgcttgagtactgtgtttttggtgttgtccaaggaaaattaaaacctgtagcatgaataatgtttgttttcatttcgaatcttgtgaatgtattaaatatatcgctcttaagagacggtgaagttcctatttcaagttttttttgttttgttttgtttttaagctgttttttaatacattaaatggtgctgagtaaaggaaataggcagggtgtgttgtgtggtgttttaactaggcgcttctctctcagagagttttgaaacctgtttacataaaggcccaagatgggaaggagatccaaacataagccaccagcctcattccaagtctcttctctttccaaccctggattttttttttttatttaacattgtttcttttagctttatttttcttataaaagaaatgtatcactataaaaaattacacactacagaaaaatattaagaagaaaaacattcacatcggaaacaaagttttttcccatgaaaacagaacccaaaagggtaagtggttagtatttcaccagcaattatgttgagaataaggccaggcgaggtggctcacgcctgtaatctcagcactttgggaggccagggcaggcagatcatctgaggtcaggagtttgagaccagcctggccaacatggtgaaaccctatctctactaaaaattaaa

SEQ ID NO: 132694 - DNA, 1434 bp, Homo sapiens
atgccccggagggcggagaactgggacgaggccgaggtaggcgcggaggaggcaggcgtcgaagagtacggccctgaagaagacggcggggaggagtcgggcgccgaggagtccggcccggaagagtccggcccggaggaactgggcgccgaggaggagatggaggccgggcggccgcggcccgtgctgcgctcggtgaactcgcgcgagccctcccaggtcatcttctgcaatcgcagtccgcgcgtcgtgctgcccgtatggctcaacttcgacggcgagccgcagccctacccaacgctgccgcctggcacgggccgccgcatccacagctaccgagatcctactatgttgacagacatgatgaaagggaatgtaacaaatgtcctccctatgattcttattggtggatggatcaacatgacattctcaggctttgtcacaatcaccccagactatgtccctcctcttggaaactttgatgtggaaactttagatataacacctcatactgttactgctatttcagcaaaaatcagaaagaaaggaaaaatagaaaggaaacaaaaaacagatggcagcaagacatcctcctctgacacactttcagaagagaaaaattcagaatgtgaccctacgccatctcatagaggccagctaaacaaggagttcacagggaaggaagaaaagacatcattgttactacataattcccatgcttttttccgagagctggacattgaggtcttctctattctacattgtggacttgtgacgaagttcatcttagatactgaaatgcacactgaagctacagaagttgtgcaacttgggccccctgagctgcttttcttgctggaagatctctcccagaagctggagagtatgctgacacctcctattgccaggagagtcccctttctcaagggaagtggcccaggagaggaggcgtggacaggtatcccagtgactccagtcggagtcagcttgggtagcatggcccgcggaagacagaccgggcgaacggggcgggccccaggctaccgagctgcagctgacaggcagtccggcggcgtcgggtctccatggatacgggggtggggccaggcggcggcgggcactctctgcgggtcccgcggctcccgcggcttccggcccactcagcgcctccagaggcctcaggccacacccatcctcttgagcacccacgaattctcgggcactatgataggcctgtgcaacgtcacgtcctcgccggcgtttgctctctactcccacgctatagaacacagaagcctggacgccggcggcgaggttgtagtgcacgcgcgttatggtcgttacacggcgcgtggggtcttgccgtctccctcaactgctccaggctcaggttgcgcactcagtgtccgcagtgagatgggcacagtcgattaa

SEQ ID NO: 132695 - DNA, 1174 bp, Homo sapiens
cggacgcgtgggttttcgccggaagtggaagaccaggcagcccagctgaaggcaggtaagctcggctcacagtcgcaggagagttctggggtacacgggcaaaggggcttgagaaggcccggaggcgaacatatgtagaagcaactgtgccccggagaagagaagctcgcccattccagactgggaaccagctttcagtgaagatggcagggccagagactgttgctcgactccaacatccgcctctgggtggtcctacccattcgttattcattcactttctttcgtagggcattgatccgccactacgtgttccatcctgcttgcagagcgacagagaagcttcacccaggggaacaagtatcttgacagttcaagtcctaatttcgaaggcagagttccttcaggggaaaattgggaaattacattcccaaacagtctttttttggacacggaaatttttattttttccgaacccagaggatgggattttttcaaaaaaacttaaacgggaggtagtgccaccttctcctatgactgatcctactatgttgacagacatgatgaaagggaatgtaaccaaatgtcctccctatgattcttattggtggatggatcaacatgacattctcaggctttgtcacaaccaaggtccccatttccactggaccctccggttttaagcctaatggttacagcaagggaatcggagctactcaccatttagatgcatccctgggtgaggttttgcatccctgggtacttccctcaatgtattttgggctttcggagcattttactctctggatttctgggggcaaagataatggccgctggaaccaatcacgaatgatggcaggagcaggatgacgggagccagccatgggccatggcccgcagacagcggacgacgctttccaaacaaaaggtgggaagctttgggagctgacggatcaccagtgggcactagatgctgccggcgaggatgctgcatgaccaacgcgctccacttcgaaggcgcgttcaagatggacggacggtcctgtacagtagggcgaccggccagggatggggtgtgtcaggaacttggagttgcacttaaccttgtaactttgtttggagctggcacctcttgaaataaaaaggaggatgcacgagctggcaggcatgcaaa

SEQ ID NO: 132696 - DNA, 443 bp, Homo sapiens
cagccacaataatcagagatggagcaaaccagtgccatccagtctttatgcaaatgaaatgctgcaaagggaagcagattctgtatatgttggtaactacccaccaagagcacatgggtagcagggaagaagtaaaaaaagagaagtaatattaaagattattcaacacctctcacatcttacagatctataaggtcacatgcttttaaaatagtagcaagttaaacttcactcttgaattctttacaatctaagtcaaactaagttataatttaggattgtctttaaacagccattcagaaacaaaactgtagaactgtgtatttgattgggaatggtgcttttgccaacttaaaaggattaaagtaacggagatatacacaaattttaaaattatgtgtgatcacaagactaaagataattaaaaagaaaaccacagaaaa

SEQ ID NO: 132697 - DNA, 1478 bp, Homo sapiens
gcacttacaccggtacttaagcgcggaccggcgtgtccttgagacttatagagtgttgacttccggcttcggagcggtgagtgttcgttgtgccagcgacttaaaaagagaattaaatatggggtgatgttgagaaaggcaaggaaggttttttatttatgaaggtgttcccagtgccacaccgtttgaaaaggggaggcaagcacaagactgggcccaaatctccataggtgtcttttgggcggaggacaggtcaggccccctgggatactctttacacagccgccaataagraacaaaggcatcatctgggggagaggatacactgatgggagtatttggagaatcccaagaaagtacatcccctggacacaaaaatgatctttgtccggcatttaagaaagagggaagaaagggcagacttaatagctttatcttcaaaaaagctacttaattgagtaattaattgggccactggccttatttatttacaaaacaggaaatgttcttcttgactttttttattgtgttaccatccttttaataggtctccattacacccagaatttcagatcatggaatgacttgacaggaatattttgttggggcagtcctggattttaaaacttaaggactgggcttggtggggttaaaatggaatatggttccagtttttgaatttttaatagtaactccaattccagttaatggtatcactcgtttaccccttttaaagatatgatttagacttcggttagtaatgttccaacttttcacaaagatgggtgagtgccatctttaaaacttactggaggattggttttatatttagatttatataactgggtatgtgactatatctaaatactggggaaatagcttcactgtcttaggaaccaaggcaagattcacctgtgttttgtgttcatggttccatttggcctcttaaaggccaagggttggaagataaataagggtagccaatggcctataggttttggcccttaacctatgcccaatctaaattataattccccctgtatttaaaatggtttctttttacttattggaaaggcattttagtgtgggtttatgtgtaatattaaaagattattcaaacacctctccacatcttaccagatcctataaggtcaccatgcttttaaaaataggtaggcaaggttaaactttcactcttggaattcttttaccattctaaggtcaaactaaggttattatttagggatatggttctttaaacagcccattcagaaaccaaaactgtagaactgtgtatttgattgggaatggtgcttttgccaacttaaaaggattaaagctaacggagatatacacaaattttaaaattatgtgtgatcacaagactaaagataattaaaaagaaaacacacagatcatgagcaaaaaaataaaaaaaagggggggccgttttaaaggacccttgggggggccaaagt

SEQ ID NO: 132698 - DNA, 2215 bp, Homo sapiens
  misc_feature (1)...(2215): n = a,t,c or g
gaatccacccgcggaaactccgagcccctccgactgagcatgcgccatcgccaggcggcttttggtcacaggctcccgagttctcctagctggggctgcggagctggggggagggaaaaaaggaaaggggagggggtgcctggaaaggcggaggctcgcgcgcctgcgcatccagctccagggaccctaggttttctatgggattcccaatctgcagcagagatttacccgagcgtgttgcggcagcggctgggcttgcaaggcgcgatccaaaagggactttttcttttccagagctccagagaagaagagagcgagagagaaccacacacagagacggcttaagcgtttacccgaattaaatatatatttttaaaaagaacttgttgagttttatcattttcggttaagtgaccggtgcgcagcgcctggtaacctgcaggatggggaagcagaatagcaaacctggccccctgaagtgatggaggaccctggtgaagagcacagagtttaatgagcatgaactcaagcagtggtacaaaggatttctcaaggactgtccaaagtgggaggctaaatctcgaggaatttcagcagctctatgtgaaagttctttccttatgggagacggcttccaagttttgcccagcatgcctttccgaacctttcgacaagaatgggggacggcaccattggacttccgagagttcatctgcgctcttgtccatcacctccagggggcagctttgagcagaagctggaactggggccttcaatatgtatggacctgggtgggtgatgggcaagatcacccgagtggagatgctgggagatccatcgagggttatcttaccaaaatgggtagggcactgtgatcatgatgaaaatgaatgaggatggcctgacgcctggagcagcgagtaggacaagatttttcagcaagatgggtaaggaacaaagatgaccagatttacactgggattgatttcaaaggaagctgccaaagagccgaccctttcattgtataacttctggcagtgcgacattcataaatgagctgatggtcaatgctatggactgcacaaaagtctcaatgttccattcagtctgcagctattcacacacacacacacacacacacacacacacacacacacacacacacacaaatattgcttggactacctataaatggacttgcttcttgtgtttgaaacactcgtgtgcatgagaatgtcatttgcctaatgaattttaaaagccatatataaaacaaaacaaacaacctgcccacaatgtgatatgtgtaatatcatttcataaaaatccctcttcctccaaagcctgggcagaaatgtgctgcaaagagttatatgacttcttgttcatgttttgctaatgctcgtatctccttgattacataatgttaggtagccactggagcccccccatggtaatggtaaccttaaattataggctatgtcacctgcccctcctgtaaaatacctattggacagaccaccagagggaccccttggcctccctgtgtcctggtcccacacacccacagaagccttgtattatccagtgaatataaatgtacctacatttgccatgcccttttgggtttgcccttaattcttacctcatttgcatccctatcgatctggaaagagcctgttttggatgaatgcagtataaaatgtaaaaaccctgctaaatgacttattgattaagtatatctatctatatatacatatacacaaagatattatttatcgaaagtaaaaaaagaggaaagggattgggttcctgtttgaattttcaaaggcttccaatgtggtggcaataaaatgtcccaaataaatttaataccaattgattttccccctaattcttattttataattttaaaattgcagcagttgctagcaacaactttactaaatctactccttaaatatacaactttggaatttgaagaattaatgacaacgaaaagggaaaaaagcaactttccaacttttcatccaggctcccaaaagagggacaacgaacatggcatgtgaaaagtaaaacagatttgttcattccgaaaaaaaaatgttcattctatgacaataaattttatctcagtgtgnnnnnnnnnnnnnnnnnnnnnnggggggccctttttaaagaatccttggggggcccaaattttacccgtgtttga

SEQ ID NO: 132699 - DNA, 488 bp, Homo sapiens
  misc_feature (1)...(488): n = a,t,c or g
agggggcggagggagcccgcggcggcggcagcagctacagcgaaatggcggagaccgtggctgacacccggcggctgatcaccaagccgcagaacctgaatgacgcctacggaccccccagcaacttcctcgagatcgatacaaatcttcctattttcaagctgaaagaatctactgttagaagaagatacagtgactttgaatggctgcgaagtgaattagaaagagagagcaaggtcgtagttcccccgctccctgggaaagcgtttttgcgtcagcttccttttagaggagatgatggaatatttgatgacaattttattgagggaaagaaaacaaggggctgggagcagtttataaacaagggtcgctgggtcatcctctgggcacagaacgaacctttgttctttcacatgtttttacaagatgaaataatagataaaagctatactccatctaaaataagacatgcctganatttggcaaga

SEQ ID NO: 132700 - DNA, 1653 bp, Homo sapiens
  misc_feature (1)...(1653): n = a,t,c or g
ctacgtgctcgttctcttcgcgaccgctgcgcgcgagccccgtgtccccacggcgggcagcagcggcggcggcggcggctgaacgcggagggggcggagggagcccgcggcggcggcagcagctacagcgaaatggcggagaccgtggctgacacccggcggctgatcaccaagccgcagaacctgaatgacgcctacggaccccccagcaactttcctcgagatcgatgtgagcaacccgcaaacggtgggggtcggccggggccgcttcaccacttacgaaatcagggtcaagacaaatcttccctgttttcaaagctgaaagaatcttattgttagaaggaagatacagtgactttgaatggcttgcgaagtggaatttggaaagagagagcaaaggtcgtagttcccccgctccctggggaaagcgtttttgcgtcagcttcctttttagaggagatgatgggaatattttgatggacaattttatttgagggaaaggaaaataaggggttggagcagttttttaaacaaggtcgcttggtcatcctctgggcacagaaccgaacgttgttcttcacatggttttttaccaagatgaaataatagataaaaagctattactcccatctaaaaataaggccatgccctggaaatttgggccaaggaagggggccaaaaacgtggactattaatggattggattaagtcaccagtgaagaagtttctaactttttaggcatgctgcaccngaaaactggtataacatgcctccagtatactaacactccatatgctcagttttgttttgttttggcagttgacaagaagttaatttgctttagtaaaaatcccctccattccagcctttcctataataaatagctcctttcttggctgttttaaatgtgggtgcacacctatagcctccacaaaacctgttaattcccagtgtaatctgcagtgtcggtaactaaaagttacctggcttgggtcttaatttgcacagtttttgcggtcttgtttgcttcttgcatctggattaactaggaatatttcctctttcccccccttttaatttgtgatgtcacttgacccccatttatgtgtagggagcacctacacccattgggtttccaaatactggcacacataagatacatacttgtgtgccagaaagtatcttcctcccaggcttgtaataccccttcaccatggaagattaatgagggaaatctttattattctgtataaaaacaaaagcaaatttatatactaaaatccatttgtctaaaaatttaagttgttttccaaataaaaatttaaaatggcatttctgatatgcactgattgtgttgcctccagcttttttttgctctctatgaagtgaccaccttaaggcacttggttgacacgggttaatttactaaattatatacttctccattcctggtaactcccattcccttttaaacagtggtgatatcgaaatatacttccatccattgaatggggtatttttaacaacaacaaaagtgatatactaaaaaatgtattgcttaaggcttattgaatcattttgaagcactttgtgtatttgaaaaatgctttataatctcatttattaaaaggactttcaaagataaaaaaaaa

SEQ ID NO: 132701 - DNA, 474 bp, Homo sapiens
  misc_feature (1)...(474): n = a,t,c or g
tcatggtggccaagaagaatgtncacatgcttaagcatccgggagctggcagcaaagaatgtgcccaaccttcatgtcatgaaggccatgcagtctctcaagtcccgaggcgtcgtgaaggaacagtttctactggtcccttaccaatgagggtatgcagtatctccgtgattaccttcatctgccgccggagattgtgcctgccaccatacgccgtagccgtccagagactggcaggcctcggcctaaaggtctggagggtgagcgacctgcgagtctcacaagaggggaagctgacagagatacctacagacggagtgctgtgccacctggtgccgacaagaaagccgaggctggggctgggtcagcaaccgaattccagtttagaggcggatttggtcgtgtacgtggtcagccacctcagtaaaattggagaggattcttttgcattgaataaacttacagccgtggatt

SEQ ID NO: 132702 - DNA, 1491 bp, Homo sapiens
  misc_feature (1)...(1491): n = a,t,c or g
aggggcggcggggcgcagtgggcgcctggtggcagcgccgcccccagctccctgccgggccggcgcgcccctgattttctcgtaaggacgggctgaaagaggaggggagacagaaggagacactccggcccgaggaccaccactgccactagtaacgccccctacacactctagaagtgctcaggcgaatgacgaagcggctggtgacaaaggcggcggcgagtgcagcgcgtgcacagcccgcggagccgcgcgaccgcaaatatgacaagcatttgagctatttggcaacgtggggccggtcagcggggcgggcagggtccccgcggggggcgaggggcagagagctggcccgggcgcccgtctcgctgcctgcaggggttcctgggcgggggtccgctgcgggacactcctccgaggcccgcactggtccgaacggcaagatggggggctcaagccgtgagccggggacagaaaaagtcccttgcccgcgtggcctcagcccgacacgagaagtgggtcaccaagtccacggcactttgggagccggaccgaacgagttgcatccttcggggccggccggggctcggtgcagacccggcaggagggaagccaagctaggagacgcagccaggtcggaggcgcagtcctctgcccacaagtttcacattgatagcctttccctcccgtggaaccctacagccatggagatgttgatgcctaagaagaaccgctattgccatttatgaaactcctttttaagggagggagtcatggtgcccaagaaggaatgtccccatccctaagcacccggagctggcagaacagaaatgtgccccaacctttcatgtcatgaaaggccatgcaagtctctcaagtccccgaggcctacgtgaaaggaacagtttgcctgggagacatttctactggtaccttaccaaatgagggtatccaagtatctccgtgattaccttgcatctgcccccggagattgtgcctgcccacccctacggccgtagcccgtccagaagactggcaaggcctcggcctaaaaaggtctggaagggtgaagcgaccttgcgagacttcacaagaggggaagccgacagcttcctgtgccatagcattcctacagacggagtgctgtgccaccctggtgcctgacaagaaagccgaggctgggggcttgggtcagaaaccgaatttccagttttagaggcggatttgttcgtggacgtggtcaagccacctcagtaaaatttggagagagattctttttgcattggaataaacttacagccnnnnnnnnnnnnnnngggggggcccgttttaaagattccttggggggcccaaacttaacccgggctggaaaggtaatatttttttccttatggggggccaattaaaaacctagttggggatttttgggagggaccttaattttgggggggggacatattggcccaacctccttacaaaaattaaagcttt

SEQ ID NO: 132703 - DNA, 1053 bp, Homo sapiens
atgaggaaggacagtgaaggttgtgagtccaattgcaatcgtatcggcgtggactgcatgtttaaaggcttaagggaatctgtctttgccttttgctcccgggttatgagaaaatgtatgtggctgtgcgtccaggacagcaatgtgtttgtctctcagccaagctcagtcctcacccaggcaccggggtcacggtcacgttcacgttccgtggacgccttgcacgcctccaagaggcgggcatggggaatcgtcgccggcttacctggccgtgggcgcgtcctggccgctgcagcccggagcagggtgccagccgccgccgccgccgccatggtgtccccggtcactgtggtgaagagtgaaggacccaaactggtgccgttcttcaaggccacctgcgtgtattttgtgctctggctgccctcatctagcccatcgtgggtcagcaccctcatcaagtgcctgcctatcttctgcctctggctcttccttctggcccatggcctgggattcctgctggcccaccccagcgccacccgcatctttgtggggcttgtcttctctgctgtaggtgacgccttcctcatctggcaggaccaaggatacttcgtgcatggtctgctgatgtttgctgtgacccacatgttctacgcctcggcctttggcatgcagccactggctcttcggacaggtctggtgatggcagcgctgtcgggcctgtgctatgccctcctctacccatgcctctcaggtgccttcacctacctggtgggggtctatgtggcccttatcggcttcatgggctggcgagctatggcagggctgcggctggccggggcagactggcgctggacagagctggcagctggcagtggtgcactcttctttatcatctcagacctgaccatcgccctcaacaaattctgttttcctgtgccctactctcgggcgcttatcatgtccacctactatgcggcccagatgctcgtcgccttgtcagctgtcgaaagccgggagcctgtggaacactacagactgaccaaggccaactga

SEQ ID NO: 132704 - DNA, 1401 bp, Homo sapiens
atgggtcggtatatggagcgagagccgctacagggcaatcatcgtagatcgggtctttccggagagcgctgctcccatatgggtggtgtccttattgagagacgggaattgcaaacagagacacgcaaagaaggggtggttgagtggtgctggctggaaaaagaagttcttgcaactattacaaaaccagttcgtggtgacaagaacggtggtacccaggtggttaaacatcgcaaaatgcctagatattatcctactgaagatgtgcctcagaagctgttgagccacggcgaaaaaaccgttcagtcagcacatgagaaaactatcctctacagacgacacgcgagaaatctgtcactgccacctcaaccagaattgataatcagcgatgtcaagatccaagacatcctgctgacgcttagctcgaggagcagcagctgtcggagccagaaacagcgagggtacgagctactagaggatccccgaaaaggtattgtcatacccagcaataagaccacagcaatgttagaagacagtgttcacacccgccttaagtcttctgataacttccaacgcaaaaagaatgaaggtattgtcatagccagcaataagaccacagcaatgttagaagacagtgttcacacccgccttaagtcttctgataacttccaacgcaaaaagaatgaagacaagcagtctgaactctgtcaggaagtctctgtatcttcatctcattggggtcagctatcaggagattatcgtgctctcccggtagtactacgtctccttgagttttcatgtctcatgctgccgccgtacgagctcgaagtcgtagcagggtcgcagtggcaaccaaagacaaaaaccacaagaaaatcacaaaagatgcagaaaaagccaacaaaaaaaaaaagcaccccattcatgcaaaaaacaatcaaaaaacaaggaaaagaaggaacacatatcagaataataagagcaatttatgacaagcccaaagccagaatcatacagagaggacaaaagctggaaggaaacacaaaagacaaccggcacaagacaaggaagccacatcactcaccacatcaaatcaacgtagtaaaggaagaacataccacagcaaacaggcaagagaaagaaatgaagcgaatacacaaaggaagagaggaagacagtagagatcagaaagcagaagacgatgatgtatatcatggagaacaccgtcgtcatcagccaaaatatcatgagcagatagcaacaacagcaaggatacaggatacagacaaagtgcaggacacaagcattccagaacaatcgaaacgggaggcagagagcagaatcatgcgtgacatccaattgcagttgcatcacgagaatgacaacatagggatcagatga

SEQ ID NO: 132705 - DNA, 616 bp, Homo sapiens
accgaccacgacttcccgggacgacccacacgtccgcggacgcgtggggcaagatggcggttgaaaaagttgagatgccagatactaaagagatgaaacccgaagccaagaagagttgatgctggtggcaaggtgaaaaagggtaacctcaaagctaaaaagcccaagaaggggaagccccattgcagccgcaaccctgtccttgtaaaaaagaaataggaaggaattcccgatctggcatgtattccagaaaggccatgtacaagaggaagtactcagccgctaacaccaaggttgaaaagaaaaagaaggagaaggttctcgcacctgttacaaaaccagttggtggtgacaagaacggcggtaacccgggtggttaaacttcgcaaaatgcctagatattatcctactgaaaatgtgccttgaaagctgttgagcccacggcaaaaaacccttcagtcagcacgtgagaaaactgcgagccagcattacccccgggaccattctgatcatcctcactggacgccacaggggcaagagggtggtttcctgaagcagctggctagtggcttattacttgtgctggacctctggcctcaatggggtcctctccggg

SEQ ID NO: 132706 - DNA, 481 bp, Homo sapiens
ttgtgtgaacaacatggctgtttatttcacctgggtgcaggcgggctgagtccaaaaagagattcagtgaaggaagataagggtggggccactttataggatttgggtaggtaaaggaaaattacagtcaaaggacatttgttctctggcgggcaggagtggaggtcacaaagtgctcagtgggggtgctttttgagccaggatgagccaggaaaaggactttcacaaggtaatgtcagcacttaaggcaaggaccggccatttacacttcttttgtggtggaatgtcatcagttaaggtggggcagggcttttcacttcttttgtgattcttcagttacttcaggccatctgggtgtatacttccactgtgagagttacccgaagctcggtgtccgtgatggtctagggggcttcgaggcgattgggcagtgtcagtcttcagctgctaaactgagaagatctgggaaggagtcagtcag

SEQ ID NO: 132707 - DNA, 1059 bp, Homo sapiens; identical to SEQ ID NO: 114869

SEQ ID NO: 132708 - DNA, 381 bp, Homo sapiens; identical to SEQ ID NO: 127041

SEQ ID NO: 132709 - DNA, 487 bp, Homo sapiens; identical to SEQ ID NO: 116078

SEQ ID NO: 132710 - DNA, 419 bp, Homo sapiens
  misc_feature (1)...(419): n = a,t,c or g
tcagccgttaagccgagagtatctggaaaggagtcagtcagagagccttgggccagagttccaggggctgtgggagtggctgccaggtgagttgaacagtctgattttcagtggggtcccacacagataggacgtggcttaggaggaatcccgggctgcgggcattccttggcccagtggccagatttccggcaagtgtagcaagctccggatttgaaattggtgagatgtttcttggcctggttggtctgaggacctgaggtcgtaggtggctctttctcacggagcaaagaacaggaggacaggggattgatctcccaagggaggtcccccgatccgagtcaccgcaccaaannnnnnnnnnnnnnnnnnnnnnnnnnnnnnnnnnnnnnnnnnnnnnnnnnnnngtagtcggatcg

SEQ ID NO: 132711 - DNA, 443 bp, Homo sapiens; identical to SEQ ID NO: 113129
  misc_feature (1)...(443): n = a,t,c or g

SEQ ID NO: 132712 - DNA, 602 bp, Homo sapiens; identical to SEQ ID NO: 123812

SEQ ID NO: 132713 - DNA, 403 bp, Homo sapiens
gcagaactagccacagggaatgtgaaggtggaagcatcagggacacccgaggaaaaagcagggagtgtcctcggataggcctgctttgctggcccttgagaaagatgttgctggcaaaacaattgagatggaattatctcaattcaaagctactgcctgtgtaacttgggctgttttattcaaacatgaaggttcagattgtctcatccaggctctcccagcacagcttcctgccctccactgcttgggagcctctgcctgctctgcgctggttattagtccagtgggctctatgttactttcaacatcaaacctgtgattccttttgtttctgaatcattcatgtgacttttagtcatgagattcttctacgaaaacaacctgcatcatggcattgaacatt

SEQ ID NO: 132714 - DNA, 357 bp, Homo sapiens; identical to SEQ ID NO: 114504

SEQ ID NO: 132715 - DNA, 368 bp, Homo sapiens
tcagtcttcagctgctaagccgagaacatctgggaaggggtcagtcagagagccttgggccagagttccaggggctctgggagtggctgccaggtgagctgaacagtctgatttccagtagggtcccacacagatgggacacagcttaggaggaatcctgggctgcgggcattccttggcctggtggccagatttctggcacttgtagcaagctcctgacgtaggattttgacgcttggccattgttcggcctattttctgtttccatcctgattctttacctctctctccacaatattcttcctgatgtgacttggtatttactggggacaatattcttcctgatatctccttggtatttgtctctc

SEQ ID NO: 132716 - DNA, 315 bp, Homo sapiens
ggggcttctgaggcgatcgggcagtgtcggtcttcagccgctaagccgagaagatctgggaaggagtcagagagccttgggccagagttccaggggctctgggagtggctgccaggctcccctgcaccactctcttcgcagaagtttgctaattatttaatccgtgcattgtcagagattctgcagaaacagagtgcctctggtggaaaatcagatcctaactggagaaacaaacatcctacatacctgcatgcacacatggttctaagaccatgtttggaaggtgacataaaacacttgggggaactggtttag

SEQ ID NO: 132717 - DNA, 696 bp, Homo sapiens
tcatcttgttggaacaattgagttctttgcagttgtagaattcacatctctggtgtctttctggctaaggcaggacccatattcaattcctagagaccccacaattccttgccgtgcggccttctcctttgacaacttacgacagtaatgctggatttttgaagaaccagaggagaatttcttcctccagccaattttaaatcccgtaagtggcctctttttattctcttctccactatccctcaacctctcctcactatccctcaacctctttctcctttcaatcttggcgccacacttcaatctctccattctcttaatttcaattcctttcattttcccactggaaatcgaactgtccaactcgcccggcagccactcccagagcccctggaactctggcccaaggctctctgactccttcccagatcttcttggcttagcagctgaagagtgacactgcccgatcgcctcggaagctttttcccaaacatatcgagcatatctctctctctctctctctctctctctctctcctgagccacctacagctggggatggagtgacacaagcagccctgtggcctccaccactatcactgtgctgggtcagacctgaagccagcacagtgctggcccttgcccaaggtctgttgtcaccactccctgacttctgactatgttcacccaaggccat

SEQ ID NO: 132718 - DNA, 675 bp, Homo sapiens; identical to SEQ ID NO: 114877

SEQ ID NO: 132719 - DNA, 928 bp, Homo sapiens; identical to SEQ ID NO: 116086

SEQ ID NO: 132720 - DNA, 1850 bp, Homo sapiens
cctgcaggaattcggcacgaggaaagatccacctacgacctctggtcctcagaccgaccaggccagggaacatctcaccaatttcaaatccgagacaaaggagacacgttttatccgtggacccaaaactccggcgccagtcacggactgggaaggcagccttcccttggtgtttaatcattccagggacacctctctgattattcacccaggcttcagaggtgtcagaccacgcagggacgcctgccttggtccttcacccttagcggcaagtcccacttttctggggaaggggccagctgctcctcgccagaccgagctaggtcccaattcttcctcagcctccgctcctccaccctataatccttttatcgcctcccctcctcacacctggtccggcttacagtttccttccatgactagccctccccctcctgcccagcaatttactcttaaaaaggtggctggagctaaaggcatagtcaaggatttaattaacctcaccttcaaggtgtacaataatagaaaaaagttgcagttccttgcctccactgtgagacaaaccccagccacatctccagcacacaagaacttccaaacgcctgaactgcagcagccaggtgttcctccagaacctcctccccgaggagcttgctacaagttccagaaatctggccaccgggccaaggaatgcctgcagcccaggattcctcctaagccacatcccatctgtgtgggaccccactggaaatcggactgtccaactcacctggcagccactcccagagcccctggaactctggcccaaggctctctgactccttcccagatcttctcggcttagcggctgaagactgacactgcttgatcgcctcggaagccccctgggtatattgcatgatgttgaggtttggggtatgattgattctgtcacccagatactgagtatagtacacaatagttaatttttcaattgtctcttctccctctctccctccatagtagtccccagtgtcttttgttgccatcagcagctgtatgacactgtccccaggtctcatgtctgtataaacatacacatcataggatatttcagggaaggttggcgtgttatcatttgcatccatcacttgaatattgacgatgactggctcactttcttgtacaccatcaaatgctgttatcgaaaaggtgtaagtttgctgttcttccctgtccactggttgaagtaaggtgaggtagcgagtaataccagtctgtgtgacggtgaagactgaggtgtagtcattcagaaaaaggtgaagctctgggtcttttgtatcttctatgtccttgtccagagctactattcttaaaggtgaagtcaaattgagactgtccgaaatggttgctcccactggggcagattccaggatatagccttgataactgggcattgtaaaatatggactttgattgttttcatccagtatttcaatgtgtagaccggcaaaggcaggaagaggatgaccattgtcttgttcagccttaataaccaaatcaaatttctggtgaaagtctctgtttactggctccaggagactaagttctgctgtcctaggatgcatatggaaaaatcgtgggtaatcctcaggagtccctttgctccagttaccaacaagttcctcatctctatctgagaccacctcagcctggttttcatcattaatatcattatcagcattttggtcaaagccattcggtaagtctctagagagttccaaactttctcgcatcttcctatcttctacagagccctgcaaactgttccaatctctgcctgttacccagttccaaagtcgtttctgcat

SEQ ID NO: 132721 - DNA, 3024 bp, Homo sapiens
gcggccgcccaggctgcccccgcccgcgcgcgccctgttggggggcccggggagcggcgcccgcggccgggccgcattgtgacgtagcggggccgcggcagcgcctccaccgcccgcctacttcggctgaggctgttctgctcctgccgctgcggtccgtcggtcggtcagtcagtcccttcgcgctcctgagccgccggcgcgccgggcgccccgggaatttataagtatttgaccgtactcaaaatgtgcaaggaagaataatggaagcccctgaataccttgatttggatgaaattgactttagtgatgacatatcttattcagtcacatcactcaagacgatcccagaactgtgccgaagatgtgatacgcaaaacgaatgacagatcagtttctagctctagctggaattgtggcatctcaactcttattacaaacacgcaaaagcccacaggaatcgctgatgtgtacagtaagttccgcccagagaagcgggttttgccactgaaacatcagccagagactctggagaacaatgaaagtgatgaccaaaagaaccagatagtgggtgagtaccagaaagggggtgagtctgacctgggcccccagcctcaggagcttggccctggagatggagtgggcggcccaccaggtaagagctctgagcccagcacatcgctgggtgaactggagcactacgacctcgacatggatgagattctggatgtgccttatattaaatccagtcagcagcttgcctcttttaccaaggtgacttcagaaaaaagaattttgggcttatgcacaaccatcaatggcctttctggcaaagcctgctctacaggaagttctgagagctcatcatccaacatggcaccattttgtgttctttctcccgtgaaaagccctcacttgagaaaagcatcagctgtcatccacgaccagcacaagctgtccactgaagaaaccgagatctcacctcctctggttaaatgtggctctgcatatgagcctgaaaaccagagtaaagacttcctaaacaagacatttagtgatcctcatggtcgaaaagttgagaagacaacaccagactgccagctcagggccttccacctacaatcctcagcagcagaatccaaaccagaagagcaggtcagtggcctaaaccggaccagctcccaaggcccagaagaaaggagtgagtatctgaaaaaagtgaaaagcatcttgaacattgttaaagaaggacagatctctctcctgccacacctagctgcagacaatctagacaaaattcacgacgaaaatggaaacaatctattacatattgcggcgtcacagggacacgcagagtgtctacagcacctcacttctttgatgggagaagactgcctcaatgagcgcaacactgagaagttgactccagcaggcctggccattaagaatggtcagttggagtgcgtacgctggatggtgagcgaaacagaagccattgcagaactgagttgttctaaggattttccaagccttattcattacgcaggttgctatggccaggaaaagattcttctgtggcttcttcagtttatgcaagaacagggcatctcgttggatgaagtagaccaggatggcaacagtgccgttcacgtagcctcacagcatggctaccttggatgcatacagaccttggttgaatatggagcaaatgtcaccatgcagaaccacgctggggaaaagccctcccagagcgccgagcggcaggggcacaccctgtgctccaggtacctggtggtggtggagacctgcatgtcgctggcctctcaagtggtgaagttaaccaagcagctaaaggaacaaacagtagaacgtgtcacgctgcagaaccaactccaacaatttctagaagcccagaaatcagagggcaagtcactcccttcttcacccagttcaccatcctcacctgcctccagaaagtcccagtggaaatctccagatgcagatgatgattctgtagccaaaagcaagccaggagtccaagaggggattcaggttcttggaagcctgtcagcctccagccgggctagacccaaagcaaaagatgaagattctgataaaatcttacgccagttattgggaaaggaaatctcagaaaatgtctgcacccaggaaaaactgtccttggaattccaggatgctcaggcttcctctagaaattctaaaaagatcccactggagaagagggaactgaagttagccaggctgagacagctgatgcagaggtcactgagtgagtctgacacagactccaacaactctgaggaccccaagactaccccagtgaggaaggctgaccgaccaaggccgcagcccattgtagaaagcgtagagagtatggacagcgcagaaagcctgcacctgatgattaagaaacacaccttggcatcagggggacgcaggtttcctttcagcatcaaggcctccaaatccctggatggccacagcccatctcccacctcagagagcagcgaaccagacttagaatcccagtatccaggctcagggagtattcctccaaaccagccctctggtgaccctcagcagcccagccctgacagtactgctgcccagaaagttgccacaagtcccaagagtgccctcaagtctccatcttccaagcgtaggacatctcagaacttaaaactgagagttacctttgaggagcctgtggtgcagatggagcagcctagccttgaactgaatggagaaaaagacaaagataagggcaggactctccagcggacctccacaagtaacgaatcgggggatcaactgaaaaggccttttggagcctttcgatctatcatggagacactaagtggcaaccaaaacaataataataactaccaggcagccaaccagctgaaaacctctacattgcccttgacctcacttgggaggaagacagatgccaagggaaaccctgccagctccgctagcaaaggaaagaataaggcagcataa

SEQ ID NO: 132722 - DNA, 2942 bp, Homo sapiens
cttctgaaggtgaagcaaaaggcagcattaccttgaccgtctgtactgcgctttatctcaaacttactttattccacaaaactggtgtctttggtcccctgcgatttccagtagttaataccctcaatccatcaccctttcatgatgggaccagagagctgggggcttccgaggcgattgggcagtgtcagtcttcagccgctaagctgagaagatctgggaaggagtcagagagccttgggccagagttccaggggctctggaagtggctaccaggatctagccagtgctttgcacgtgagagcttggaggagaagctgagcctgtgcttccgcccctcggatccgggcgccgagcccccgaggacggccgtgcggcccatcacggagcgcagcctcctgcagggggacgaatattgctgtgctttaggtcaaggggtccccaacccctggtccacagaccggtactggaactgggccacactacaggagataggaccatctagttgcaggaaaacaagctcagggctcccattgattctacgttatggccatgtcagagaccttcatggcagctcctcccatcacaggcctggaggcccaaaaaggaacaagtggtttcgtgagctgggcctagggtctgcctgctgtatgcggcctagggacttggtgccctgtgtaccagctgctccagctgtggctgaaaggggcgagagtacagctcaggctgtggcttcagagggtgcaagccccaagccttggcagcttctgtgtggtgttgagctttgtgtttattagtcattttatattgtttcttgttccttttccttatgtttgaggggctgatcaagttactatttttcctgccgcagcgttcctcacatggggcaccaactgtggtagcactcctctcacaggagcaccagctgtgggggtgtctgtcccttgcagacccttgacctggtgatggatgaataatgtacactgacacacagatattctgttttgccagtccagctgagagtgtctgtccacgctgcttacagactccttgctgagtgttgtaaacagttgctaccacggccccaatcagttgacctctgtaactcttggtcccagaatttaagatgctcagagtccttatgtcctcagtgatgggtggcagaggaaatggtaatggtttttcttggtcctcggcttgggtgcactgattacccctggcagccactcccagaggccctggaactctggcccaaggctctctgactgactccttcccagatcttctcggcttagcggctgaagactgacactgcccgatcgcctcggaagcccccagaccatcacggacgccgagcttcaggtaactctcacagtggaaggatcgggggacctcccttgggagatcaatcccccgtcctcctacactttgctctgtgagaaagatccacctacaacctcaggtcctcagaccaaccagcccaagaaacattctcaccaatttcaaatccgagacaaaggagacacgttttatccgtggacccacaactccggcgccagtcacggactgggaaggcagccttccttggtgttaagagcttgctacaagtgccagaaatctgacccccaggccaaggactgccggcagcccaggattcctcttaagccacgtcccatctgtgtgggaccccactgcaaatcggactgttcaactcacctggcagccactcccagagcccctggaactctggcccaaggctctctgactgactccttcccagattttctcagcttagcagctgaagactgacgctgccggatcgcctcggaagcccctagatctgatgatttaataagagggtatttttccttttgctcagcacgtctcctttctgctgccatgcgtagagggatgtgtttgctttcccttctgtcattactgtaagtttcctgaggcttctccaaccagatataacgatttttatcttcacaggattcatctaaagcatttccatttggattatacgctatgcagttctttgtattaaaagtttcaaatgatggaaatctgccatgagaaattatgttccaagagcgaagtagagaaggcacgatgtgtactttttcagaaagaacagcgttgaattgttgaagctgagcgggccctccacactgggtggcattggtggttttgttggtatgcagaacctccattctccatgcttttttgctgcattctgtgcagctgagctctgacaactgtatcacacagtcttcctcaccctctggcttctgtctgttttcaaccattggaaagcattggtaggagaagagaagctctacctttggaatatcaaatatctggcctagtgtcttttcaatgacaaaaacaagagtaagattatccacttcaataagcaaaaagcagtaatttaatttgatgtgatttttaagaaaatctttgtttcctctgaggaactggtatgttgtctctccagaattcaggagaaatgtgtaattgaccagaccagaggtccccaagccccaggccacagaccggtactgtggcctgttaggaaccctgtagctgccagtggggtggttgccctccacttgcaagggcaaagggccagtgtgacagcctccacctgcacttagtgggtcccaagcttttgtccagcgtccaagaagaatgaggtcacacttgacaactgaagaatggtaagagtggagaattttattgagcgatgaaaacagttctagagtctccactggagcactgcctagtcgagctctgagaagagggccaccattctccaaaccccagaatggtgatccattgacagtttgcaacatgtgcttgggaaagctgcagccactaagcacagccaggagtggggctgtaccctgcaaagccacaggggcagagattcccaaggccat

SEQ ID NO: 132723 - DNA, 3258 bp, Homo sapiens
atgctgacgcttacgggtgctgggggtgagtcctggatcatacgacctggtaacctattggagcagctaggggctgaagaaactttaggccgaagacaggaaccgggcgatgaagtgacggcacacttccttctacaaggagtcatcaacatgggtcctgtaccctatcctggtgcacacagctctaatatgcccggttctgtctcccctattttgggacacagtgttaaactttttgaagaatattacccagtaggagaccccctaatgggctcaggtaggccccatacaccaaggaaaaagatatggagtgatctgaatgctcattcagacttgtacctggctcttgattggactccactcccggaacagagcgagccaggacccggtttggccgcctggaagccattccaggcagaggaatatacctgtaaatgtgcagaagggaatgagaacacaccctttgatctcaggaaagggacgttgccctgcccaagaaatctggaaagggcaagacaggcctacatgcacatcgaggagaagtttcctttcgaacttacagagcaacacatctgtgaatttcagtccatgtgctatgtccttgtccgggtcctgggggcttgcagccagtcaacctggttaattctggagcctgatggggtttcaggtccatccaagggggcttccgaggcgattgggcagtgtcagtcttcagccgctaagccgagaagatctgggaaggagtcggtcagagagccttgggccagagttccaggggctctgggagtggctgccagcaacatctttctcaagggccagcaaagcaggcctatccgaggacactccgtgctttttcctcgggtgtccctgatgcttccaccttcacattccctgtggctagttctgccaggagaacccttaaacattgcttgccaactcaatcctgggtcaccttcggaacttaccggcgaacatttcgggaaacttctccggaaacgagaacaccgggggggagaaaagcttcagggcgggcacacccggctgtgggaccaaaacggggaactttcgaattgcatggcttggtacatgccggggctgtttaagtaccgtgggaaacccatgactctcaagcattggttgagggttggcagtcctttggacggttacgcggttatacggtttgggaccattataataaaactactgataaacacatatatattacacataaagtgcgacctagatttatacagggttttccacatgctgattcttcagattgcaaaggcaacagtaaaagtaaaggcacagagagtgagaagtttgagacacttccaggaagtgaagggggcattgactatgccaaggctcaaaggatctgtcactcttgggagttaccaagagcatgaggtttctagctctagctggaattgtggcatctcaactcttattacaaacacgcaaaagcccacaggaatcgctgatgtgtacagtaagttccgcccagtgaagcgggtttcgccactgaaacatcagccagagactctggagaacaatgaaagtgatgaccaaaagaaccagaaagtggttgagtaccagaaagggggtgagtctgacctgggcccccagcctcaggagcttggccctggagatggagtgggcggcccaccaggtaagagctctgagcccagcacatcgctgggtgaactggagcactacgacctcgacatggatgagattctggatgtgccttatattaaatccagtcagcagcttgcctcttttaccaaggtgacttcagaaaaaagaattttgggcttatgcacaaccatcaatggcctttctggcaaagcctgctctacaggaagttctgagagctcatcatccaacatggcaccattttgtgttctttctcccgtgaaaagccctcacttgagaaaagcatcagctgtcatccacgaccagcacaagctgtccactgaagaaaccgagatctcacctcctctggttaaatgtggctctgcatatgagcctgaaaaccagagtaaagacttcctaaacaagacatttagtgatcctcatggtcgaaaagttgagaagacaacaccagactgccagctcagggccttccacctacaatcctcagcagcagaatccaaaccagaagagcaggtcagtggcctaaaccggaccagctcccaaggcccagaagaaaggagtgagtatctgaaaaaagtgaaaagcatcttgaacattgttaaagaaggacagatctctctcctgaactttaaagctgaagggaatctcagcaatcatggaccggactctcttaacccctactccacctctaaagagagcatcttacagcctgtatccttagcacctcagtgcctgaacctctttcccagatttgtttggagttgggtgtggctgagtttgagttccagccagccacgttggagtgcatgctgtcctgtttccgggtcatggcttaagaagaacctatcctcttccagtctttctctcttctcactggatgaaaagcaggaggagaccaatgggacatacttcagtctctgtcaaatgggctctcgtgttatcggcatctacccattcccgagccgtatcgtcagctctcatacgtgcacacatatcgtagggtattgtgaaacaatacgaagagggaacgactggaatatgtccaaaggagcagtaactcagagtcctttgtccttcacggtagatcagccctgtaaaacatcgccaccttcagttaaaatgtgtgcgtgctgcacggccagaagccatactgagcctgctcacagctctgccctgttccagagcatctcaaatggacagcacagaagagcacccagcaagtcgtcctcactcagactccatgccttcttcctactgtcagaacatgggataagccacctgtcatcatttcttacagagcctgaggtgtctgcagaactgggaagctttggtcgacatgcttcacggttttcctttccgccctcttgtcttaccttttcagagcttctaactatttttaactttcgccactttgtgcgccagttccgggctctgtgtcaaccattttcatccactccgggggggacccaccaccgccgctattgttcagcgcgctgtgttattactgccacaccccccgggttctttgaaagagacaccgagtgtgggattgtgctagtgttgcgagtcgttgtgtgtggtcggtttgtggtggtgtag

SEQ ID NO: 132724 - DNA, 1865 bp, Homo sapiens
tgctctgagtatgaggactcctccccagctccagtaccagccacagatctcagctcaacactctcgagctctgtaccacaaccccaggatacagggaccagccagcagcttcatcccctggacccttggcatgagctgcttcgtgcccaggagctccaaggtgccaccaaccacaagggctacagccatgcagagcatgagcatgcaggcctaggtgtccagggtgggaatggggctctggctttttcgaacagtgggcacaggcatgctgttcccaccatcagctcaggcactggcaggaggaggactccaagttcttcggcttttggactcttgaacttacaccagtggtttgtcagtggctttcaagccttcagcgacagactgaaggctgcattgtcagcttccctacttttgaggtttggggactcagactggcttcctagctcttcagcttgcaaatgtcttatgctgggacttcactttgtgattgtaggtaacatctgtgctacactcaaggagaaatactcctcaatgctccatttagatgtgaccatgaagaaaaatggggagaaaagaacaaggctccaaaaaagaaagaagggaatgcctccacatccggcttatgaggacctaaacatagctgccatcactctccctgccaatgttgtccttcatcagccaagtggcttcagaacttcagggcagctggaccccgtttggtggtctcttgacacggacgcgcatgaaatttggtgccaagacccgggacttggatcaggggacttcccttgggagatcactcccctgtcctcctactctttgctccatgagaaagatccacctacgacctcaggtcctcagaccgaccagcccaagaaacatctcaccaatttcaaatccaagacaaaggagacaggttttatccatggacccaaaactccggcaccggtcacggactgggaaggcagccttcccttggtgtttaatcattgcagggacacctctctgattattcacccatgtttcaagggtgtcagaccacgcagggatgcctgccttggtccttcacccttagcggcaagtcccgcttttctggagaaggggcaagatttaattaacctcgccttcaaggtgtacaataatagaaaaaagttgcaattccttgcctccactgtgagacaaaccgcagccacatctccagcacacaagaacttccaaatgcctgaaccgcagcggccaggcgttcctccagaacctcctcccacaggagcttgctacatgtgccggaaaatctggccactgggccaagcgaatgcccgcagcccgggattcctcctaagccgcgtcccatctgtgcgggaccccactggaaatcggactgttcaactcacctggcagccactcccagaggccctggaactctggcccaaggctctctgactgactccttcccagatcttctcggcttagcagcttgaagactgacactgcccgatcgcctcggttgaagccccctagaccattcacggacgccgagcttcgggtaactttcacagtggaaggtaagcccgtccccttcttaatcaatacagaggctactcactccacattaccctcttttcaagggcctctttcccttgcctccataactgttgtgggtattgatggccaggcttctaaacctcttaaaactccccaactctggtgccaacttagacaatactcttttaagcactcctttttagttatccccacctgcccagttcccttattagcctgagacactttaactaaattatctgcttccctgactattcctggactacagctatatctcactgccgcccttcttccctcgtgcc

SEQ ID NO: 132725 - DNA, 410 bp, Homo sapiens; identical to SEQ ID NO: 117130
  misc_feature (1)...(410): n = a,t,c or g

SEQ ID NO: 132726 - DNA, 331 bp, Homo sapiens; identical to SEQ ID NO: 129170

SEQ ID NO: 132727 - DNA, 722 bp, Homo sapiens
ggacgcgcatgaaatttgatgccatgactcaattgggagacctcccttgggagatcaatcccctgtcctcctgctctctgctccgtgagaaagatccacctacgacctcaggtcctcagaccgaccagcccaaggaacatctcaccaatttcaaatccacaaccaatcatgcaccccttaccatcccattaaaacctaatcactcttatcccgctgaatgccaatatcccgtcccacagcacgctttaaaaggattaaagtctattatcactcgcctgctacagcatggccttctaaagcctataaactgcccttacaattcccccattttacctgtcctaaaaccagacaaggcttacaggttacttcaggatctgcgccttatcaaccaaattgttttgtctatccaccccgtgttgccaaaaccaaatactctcctatcctcaatacctccctccacaacccattactctgttctggatctcaaacatgctttctttactattcctttgcacctttcatcccagcctctcttcgctttcacttggactgaccctgacacccatcaggctcagcaaattacgtgggctgtactgccacaaggcttcacagacagcccccattacttcaatcaagcccaaatttcttcctcatctgttacctatctcggcataattctcatgaaaacccacgtgctctccctgctgatcgtgtctggctaa

SEQ ID NO: 132728 - DNA, 268 bp, Homo sapiens
atggccccacccctatctccctttgctgactctcttttcggactcagcccacctgcacccagagacaaaggagacacgttttatccgtggacccaaaactccggtgcccgtcacggactgggaaggcagccttcccttggtgtttcatcattgcagggacgcctctctgatcattcacccacgtttcagaggtgtcagaccacgcagggacgcctgccttggtccttcacccttagtggcaagtcttgcttttctgaggaaggggcaa

SEQ ID NO: 132729 - DNA, 458 bp, Homo sapiens
cggctgaagactgacgctgcccgatcacctcggaagcctcctggactatcacagacgctttgggtaactcttacagtggaggctcccttattaggtcgagacattttaactaaattttctgcttctctgactattcctgggctacagccacacctcattgctgccttttcccccagttcaaagcctccttcacctcctccccttgtatctccacaccttaacccacaagtatgggatacctctactccctccttggcgaccgatcatgcaccccttaccatctcattaaaacctaatcacccttaccctactcaacgccaatatcccatcctgcagcacgctttaaaaggattaaagcctgttatcactcacctgctacagcatggccttttaaagcctataaactccccttacaattcccccattttatctgtccaaaaaccggacaagccttacag

SEQ ID NO: 132730 - DNA, 461 bp, Homo sapiens
ctttattgctcacacaaagcctgtttggtggtctcttcacacggacgcgcatgaaatttggtgccgtcactcggatcgggggacctcccttgggaaatcaatccccgtcctcctgttctttgctccatgagaaagatccacctacgacctcaggtcctcagacagaccagcccaagaaacatctcaccaatttcaaatccgcggcacgtcccactttcctggggcaggggcaagtacccctcaaccccttctccttcacccttagcggcaagtcctgctttcctaggcggcaagaaccccccaatcgcttatttccacaccccaacctcttatctctgtgccccaatcccttatttctgtgccccaaccccttctctacttttctggagggcaagaaccaccacccccaccccttctctgtgtctcaagtcttttctctaggcttgcctccttcactatgg

SEQ ID NO: 132731 - DNA, 358 bp, Homo sapiens; identical to SEQ ID NO: 114861
  misc_feature (1)...(358): n = a,t,c or g

SEQ ID NO: 132732 - DNA, 667 bp, Homo sapiens; identical to SEQ ID NO: 117149
  misc_feature (1)...(667): n = a,t,c or g

SEQ ID NO: 132733 - DNA, 419 bp, Homo sapiens
  misc_feature (1)...(419): n = a,t,c or g
cgatccgactacnnnnnnnnnnnnnnnnnnnnnnnnnnnnnnnnnnnnnnnnnnnnnnnnnnnnntttggtgcggtgactcggatcgggggacctcccttgggagatcaatcccctgtcctcctgttctttgctccgtgagaaagagccacctacgacctcaggtcctcagaccaaccaggccaagaaacatctcaccaatttcaaatccggagcttgctacacttgccggaaatctggccactgggccaaggaatgcccgcagcccgggattcctcctaagccacgtcctatctgtgtgggaccccactgaaaatcagactgttcaactcacctggcagccactcccacagcccctggaactctggcccaaggctctctgactgactcctttccagatactctcggcttaacggctga

SEQ ID NO: 132734 - DNA, 719 bp, Homo sapiens
atggccccaactaactgcaagggctctaggaaatgtggcagaccacatgaacagatgccccacccttatctccctttgctgactctcttttcggactcagcccgcctgcacccaggtgaaataaacagccgtgttcctcacacaaagcctgtttggtggtctcttcacacggacgcgtatgaaatttggtaccatgactcggattggggggacctcccttgggagatcaatcccctgtcctcctgctctttgctccatgagaaagatccacctacgacttcgggtcctcagaccaaccagcccaaggaacatctcatgaatttcaaatcgggaccccactggaaatcggactgtccaacccggcagccactcccagggcccctagaactctggccaaaggctctctgactgactccttcccagatcttctcagcttagcagctgaagactgatgctgcctgatcgccttggaagccccctggaccattacggatgctgagctttggataactcttacagtagaggattcccaactatatgaagacaccctagctggacgatcagttcttattaagaacctgaccccttaaactctacaactctcgatggactggaccctacttagtcatctatagtaccccaactgccgtccgcctgcaggatcctccccactgggttcaccgttccagaataaagctgtgcccatcggaaaaaaaaaa

SEQ ID NO: 132735 - DNA, 865 bp, Homo sapiens
gttttatttttcttattaatataagaaggcaggaatgtcaggcctctgagcccaagccaagccatcgcatcccctgtgacttccaggtatacgaccagatggcctgaagtaactgaagaatcacaaaagaagtgaatatgccctgccccaccttaactgatgacattccaccacaaaagaagtgtaaatggctggtccttgccttaagtgatgacattatcttgtgaaagtccttttcctggctcatcctggctcaaaaacacccccactgagcaccttgtgacccccactcctgcccgccagagaacaaacctcctttgactgtaattttcctttacctacccaaatcctataaaacagccccacccttatctcccttcgctgactctcttttcggactcagcccacctgcacccaggtgaaataaacagccatgttgctcacacaaagcctgtttggtggtctcttcacacggacacgcatgaaatttggtgctgtgattcggatcgggggacctcctttgggagatcaatcccctgtcctcctgttctttgctccatgagaaagatccacctacgacctcaggtcctcagaccgaccagcccaagaaacatctcaccaatttcaaatccagctgctcctcgccaggctgagctaggtcccaattcttcctcagcctctgctcctccaccctataatccttttatcacctcccctcctcacacctggtccggcttacagtttcattccgtgactagccctcccccacctgcccagcaatttactcttaaaagggtggctgaagctaaaggcatagtcaagaccgtcacggacgccgagcttcgggtaactctcacagtggaag

SEQ ID NO: 132736 - DNA, 1523 bp, Homo sapiens
tctcggctcactgcaccctgcacctcctgggttcaggtgattctcctgcctcgggctcccaagtagctgggattacagggcgtgtgccactgtcaggcctctgagcccaagccaagccatcgcatcccctgtgccttgcacatatacacccagatggcctgaagtaactgaagaatcacaaaagaagtgaaaaggccctgccccgccttaactgatgacattccaccattgtgatttgttcctgccccaccttaactgagtgattaaccctgcaaatttccttctcctggctcagaagcacccccactgagcaccttgcgaccccccactcctgcccgccctttgactgtaattttccattaccttcccaaatactataaaacagccccacccctatctcccttcgctgactcttttcggactcagcccacctgcacccaggtgaaataaacagctttattgctcacacaaagcctgtttggtggtctcttcacacagacacgcatgaaatttggtgctgtgactcggatcgggggaccacccttgggagatcaatcccctgtcctcctgttctttgttccaagagaaagatccacctacgaccttggtcctcagaccgaccagcccaagaaacatctcaccaatttcaaatccacctcctttgtgttctcctcttgtattcccccaccttaaccctcaagtatatctctactccctccttggcgaccgatcatgcaccccttaccatctcattaaaacctaatcacccttaccctgctcaatgccaatatcccatcccacagcatgctttgaaaggattaaagcctgctatcactcgcctgctacagcatggccttttaaagcctataaactctccttacaattcccccattttacctgtcctagaaccagagaagatttacaggttagttcaggatctgcgccttatcaaccaaattgttttgcctatccaccccgtggtgccaaacccatatactctcctatcctcaatacctccctccacaatccattattctgttctggatctcaaacgtgctttctttactattcctttgtacccttcatcccagcctctcttcgctttcacttggactgaccctgacacccttcaggctcagcaaattacctgggctgtactgccgcaaagcttcacagacagcccccattacttcagtcaagcccaaatttcttccttatctgttacctatctcagcataattctcataaaaacacacacgctctccctgctgatcgtgtctgactgatctttcaaccccaaaaccttctacaaaacaacaactcctttccttcctaggcatggttagtgtggtcagaattcttacacaagagctgggactgtaccctgtaagttttctgtccaaacaacttgaccttactgttttagcctagccctcatgtctccgtgcagcggctgccgctgctttaacacttttagaggccctcaaaatcacaaactatgctcaactcactctctacagctc

SEQ ID NO: 132737 - DNA, 1079 bp, Homo sapiens
aacagtccgattttcagtggggtcccagagagatgggacgcggcttaggaggaatcccgggctgcgggcattccttggcccagtggccagatttccggcacgtgtagcaagctcctgtgggaggaggttctggaggaacgcctggctgctgcggttcaggcgtttggaagttcttgtgtgctggagatgtagctggggtttgtctcacagtggaggcaaggaattgcaactttttttttattattgtacaccttgaaggcgaggttaattaaatcctgttgtggggtttgagggccggaatctaatttttggagttttatttaatgtcgggagcagattggctaataaaatgtattttgagaataagatggccttttgaccttttagggtctagggctgtaaagtgtctcagggttgctgccaaacgagccatgaactgggctggatttttcatatttgataaaaaaagagcctaaacgcacactgatttgggagaggtctgataaggaaaaaggagcattaaccttgactatgcctttggctccagccacctttttaagagtaaattgctgagcaagttgggggagggctaagtcacggaacgaaactgtaagccggaccaggtgtgagggaggggaggtgacaaaaagattatagggtggaggagcataggctgaggaagaattgggacctagctcagcctggcgaggagcagcctggggaggaagggagaggtcagatgggtctgtagaaaaggaagattagaaagactcagcgatgcttggggttggtactgaggggacaggcgggagggaaagaaggaagatttgggacgagttgcactgggcacagagactaggaagggactgatgtgtaaaagaatgcctggacgtcaggcacctcagaccatttgcctattttacaacaagaattatttagatcttgcaagatggaaaaattcaaagtgccattttctggttatttggaactactgtcgagtttgtattggggtcaagcggcatagcagaagaaaataaggcatttaggttttaggtcaggtgtgagttgaagaggtttta

SEQ ID NO: 132738 - DNA, 6699 bp, Homo sapiens
atgtggaaaggccccaaaggattagacatgtatggaaagagctcagtgagccctaagacatcagatatactggggagagacactctcctgctggccttgaaggtgcaaacagtggtgttgcaaactgcctgtggagagggccatgtggcaggaaactgtgggaggcctctagaaactgaaggcagtctccagctgacagctactaagaagctaagggactcagtcctgcaaccaaaaagtcctgaattctgccaacaatttacaagagcttggaataggacccaagttccagatgagactgaagccccagctggcacctatgcagcccaatcgggggacctcccttgggagatcaatcccctgtcctcctgttctttgctccatgagaaagatccacctacggcctcaggtcctcagaccgaccagcccaaggaacatctcaccaattttaaatcgggtttcagaggtgtcagaccacgcagggacgcctgccttggtccttcacccttagcggcaagtcccgcttttctggggaaggggcaagtaccccaaccccttctctctgtgtctctaccccttctccgcctttctggggggcaagaaacacccaaccccttctccttcaccctgagtggcaagtccgcttttctagaggagcaagtaccccaacctcgtatctctgtgccccagtcccttatttccacgccccgacctcttatctctgtggcccaatcccttatttctgcaccccaacctcttatatctctgtgccccaatcccttatttccatgccccgacctcttatctctgcaccccaaccccttatttccacgacccaacccctttcccgcttttctggaaggagcttgctacaagtgccagaaatctggccaccaggccaaggaatgcctgcagcccgggattcctcctaagctgcgtcccatctgtgcgggaccccactggaaatcggactgtccaactcacctggcagccactcccagagcccctggaactctggcccaaggctctctgactgcttcccagatcttcttggctgagtggctgaagactgacactgcccgatcgcctcagaagcctcctggaccgtcacagacactttgggtaactcttacagtggaggtggctgccactgctttaatacttttagaggccctcaaaatcacaagctatgctccacttactctctacagttcccataactttcaaaatctattttcttcctcacacttaacgcatatactttctgcccccaagacccttcagctatactcactctttgttgagtcttccacaatcaccattgttgctggcccagacttcaatccggcctcccacattattcctgataccacacctgacccccatgactgtatctctctgatccacctgacattcattccatttccccatatttccttctttcctgttcctcaccctgatcacacttggtttattgatggcagttccaccaggcctaatcgccacacaccagcaaaggcaggctatgctatagtatcttccacatttatcattgaggctactgccctgcccccctccactacctctcagcaagccaaactcattgccttaactcaggccctcactcttgcaaagggactacttgtcaatatttatactgattctaaatatgccttccatatccagtaccaccatgctgttatatgggcagaaagaaatttcctcactacacaagggtcctccatcattaatgcctctttaataaaaactctgctcaaagccgctttacttccaaaagaagctggggtcattcactgcaaggggcatcaaaaggcatcagatcccattgctctaggcaatgcttatgttgataaagtggctagacaagcagctagctctccaacttctgtccctcacggccagtttttctccttcacttcagtcactcccacctactcccccactgaaacttccacctatcaatctcttcccacacaaggcaaatggttcttagaccaaggaaaatatcttcttccagcctcacaggcccattctattctgtcatcatttcataacctcttctatgtagacataattcctcggtttggccttcccacctctatacagtctgataacggaccagcctttactagccaaatcacccaagtagtttctcaggctcttggtattcagtggaaccttcataccccttaccgtcctcaatcttcaggaaaggtggaacggactaatggtcttttaaaggcacacctcaccaagtttagcctccaacttacaaaggattggacagcacttttacctcttgctcttctcaaaatcagagcctgtcctcgagatgctacaggatacagtccatttgaacttttatatggacgcactttcttgcttggccccaacctcatcccagacaccagccctctaggcgactatcttccagtactccagcaggctagacaggaaattcgccaggctgctaatcttctcttgcctactccagatccccagccatatgaagacaacctagctggacgatcagttcttgttaagaatctgacccctcaaactctacaacctcgatggaccggaccctacttagtcatctatagtaccccgactgccgtctgcctgcagaatcctccccactgggttcaccattccagaataaagctgtgtccatcggacagccagcctaatccctcctcttcctcctggaagtcgcaagtactctcccccacttcccttaaactcactcatatttctgaagaacatgcctacacagctgtccccgccttacagacagactgggcaacatctcccatctccctacacctccgaacttcctttaacagccctcacctttaccctcctgaagaactcatttactttctagacaggtccagcaagacttccccagacatttcacatcagcaagctgccgccctccttcgcacttatttaaaaaacctttctccttatatcaactctactccccccatatttggacctctcacaacacaaactactattcctgtggccgctcctttgtgtatctcttggcaaagacccactggaattcccctaggtaatctttcaccttctcgatgttcctttactcttcatctccgaagtccaactacaaacatcaatgaaacaattggagccttccagctccatattacagacaagccctctatcaatactgacaaacttaaaaacattagcagtaattattgcttaggaagacacttgccctgtatttcactccatccttggctatcttccccttgctcatcagactctcctcccaggccctcttcttgtttacttatacccagccccgaaaataacagtgaaagattgctcgtagatactcgacgttttctcatacaccatgaaaatcgaaccttcccctctacgcagttaccccatcagtccccattacaacctctgacagctgccgccctagctggatccctaggagtctgggtacaagacacccctttcagcactccttctcacctttttactttacatctccagttttgcctcgcacaaggtctcttcttcctctgtggatcctctacctacatgtgcctacctgccaattggacaggcacatgtacactagtcttccttacccccaaaattcaatttgcaaatgggaccgaagagctccctgttcccctcatgacaccgacacaacaaaaaagagttattccactaattcccttgatggtcggtttaggactttctgcctccactgttgctctcggtactggaatagcaggcatttcaacgtctgtcatgaccttccgtagcctgtctaatgacttctctgctagcatcacagacatatcacaaactttatcagtcctccaggcccaagttgactctttagctgcagttgtcctccaaggacaactccgaggccttgacttactcactgctgaaaaaggaggactctgtatattcttaaatgaagagtgttgtttttacctaaatcaatctggcctagtgtatgacaacataaaaaaactcaaggatagagcccaaaaacttgccaaccaagcaagtaattatgctgaatccccttgggcactctctaattggatgtcctgggtcctcccaattgttagtcctttaatacccatttttctccttcttttatttggaccttgtatcttccgtttagtttctcaattcatccaaaaccgtatccaggccatcaccaatcattctatacgacaaatgtttcttctaacatccccacaatatcaccccttaccacaagacctcccttcagcttaatctctcccactctaggttcccacgccgcccctaatcccactcgaagcagccctgagaaacatcgcccattctctctctccataccaccccccaaaaattttcgccgccccaacacttcaacactattttgttttatttttcttattaatagaagaaggcaggaaatgtcaggcctctgagcccaaagcccaggccatcgcatcccctgtgacttgcacgtatacgtccaggatgggcctggaagtaactgaagaatcacaaaagaagtgaaaagggcccctgccccacccttaactgatgacattccaaccacaaaagaacttgtaaatgggccgggtgtttgccttaactgatgaccattcccttgtgaaagtccttttcctggctcatcctggctcaaaaagcacccccactgagcaccttgcgaccccccactcctgcccgccagagaacaaaccccctttgactgtaattttcctttacctacccaaatcctataaaacggccccacccttatcttcccttcgctgactctctttttggactcagcccgcctgcacccaggtgaaataaacagcccatattgctcacacaaagcctgtttggtggtctcttcacaccgacgcatatgaaatttggtgctgtgactcagatcgggggacctcccttgggagatcaatcccctgtcctcctgttctttgctccgtgagaaagatccacctacgacctcaggtcctcagacccaccagcccaaggaacatctcaccaattttaaatcagacaaaggagacatgttttatccgtggacccaaaactccagtgccggtcacggactgggaaggcagccttcccttggtgtttaataactgcagggacacctctctgattatacacccacgtttcaagggtgtcagaccacgcagggatgcctgccttggtccttcacccttagcggcaagtcccgcttttctggggaaggggcaagctgctcctcgccaggccgagctaggtcccaattcttcctcagcctctgctcctccaccctataatctttttatcacctcccctcctcacacctggtccggcttacagtttcgttctgtgactagccctcccccacctgcccagcaatttactcttaaaaaggtggctggagccaaaggcatagtcaagcatgctttgaaaggattaaagcctgttatcactcgcctgctacagcatggccttttaaagcctacaaactctccttacaattcccccattttacctgtcctaaaaccagacaagccttacaagttagttcaggatctgcgccttatcaaccaaattgttttgcctatccaccccgtgctcggcataattgggctcacttcctccgtccgtcgggatgccgggcaggacctgaagcgtgaccgcgcggaatttcttcttggtgatgaagttcatcacccgcaccgtcggcggatagccgaagcgcgccgcctcctgctcgggcagcacttcgatccgctccatcgcctcatagggcaggttctggaactcggcgaagcccgatatgcgccgcccgttgagcagcatcaccggctcgcccccgctcgccgaactggtcagcgacttcacccgcttgagcagttcggccaggctgggcgcgcccagcgccgcaatcgcctcggcatcgagcaccgcgaccggctcgaccgccccgatgacggagccgggaatgcgcttgccggtgacggtgacttccgcagggggtgcctgttcgccgggatcggaattcgccctcggtactgtcggtatcgccagtcccaagacgaccgccgaccatcccacgccgcccctcggccgcgcgcgctccccataccgcatcgtccagccactcccatcgccgacgtgatggtgatgtttagtgtggcaatcatgtcacaattaaggctcgtgcttcgccatatcgacggaatatcgcggtggccgcctgccgtggttttcataactgacgtgaagatatggcttgtttacccgtccgacgattgtcgaataaggtcaaacgatcgcgacgacatgcagggagaagcgcccgcgatgagcatgaatgccgccgccagagtgggcgatccgatcggccacagctttagccagggcctgttcggcgaggcgctggatggtttgttctttgcccgtcgcagcgaggtggacatgcgcgcgggcaatctcggccggctgatcgcgcgcgggctgagcggcggacgctggacgccggccgatggccagctgacgctcggatcgcgcgacgtcttcatcaatggcccccccgccaccatgacgatccggtcgaccggccaatgccgccagcatagcggtctgcgcaccgtc

SEQ ID NO: 132739 - DNA, 3334 bp, Homo sapiens
gggggtggtatggagagagaatggacgatgtttctcagggctgcttcaagtgggattaggggcggcgtgggaacctatagtgggagagattaagctgaagggaggtcttgtggtaaggggtgatattgtggggatgttagaggacacaaaggaggctttggattgggaagaagggcagcaatgagatgtagctgtactccaggaatagtcagggaagcagataatttggttaaaatatttcggcctaataaggggagtgggcaggtggggataactaaaaaagagtgcataaaagagtgttgtccaagttggcaccagagtgggggagttttcaggggttttgaagcttggccgtcaatacccacaacagttatgggggcaagggaaacaggcccttgaaaagaaggcaacgtggagtgggtagcccccgtatcgattaaacaggggatggacttaccctccactgtgagagttactggcagctcggcgtccgtgatggtctccggggcttccgaggcgatcgggcagtgtcagtcttcaagctgctaagccaagaagatctgggaaggagtcagtcagagagccttgggccagagttccaggggctctgggagtggctgcccaggtgaagttgaacagtccgatttccagtggggtcccgcaaagatgggacacggcttaggaggaatcctgggctgcaggcattccttggcctggtggtcagatagatttctggcacttgtagcaagctcttgccttttccctggaaaagcagagaaggggtatagacacggagagaaggggttggggtacttgcccctccccgagaaaagcgggacttgccactaagggtgaaggaccaaggcaggtgtccctgcgtggtttgacacctttgaaacgtgggggaataatcagagaggtggccctgcaatgattaaacaccaagggaaggctgtcttcccagtccgtgaccggcgccggagttttgggtccacggataaaacgtgtctcctttgtctctaccagaaaatgaaaggaattgaaattaagagaagggagagattgaattgtggcgccaagattgaaaggagaaagaggttgaaggatagtgayggaggttggagaagagagtaagaagcaggccgcttaccggatttgaaattggtgagatgtttcttgggctggtcggtctgaggacctgaggtcgtaggtggatctttctcacggagcaaagagcaggaggacaggggattgattctcccaatgggaggtctcccccgatccaagtcccgggtcttggcaccaaatttcatgcgcggcaccaaatttcatgcaatgtcatgcatgtccgtgtgaagagaccaccaaacaggctttgtgtgagagcaataaagctgtttatttcacctgggtgcaggtgggctgagtgcaaaaagagagtcagcgaagggagataggggtggggccattttataggatttgggaaggtaatggaaaattacagtcaaagggggttgttctctggtgggcaggggtgggggacacaaaggtgctcagtgggggagcttctgagccaggagaaggaaattcacagggttaatccctcagttaaggtggggcaggaacaaatcacaatggtgcaatgtcatcagttaaggcggggcagggctttttcacttcttttgtggatcttcagttacattcaggccatcatggatgtatacatgcaagtcacaggggatgcagatggcttggcttgggctcagaggcctgacattcctgccttcttatattaataagaaaaataaaaccaaatagtgttgaagtgttggggtggtgaaaaatttttgaggggtggtaggggagagagaatgggcgatgtttctcagggctgcttcaagtgggattaggggcagcgtgggaacctagagtgggagagattaagctgaagggaggtcttgtggtaaagggtgatattgtggggatgtaagaagaaacatttgtcatatagaatgattggtgatggcctggataccggttttggatgaattgagaaactaaatggaataacagaaggagaaaaacaggtataaaaggtctaagaattgggaggacctaggatatctgattagagagtgcctaaggagattcagcagagtcctgccagcaaagattattgatttacttcaagagttaagagtggcagtttggggatagcaccaggagatatcagctgtgatggcttggagaaacagtgtaaaccggcagtgtaaacaagagcagggcatgtatgagtagttgagaatggtgaataggagtatgactagacaaaagatagtagggatgaccaagtttttttgggggcacagtctaagttggtccaagtgtctggaatgagactggggcctaataaaaaggagcgtctatacaggagcttaaatgggctcctgtacaccttgtaagcattctgaggacaggccagaattctgagaagggaaagtggtaaaaagtattgtccagtcctttttaaagttggtggctgagcttggtgaggtgtgtttttaaaagaccctttagtccgttctacttttcttgaagaaggaggaccgtaagggatataaatggtttcactgaatactaagagcctgaaaaactgcttggctgatttgactaataaaggctcgtctgttatcagactgtattgaaggtgggaaggctaaactgaggaattatgtctgacagaatgggaagaaatgactgcggtgcccttctcagaccctgtaggaaaggcctctacctatctagtgaaagtgtctacttagactaagaggtattctagtttttgtgactcagggcatgttgaataaagctaatttgccagtcctgggtgggggcaaatcctcgagcttgatgtgtaaggaagggagggggcctgaataatccctgaggaatagtagaacagcagatggaacactgagaaattatttccttgaggatagatttccacgatggaaaggaaatgagaggttctgagaggcaggctagtggcttgtactatagcatagcctgcctttgctggtgtgtggcgattaggcctggtggacccaccatcaataaatcaagcgtgatcagggtgaggaacaggaaagaaggaaatatggggaaatggggtgaatgtcaggtggatcagagagatacagtcatgggggtcaggtgtggtatcaggaataatgtgggaggccagattgaggtctacgccatcgaacagtggtacacgggggacctataccttaagcgactcccgcctcctcgttcccgggcctgctcactgccg

SEQ ID NO: 132740 - DNA, 377 bp, Homo sapiens
caaaggagcaactatagtatatgccctggatacactttttattatggaaatgaaacatgaatttgaagaagcaaaatcatgggttgaagaaaatttagattttaatgtgaatgctgaaatttctgtctttgaagtaaatatacgctttgttggtggactactctcagcctactatctgtctggagaagagatttttcgaaagaaagcagtggaacttggggtaaaattgctacctgcatttcatactccctctggaataccttgggcattgctgaatatgaaaagtggtattggaaggaaactgggcctgggcctctggaggcagcagtattctggcagaattttggaaccctgcatttggagtttatgcacttgag

SEQ ID NO: 132741 - DNA, 1404 bp, Homo sapiens
tgtatctaaaatcaaagtaaggggaaattttaagagatgtttggcaaactaacttcatatattattattatttccgaagatggaatatactatgcttctattccaacttgaagcttattagaaaaatatcttgatataaatgattgtgtgtagatttctcctccccagttttaaaaagactcaatatgatgagtgaaaaacggagttaatctgacccataactcttcgacgtcatctcttctttagtggtattggaaggaactggccctgggcctctggaggcagcagtattctggcagaatttggaaccctgcatggcatgaaaattgttttttagattttcacggtaacattttattttctattataggtaatgaatattcgaacagtactgaacaaactggaaaaacattatctgaattaaaagctgaatcactctaaaattcatttccctctctttccagatcatgtatcagttggaggacttggagacagcttctatgagtatttgctgaaggcctggttaagtataaatttgagaagagattacaaaatgttaaaaaataagtgtttttcacaggctatcgagactcatttgatccgcaagtctagcagcggactaacttatatcgcagagtggaaagggggcctcctggagcacaagatgggccacctgacctgcttcgcggggggcatgttcgcactcggggctgatgcagctcccgaaggcatggcccaacactaccctgtaagcactgtccaggaaaataacccttattcattcattccatgtcctttagttatgaaactgggaccagaagctttcagatttgatggtggtgttgaagccatcgctacaagacaaaatgaaaaatactacatcttacggccagaagttatggagacttacatgtatatgtttcgactctcaggaagtgacttcttttcctccttcctactcctgcctcctcaggcttcatcctgtttccaaaccctctttgatttgttcaaggtgcctgattctctgtgttctatccttgagttcagacgacactcaagcagacagccttactccacggatcagccatttatatatctggtaggcaagagaatactcttctgtcctctgacttaggatttaactcatgatgcttgctattttcttacctacccttcatcctttgtttagagctccaatcattataaacattctcatatcctgttctctgctatttgcacatcccagtcacataggatcactaataatagaagcatttactcaaaaccaaggtggtccccatgcctaaaggctgataaatcccaagaacagattatagtacaatgatgatctggttagacttagtcatacaaacacatgacagcttccactgttgagatgctgat

SEQ ID NO: 132742 - DNA, 400 bp, Homo sapiens
  misc_feature (1)...(400): n = a,t,c or g
cggacgcgtgggcggacgcgtgggccagctcatctttcacctcacccccctcctcctccttggctttaattatgctaatgttggaggagaatgaataaataaagtgaatctttgcnnnnnnnnnnnnngggggcccccttttaagggatccatttttttccccccggggtggccaagttaannnnnnnnnnnggggcccccaaatttcaattccggggcccggtttttaaccnnnnnnnnnnnnaaaaccccgggggtccccccatttaatccccttggcgcaaaaanannggntnnttganaatgctgctactacctcctcctattagtgctgggttctgcaacatccctgcgcaccactgcctcctgatgcctgctgcctcctccagctcctctaagg

SEQ ID NO: 132743 - DNA, 450 bp, Homo sapiens
  misc_feature (1)...(450): n = a,t,c or g
cacattagnnnnnnctgctatttcggacacagcatggacatgagggtccccgctcagctcctggggctcctgctactttttctccgaggtgccagnnnnnnnnnnnnnnnnnnnnnnnnnnnnnnnnnnnnnnnnnnnnnnnnnnnnnnnnnnnnnnnnnnnnnnnnnnnnnnnnnnnnnnnnnnnnnnnnnnnnnnnnnnnnnnnnnnnnnnnnnnnnnnnnnnnnnnnnnnnnnnnnnnnnnnnnnnnnnnnnnnnnnnnnnnnnnnnnnnnnnnnnnnnnnnnnnnnnnnnnnnnnnnnnnnnnnnnnnnnnnnnnnnnnnnnnnntctccaacctgaggattctgcaacttatctctgtcaacagacttatactgggccgtacacttttggccaggggaccaacctggaaatcagacgaactgtggctgcaccatctgccttcatc

SEQ ID NO: 132744 - DNA, 1251 bp, Homo sapiens
  misc_feature (1)...(1251): n = a,t,c or g
ggacacagcatggacatgagggtccccgctcagctcctggggctcctgctgctctggctcccaggtgccagatgtgtcatctggatgacccagtctccaggcaccctgtctttgtctccaggggaaagagccaccctctcatgcagggccagtcaaagagttaacagcaactacttggcctggtatcaacagaaaccagggaaaacccctaagctcctgatctacggtgcatccaatttggagacaggggtcccatccaggttcagtggaagtggatctgggacagattttattttcaccattagcagcctgcagtctgaagatattgcgatgtactattgtcagcaatataataattggcctcacccctcgaacgttcggccaggggaccaaacttgaagatcaaacgaactggtggctgcaccatctgttgttcatcttcccggcccatctgatgagcagttgaaaatctgggaactgccttctgcttgtgtgcctgcctgaaataacttcctatccccagagtaggccaaaagtacagtgggaaggtgggataacgcccctccaaatcggggtaactcccccaggagagtgttcacagaggcaggactagacaaggaacagcaccctacagccctcagcaggcaccctggacggtgaggcaaagcaggattacggaggaaacacaaagtcttacggcttgcgaagttcaccccttcaggggccttgaggtttcggcccgttcacaaaggagctttcaacaggggggagagtttttaggagggagaagtgcccccacctgctcctcagtttccagcctggacccccttcccattccttttgggccttttgacccttttttttccacagggggaccttacccctattttgcgggtccttccagcttaatctttcacctcacccccctcctagtcccttggctttaattatgctaaatgttggaggagaatgaataaactaaagtgaatctttgcacctnnnnnnnnnnnntaaaaaatttaacccatcctagggggacactaacacattgacatttttttgccctaactgtctaaaataaaatcctcaatttgttaacattatcaggctaccgactaaaaatactttgatcaggtggacatttagcagggtggaccatgttatggactcccgggctcgaaaaccggaagagcactggacctgtgtggggggtactttacatcaaaaccccttttctagggcatgggaggc

SEQ ID NO: 132745 - DNA, 868 bp, Homo sapiens
  misc_feature (1)...(868): n = a,t,c or g
cccacgcgtccgcggacgcgtgggcggcgaacgcggaagagcaccgccatgataggcctcggggcacgctacgcagagtacaaggtatgtgggtcgctgcctgcccacccccaaaatgccacacgccgccccttttaccggcatgcgaaatctttgcgcctaatcatgtcgtcgccaagtccccgctttctggtactttgtatctcagttaaaagaagatgaagaaagtcttccaggggaagattggtctacttgtggggcaggtgttttgagaaagttcccccctgcggggtgaaagaactttcggggatcttggcttgcggctatggactcccgggagcgggcacccaccaacatgttaccggggaataaccggggaccttgaccacccgcaggcggctgttcaacccagttgcttacccgagacaatggggttgccccgggcaccggcgccccgaagccccatttccatttcagattcattgaaaggttggaagggagattcgcgggccagcaaagttgccgccggcccggcttgttcaaagcagtttccacgaattccaagatcaagtttcccgcttgccccaacggggtccttgcgccgtcagcacaagccacgctttcacgaccaagaggcccaacaccttcttcttaggtgcagggccctcgtccggggtgtgccccaaataaactcaggaacgccccggtgaacataaaactttaaaaagaaaatacttgaaaatataaatggggggggcccctttaaaagaaccannnnnnnnnncggggggaggggaagaaaatatttttttttgggggccccaaaattgaatccccgggccgggtttttaaaaaggggggaggggga

SEQ ID NO: 132746 - DNA, 784 bp, Homo sapiens
atggatgctcaggtgtcaggacatgatcggatggagctcagatataaaacaagtcctgtgttccttcgtccactggccagcactactcaagagtctgtgtcacattttatacctgcacaggcccatgcttttacttgtattacatgcaaaatgccagtgtctttgtgttgtacagaaaagggcagagcttccaaccgtgctgtgaggtttggccttatggggtctccccacgtgagatcctgtggggaatttggggactctgtggccttgggtatctccgagcccctttgggaagagcaggaaccccagaaactctttcaaggccctgtgaagacacagcatcagagcataagagatcagcggctccacaagtactcacacactcgtcccaattccaaaaacacggccggaaagggcctcagtgcgcctagccaggcgttttggggaaagccagagagctgtgcagttactcctcgatttcccaaatcaaaagacgaaggatggtttttgatattaggagaagtggataagagagaacttattgctttgaaaagagtaggatatattcgaaatcatcatgttgcttccctttctttttatacccctgaaatacctggaagtcccttcaccgggcattccaccgccacggcgacggcgacatcctcctctttacaggtagagctgaccggaaacagcatttatgaatacattcacccggcagaccacgacgagatgacggcggtgctcaccgcccatcaaccctaccactctcacttcgtgcagg

SEQ ID NO: 132747 - DNA, 5425 bp, Homo sapiens
atgcagggaccttatcttttactatggttaccagactcccttgaggaaggaaaggaaggcctatatcttggaaattgtattcacacgtgcctggtgactgtccctgaagatgcattttttccccacttcttgacacagcattcaggcacacaccttccccctagttcagatatccccagtcacttcatgaataattccacaggaaggcttgcacagagaattctaggtacttctacagaagcatttttatctccagaagtgatggtgtttgtacatgctcgaaatgccactgtaagaacagctatgtctctaatagaaagagcaaaaaattgtggccatattcccttcttttttcctacccaaggacatgactatgtacttgcagaaaaacaggtacaaaggtcgagaaataagcaagtacgagaattattcccagatggttttagtattcatcatgcaggaatgcttcggcaggacagaaatttagttgaaaacttgttttctaatgggcatatcaaagtcctagtgtgtacagctacgttagcctggggtgtcaatcttcccgcccatgctgttattattaagggaacacaaatatatgctgcaaaaagaggctcctttgttgaccttggaattttagatgtcatgcagatatttggtcgagctggacgaccacaatttgacaaatttggggaaggaataattataacaacgcatgataaactcagccattacctcactttgctcactcaacgaaacccaattgagagtcagtttctggaaagccttgcagataacctaaatgcagagattgctctgggaacagttactaatgtggaagaagcagtgaagtggataagttacacttatctttatgtacggatgagagcaaatccattagcatatggcatcagtcacaaggcttatcagattgacccaccattaaagaaagcatcgagaacagtttggtcattgaaggttggacgaaaactagacaaaagctcagatgattcgttttgaggagcgaactggatatttttcctcaactgatttgggtagaactgccagccattactatattaaatacaacaccattgagacctttaatgaactctttgatgctcacaaaacagaaggtgatatctttgccatagtctccaaagctgaagaatttgatcaaattaaggtcagagaagaggaaatagaggagttagataccttattaagcaatttttgtgaactctccactcctggaggtgtagagaatagttatgggaaaataaacatcttacttcaaacttatatcagccgaggagaaatggacagtttctcccttatatcagattctgcatatgttgcacagaatgcagctagaattgtccgtgctctttttgaaattgctctgaggaaacgttggcctaccatgacctacaggctcctgaatcttagtaaagtcattgacaagaggctttggggttgggctagccctttgagacaattttcaatcctaccaccacacatcctaacaagattagaagaaaaaaagcttactgtggataagctgaaagacatgaggaaagatgaaataggtcacattttacatcatgtgaatattggactgaaggtcaaacaatgtgttcatcagattccttctgttatgatggaagcatccattcagcctatcacaaggactgtcctccgagtgacactcagcatctatgctgatttcacttggaatgatcaggtacatgggacagtaggagaaccttggtggatttgggtagaagatcctacaaatgatcatatttatcattcagagtattttctagctctaaaaaaccaagtcattagtaaagaagcccaactactggtatttacaatccctatttttgagcctttgccttcccaatactacatccgagcagtgtctgatagatggttgggtgctgaggcagtatgtattatcaactttcaacatctaattctaccagagagacatcctcctcatacagaattactggatcttcagcctttaccaatcacagctttggggatgtaaagcatatgaagccctgtacaacttcagccactttaaccctgtacagacacaaatatttcatacattgtatcacacggattgtaatgtcctacttggagcacctactggatcgggaaagactgttgcagctgaattagccattttcagagtcttcaacaaataccctacttcaaaggcggtatatattgcacccctaaaagccctagtacgtgaaagaatggatgattggaaagttagaatagaagaaaaacttggtaaaaaagttattgaactaacaggggatgtgactcctgatatgaaatccattgccaaggctgaccttatcgtcactacgccagagaagtgggatggagtcagcagaagctggcaaaataggaactatgttcagcaagtcactattctcatcatagatgagatccatctgcttggggaggaaagaggccctgttctagaggtcattgtatctcgaacaaattttatctcatcacacacagaaaagcctgttagaatagttggactatctactgcattagctaatgccagagaccttgctgattggctcaatattaagcagatgggcttgtttaacttccgaccatcagtacgcccagttccactggaagttcacattcaaggctttccaggtcaacattactgtcctcgtatggctagtatgaacaagcctgcatttcaggcaattagaagccattctccagccaaacctgttttgatatttgtctcatcaagacgtcaaactcgtcttactgctttggaattgatcgccttcctggctactgaagaagatccaaagcagtggttaaacatggatgaaagagagatggagaacatcattgcaacagtaagagattccaacctcaagctgacccttgctttcgggataggaatgcatcatgctggactacatgagagggaccgaaaaacagtagaggaactatttgtaaactgtaaagttcaggttcttattgctacaagcacattagcctggggtgtaaactttccagctcatttagtaattattaagggaacagaatactatgatggaaaaacaagacgttatgtggattttcccattacagatgtcctccagatgatggggcgtgctgggaggccgcagttcgatgaccaaggcaaagctgtaattctagttcatgacataaagaaagacttttataaaaaatttctttatgaacctttcccagtagaatcaagtttattaggagtgctctctgaccacttaaatgcagagattgctggtggtacaattacatctaagcaagatgcattggattatatcacctggacttactttttccgacgtcttatcatgaatcccagctattacaatttgggtgatgtgagccatgattctgtgaacaagtttctgtcccatctgattgagaagtccctgattgaattggaactttcctactgtattgaaattggagaggataatcgcagcattgaacctctaacttatggccgtattgcgttcctattactatttgaagcatcaaacagttaaaatgttcaaggaccgcttgaagcctgaatgcagtactgaagaactgctttcaattctaagtgatgcagaagaatatacagatttgccagtgagacacaatgaagatcatatgaatagtgaactggcaaaatgtcttcccattgaatcaaatcctcattcatttgacagccctcacaccaaagcacatctcctgctacaggcacatctcagccgagccatgctaccctgcccagattatgacactgataccaaaacagtcttggaccaagctctcagagtatgtcaggcaatgctgggacgtggctggcaaaccaggggctgggctgggtgactgtcctggaatatcaccaacctgattcaggatgggtgatccaggggtcggtgggtttaaagggactcttctcttcttacactaccaaacatagaaaaccatcatcttcaccttttcaagaaattggaagccgattatgaagggcccacatgctaggggtcggacttccatcgagtgccttcctgatttgatccattcctgtggagggaaagaccatgtattgagctccatggtagaaagtgagctacatgctggcaaaaacgaaacaggcatgggaatttcttatctcacttgccagtgataaatgttggcataagtgttaaaggctcgtgggattgacttagtttgaaggacataatgaactctctgtctcaactctgactgcagacaaacgagatgacaacaaatggatcaaattgcatgctgaccaagagtatgtgcttcaagtgagcttgcagagagtccactttgggttccacaagggaaagccagagagctgtgcagttactcctcgatttcccaaatcaaaagacgaaggatggtttttgatattaggagaagtggataagagagaacttattgctttgaaaagagtaggatatattcgaaatcatcatgttgcttccctttctttttatacccctgaaatacctggaaggtatatctacacattatatttcatgagtgactgctaccttggcctggaccagcagtatgacaatctatctcaacgttacacaagcgagtctttctgcacaggtcaacaccaaggtctctgattccctgactgacctggcattaaagtaacttgacctgaacaatccatttgaaaggagtggctaagaattctctctgttcagtcatctagacaaatcgaattacttgatgtttgccttgaaagaatcaacttctaacctcaaccatccagggaaattgacagtggctgcagtattgactccagtgacataaagttaaccacagtgggccttttaacaaatgttgccttttataatgttatctttatgagtttcttggatatgtaagatgaaaaagcatttaggaataatcttttaatttgtgttatatttggggatggatatttaggagctatcaatcaaattttacatctcacaatgtacctgtttaccatggatattggcctgcctttttttaaggaaaaccacattgagatggttgccaagtgttaggaccttgtcacagatttcctaactctgccgcataaactataaatctgtaaggtggtacacagcgtgtccttgttagcaaaatttatactttgatatgatcacatgtagaagtagcttccaagaatttcttgtagtcataaatgtttaataatatatgatgtaaaattatattatggagcctaatgatgataacaaagaaaacaatatactgatcttagaaaatgtagacatggttaactgggaaataaaatatagagtggcacttcaagacaaaaaaaaaaaaa

SEQ ID NO: 132748 - DNA, 657 bp, Homo sapiens
cccagtgagggacagtacttttctccctcactccatgaatgaccctacaatgaattatttttcccctaaagccaagggagaaagagtatagattttaaaagggtatgtgaccccttatttttcctaccttaggaaaacagtagcccaaacccaccctagtcacttgtgtacatatttacatttatttacaaaagtatctacatcatcagtaaaaacaatttactgacaaaaaaagcaagcacctagtcatataataagttgatgacagccaaaactaatgcttgttctttgttagtgggtatttcttcttaaagcagctgcttcaagttacatttccaacagttgttcaaaaattgtaatactcaaatgagaaatcagatcggctttttacgtttttaaaataatttagttatgctgttgtcttcatcttctgttaccaatcaattggagctacaaaaaaaaatcatattattaacttgtaaaatgcagtaaatctgggctgcagaccaggagtctttaatttaccctcctattctaaagtgaatagcccttttgtaataaactcatcaaagccaagggagctagggagcagggatggaggaagaactgccttgagtgctcttgggatagtagtctgagtaacacttgaagaacagc

SEQ ID NO: 132749 - DNA, 1106 bp, Homo sapiens
gcttgtggctgggcactcgcgcagaggccggcccgacgagccatggttgctgggatcgacgcggggcggtcttctgggggtcctcagcgtggtctgcctgctgcactgctttggtttcatcagctgtttttcccaacaaatatatggtgttgtgtatgggaatgtaactttccatgtaccaagcaatgtgcctttaaaagaggtcctatggaaaaaacaaaaggataaagttgcagaactggaaaattctgaattccagagctttctcatcttttaaaaatagggtttatttagacactgtgtcaaggtagccctcactatctacaacttaaacatcatcaagatgaaagatgaagtatgaaatggaatcggccaaaatagttactgatcaccatgaagttccttccttatgtgccttgagtctctttccaatctcccacactaacttggtgcattgactaatggaagcattgaagtccaatgcatgataccagagcattacaacagccatcgaggacttataatgtactcatggggattgtccctatggagcaatgtaaacgtaactcaaccagtatatattttaagatggaaaatgatcttccacaaaaaaatacagtggttctcttagcaatccatttatttaatacaacatcatcaatcattttgacaacctgtatcccaagcagcggtcattcaagacacagatatgcacttatacccataccattagcagtaattccaacatgtattgtgctgtatatggaatgggtattctgaaaatgtgccagaaacccagacagaacccaactccaattgattggtaacaggaggatgaagacaacagcataacctaaattattttaaaaacttaaaaagcccatctgatttctcatttgagtattacaatttttgaacaactgttggaaatgtaacttgaagcagctgctttaagaagacatacccactaacagagaacaagcattagttttggctgtcatcaacttattatatgacggggtgcttgctttttttgccagtaaattgtttttactgatgatgtagatacttttgtaaataaatgtaaatatgtacacaagtgaaaa

SEQ ID NO: 132750 - DNA, 386 bp, Homo sapiens; identical to SEQ ID NO: 114494

SEQ ID NO: 132751 - DNA, 344 bp, Homo sapiens; identical to SEQ ID NO: 114497

SEQ ID NO: 132752 - DNA, 268 bp, Homo sapiens; identical to SEQ ID NO: 132728

SEQ ID NO: 132753 - DNA, 381 bp, Homo sapiens; identical to SEQ ID NO: 119823

SEQ ID NO: 132754 - DNA, 396 bp, Homo sapiens
gtgtcagaccacacagggacgcttactcactgcagggacgcctctctgatcattcacccacgtttcaagggtgtcagaccacgcagggacgcctgccttggtccttcacccttagcggcaagtcccgcttttctggggaaggggcaaccacatctccggcacacaagaacttccaaacacctgaaccgcagtggccaggcattcctccagaacctcctcccacaggagcttgctacacgtgccggaaatctggccactgggccaaggaatgcccgcaggccaggattcctcctaagccgcatcccatctgtgtgggaccccactgaaaatcggactgttcaactcacctggcagccactcccagagcccctggaactctggcccaaggctctctga

SEQ ID NO: 132755 - DNA, 404 bp, Homo sapiens; identical to SEQ ID NO: 127040
  misc_feature (1)...(404): n = a,t,c or g

SEQ ID NO: 132756 - DNA, 439 bp, Homo sapiens
  misc_feature (1)...(439): n = a,t,c or g
ctgnnnnnnnnnnnnnnnnnnnnnnnnnnnnnnnnnnnnnnnnnnnnnnnnnnnnnnnnnnnnnnnnnnnnnnnnnnnnnnnnnnnnnnnnnnnnnnnnnnnnnnnnnnnnnnnnnnnnnnnnnnnnnnnnnnnnnnnnnnnnnnnnnnnnnnnnnnnnnnnnnccacctaggcaagctaagatgcagaatctcgccgctcctggcagccactcccagagcccctggaactccggcccaaggctctctgactgactccttcccagatcttctcggcttagcggctgaagactgacactgcccgatcgcctcggaagccgccttcttttcaagggcctgtttcccttgcctccataactgttgtgggtattgacggccaggcttctaaacctcttaaaactccccaactctggtgccaacttagacaatactcttttaag

SEQ ID NO: 132757 - DNA, 511 bp, Homo sapiens; identical to SEQ ID NO: 114302

SEQ ID NO: 132758 - DNA, 568 bp, Homo sapiens; identical to SEQ ID NO: 117129
  misc_feature (1)...(568): n = a,t,c or g

SEQ ID NO: 132759 - DNA, 1287 bp, Homo sapiens; identical to SEQ ID NO: 114506

SEQ ID NO: 132760 - DNA, 933 bp, Homo sapiens; identical to SEQ ID NO: 117142

SEQ ID NO: 132761 - DNA, 581 bp, Homo sapiens
agacaaaggagacaggttttatccatggacccaaaactccggcaccggtcacggactgggaaggcagccttcccttggtgtttaatcattgcagggacacctctctgattattcacccatgtttcaagggtgtcagaccacgcagggatgcctgccttggtccttcacccttagcggcaagtcccgcttttctggagaaggggcaagatttaattaacctcgccttcaaggtgtacaataatagaaaaaagttgcaattccttgcctccactgtgagacaaaccgcagccacatctccagcacacaagaacttccaaatgcctgaaccgcagcggccaggcgttcctccagaacctcctcccacaggagcttgctacatgtgccggaaatctggccactgggccaaggaatgcccgcagcccgggattcctcctaagccgcgtcccatctgtgtaggaccccaccgaaaatcggactgttcaacttacctggcagccactcccagagcccctggaaatctggcccaaggctctctgactgactccttcccagatcttctcggcttagcagctgaagactga

SEQ ID NO: 132762 - DNA, 428 bp, Homo sapiens; identical to SEQ ID NO: 117150
  misc_feature (1)...(428): n = a,t,c or g

SEQ ID NO: 132763 - DNA, 675 bp, Homo sapiens; identical to SEQ ID NO: 117408

SEQ ID NO: 132764 - DNA, 1344 bp, Homo sapiens
atgcagaaacgactttggaactgggtaacaggcagagattggaacagtttgcagggctctgtagaagataggaagatgcgagaaagtttggaactctctagagacttaccgaatggctttgaccaaaatgctgataatgatattaatgatgaaaaccaggctgaggtggtctcagatagagatgaggaacttgttggtaactggagcaaagggactcctgaggattacccacgatttttccatatgcatcctaggacagcagaacttagtctcctggagccagtaaacagagactttcaccagaaatttgatttggttattaaggctgaacaagacaatggtcatcctcttcctgcctttgccggtctacacattgaaatactggatgaaaacaatcaaagtccatattttacaatgcccagttatcaaggctatatcctggaatctgccccagtgggagcaaccatttcggacagtctcaatttgacttcacctttaagaatagtagctctggacaaggacatagaagatacaaaagacccagagcttcacctttttctgaatgactacacctcagtcttcaccgtcacacagactggtattactcgctacctcaccttacttcaaccagtggacagggaagaacagcaaacttacaccttttcgataacagcatttgatggtgtacaagaaagtgagccagtcatcgtcaatattcaagtgatggatgcaaatgataacacgccaaccttccctgaaatatcctatgatgtgtatgtttatacagacatgagacctggggacagtgtcatacagctgctgatggcaacaaaagacactggggactactatggagggagagagggagaagagacaattgaaaaattaactattgtgtactatactcagtatctgggtgacagaatcaatcataccccaaacctcaacatcatgcaatatacccagggggcttccgaggcgatcaagcagtgtcagtcttcagccgctaagccgagaagatctgggaaggagtcagtcagccttgggccagagttccaggggctctgggagtggctgccaggtgagttgaacagtccgattttcagtggggtcccacacagatgggacgcggcttatgaggaatcccgggctgcaggcattccttggcccagtggccagatttcctgcatgtgtagcaagctcctgtgggaggaggttctggaggaacgccttgccgctgcggttcaggcatttggaagttcttttgtgctggagatgtggctggggtttgtctcacagtggaggcaaggaattgcaacatttttctattattgtacaccttga

SEQ ID NO: 132765 - DNA, 513 bp, Homo sapiens
atgcacatggtagaaaaaacaaggcgatctctcaccgtaataaggcggtgtcaagaagcagaccgggaagaattgaattactggatccggcggtacagtgacgccgaggacttaaaaaaaggtggcggcagtagcagcagccactctaggcagcagagtcccgtcaacccagacccagttgcactagacccatctgacctctcccctccctgccagcccaagctaggtcccaattcttcctcagcctctgctcctgcaccctgcaatctttttatcgcctcccctcctcacacctggtccggcttacagtttcgttccatgactagccctcccccacctgcccagcaatttactcttaaaaaggtggctggagccaaaggcatagtcaagaaaataagaattaatgatcctaaaggatttggcttgagtgttggaactactgtagagaaagtgggtgaccatcttcataatttagagaatgaagagttagtgacagactccattgctgcctga

SEQ ID NO: 132766 - DNA, 501 bp, Homo sapiens
agtggggccgttttttaggatttgggtaggtggtggaaaattacagttaaagggggttgttctcttgcgggcaggggcgggggtcacaaggtgctcagtggggagctccggagactcactgtcccggagaaggaatgtcacaaggtaatgtcatcagttaaggcaggaactagccattttcacttcttttgtggttcttcagttgcctcaggccatctggatgtatacatgcatgcttgggctcagaggccggcctgacattcctgtcctccactgtaagagttacccaaggcgtctgtgatggtccaggaggcttcccaggcaatcaatcgggcagcgtcagtcttcagccgctaagctgagaagatcggatttaaaattggtgagatgttccttgggctggtgggtctgaggacctgaggtcataggtggatctttttcatggagcaaagaacaggaggacaggggattgatctcccaagggaggtccgccaatccgag

SEQ ID NO: 132767 - DNA, 878 bp, Homo sapiens; identical to SEQ ID NO: 129191

SEQ ID NO: 132768 - DNA, 816 bp, Homo sapiens
atgagccaggaaaaggactttcacaagggggcttccgacacgatcaggcagtatcagtcttcagccgctaagccgagaagatctgggaaggagtcagtcagagagccttgggccagagttccaggggctctgggagtggctgccagaaaagcaggacttgccgctaagggtgaaggaccaaggcaggcgtccctgcgtggtctgacacccttgaaacatgagtgtataatcagaggcgtccctgcaatgattaaacaccaagggaaggctgccttcccagtccatgaccggcgccggagttttgggtccacggataaaacgtgtctcctttgtctctaccagaaaatgaaaggaattgaaattaagagaagggagaaattgaagtgtggcaccaagattgaaaggagaaagaggttgagggatatgcactatttaaaattcttaaaagaatccaggatacaagatgcaggtggtgatggtcagaatgaagggcctggaatagagattcctaaaaagaggtcacatgaggaacatttggagggattgaaagcacgcatgaataatcagaccgcactgctgctgttaattgtaaaaatcattagtaaacttccaggtgctgtttactatataagcattgtaattttctatcctaaaatcagcaactcccccacatcattgtctgccccagggcatgagcactgtgcagctttgaggttgtcaaaggcagttgcagccccatttactgggactgaaagagatcgatccacacctgcagcgtttgaggcaataattcctgatattaaccagacctcatga

SEQ ID NO: 132769 - DNA, 561 bp, Homo sapiens
atgccacatcagaatgggaataaatgtggctaccagaggagcctgcaaagtttctggattctaatggaaaagaagaaactgccttttgcctggaatttcctgatgtggccccaaatagctatccatctcatgcccttagacatgcttttccatacctgtgaaataaacagccatgttgctcacacaaagcctgtttggtggtctcttcacaccgacgcatatgaaatttggtgctgtgactcagatcgggggacctcccttgggagatcaatcccctgtcctcctgttctttgctccgtgagaaagatccacctacgacctcaggtcctcagacccaccagcccaaggaacatctcaccaattttaaatcagaccatcacggatgccgagcttcgggtaactctcacagtggaagaatgctccttattttctctccgagtcgtggactctatgcctgctcatgtgtcaagacgtagctcaacttccaacttcactaaaattatcaacctcacggtgggttctcagctagagttaggccttcccatagctctaaatctctag

SEQ ID NO: 132770 - DNA, 1452 bp, Homo sapiens; identical to SEQ ID NO: 116732

SEQ ID NO: 132771 - DNA, 1463 bp, Homo sapiens
atgctgtcagacaaatgtcagcatcagataatgcatatggatagcatgcatgacatgaccatcaccatcatgatcaccgtcaagcttcttattggagaaactgacagcatacgttttaaactagccattaaacctgcctgtgaccttgtcagcctccaccacgtttatctggatggatgcatggttcttggcaccggtgacgcggttactagcagagactttcttccgcatgtacaggtccacaagctcgccggtgtgcttttggatttcaagactgtgcctgctgccacgacactgcgtaattcttctattccttcagctcttcctgaaccgatgactgctagtgaagcagctgctaggaaaagccaaataaaagccagaataacagataccattggaccaacagaaacctcaattgcaccaagacaaagaccaaaggccaactctgctactactgccactcccagtgtgctgaccattcaaagttcagcaacacctgttaaagtccttgctcctggtgaattcggtaaccatagaccaaaagagtacagtgtctctcccggcggctttcatgggctggccgttgagtatcagcagctttttcaggcgcatgttgcaagctgtaggattgaacagttgcatttgaatgtaggcagccgccacagcagcatagagtactccagcaactacagcagggagattggagattacagcaactccatttacagcatcgtcatcctcaccagcagcagcagcagcagcagcagcaacagcaacagcagcagcagcaacagcaacagcagcagcagcagcagcagcagcagcaccaccaccaccaccaccaccacttacttcaagatgcttatatgcagcaggtcagttgctgataaagaggccattgcaaatttcacaaatcagaagaacatcagcaatccacctgatatgtcagggtggaatccttttggagaggataatttctctaagttaacagaagaggaactattggacagagaatttgaccttctaagatcaaactcagcccacctgcacccaggtgaaataaacagccatgttgctcacacaaagcctgtttggtggtctcttcacacagatgtgcatgaaatttggtgccgtgactcggatcgggggacctcccttgggagatcaatcccctgtcctcctgttctttgctccatgagaaagatccacctacaacctcaggtcctcagactgaccggcccaaggaacatctcatcaattttaaatcaggagcttgctacacgtgccggaaatctggccactaggccaaggaatgcctgcagcctgggattcctattaagccgcatctcatctgtgtgggaccccactgaaaatcggactgttcaactcacctggcagccactcccagagcccctggaactctggcccaaggctctctgactccttcccagatcttggcttag

SEQ ID NO: 132772 - DNA, 2206 bp, Homo sapiens; identical to SEQ ID NO: 129196

SEQ ID NO: 132773 - DNA, 1197 bp, Homo sapiens
ttaagtcactggctttgtcactggggtgctcccagatgtaagtatctggggttcgtgtggctgctcagacttggagggaagatgactgtaactctgacagccattgtcagtgggtccagctgagtcccggactttcttctcactggccgcagtcaatgtgtcttgggccatgtcctcaagaagtacttgttttccttgataaggtatcagggcagaacgggaatctgaagacctgagctttggctccagttctgctaagacccgttttgttacaatgacaatccactcagctactctaagctttggtgtctgaaaagccaggatgatggagaagacattctctaagtttccttccagttctaaaattctctttctcctttcaatcttggcgccacacttcaatctctcccttctcttaatttcaattcctttcattttctggtagagacaaaggagacacgttttatccgtggacccaaaattccggcgccggtcacggactgggaaggcagccttcccttggtgtttaatcaatgcagggacgcctctctgattatacacccacgtttcaagggtttcagaccacgcagggacgcctgccttggtccttcacccttagcagcaagtcctgcttttctggggaaggggcaagctgctcctcgccaggccgagctaggtcccaattcttcctcagcctctgctcctccaccctacaatccttttatcacctcccctcctcacacctggtcaggcttacagtttcattccatgactagccctccccctcctgcccagcaatttcctcttaaaaaggtggctggagctaaaggcatagtcaagcggctgaagactgacactgcccgattgccttggaagcccccagaccatcatagacgccgagcttcgggtaactctcacagtggaagggtacagcctccctcccggctgccttcgtgggctcatgttgagtgtctcaggcttttccaggagcacggtgcaagctgtcagtggatctaccgttctgggatctggaggacagtggttttcatgtgcgtccgtgtgaagagaccaccaaacaggctttgtgtgagcaacatggctgtttatttcacctgggtgcagttacttcaggccatctgggcgtatacgtgcaagtcacaggggatgcgatggcttggcttgggctcagaggcctga

SEQ ID NO: 132774 - DNA, 1143 bp, Homo sapiens; identical to SEQ ID NO: 117159

SEQ ID NO: 132775 - DNA, 909 bp, Homo sapiens; identical to SEQ ID NO: 114873

SEQ ID NO: 132776 - DNA, 1983 bp, Homo sapiens
atggtgtgtctggagtttgttccttcagatgttcagatgtgtccagagtttcttccttccagtgggtttgtggtctcactgacttcaggagtgaagccacagaccttcgcagtgagtgttacagctcataaaggtggcacacccagagttgtttgttcctcccagtgggttcgtggtctcgctgacttcaggaatgaagctgcagaccctcacgaccagggaatggatgagaatcctactgattttctggaacggctaagaggggccttggtaaagcacatgtctctatctcctgatttagtcgagggacaattaatcctaaaggataaatttattactcaggcagcccctgatattgagaggaagctgcagaaacagaatgggccatctctcagggacatatttttcagtccccagaatggctacaattggaggatggcaagcttttatctaccagttgcgaacaaatggaaaattcttaaaagcctttaccagatcttacacctaggcccagattgggagggaccttacactgtatttctttctactcctatggcagtggaggtcactggaatagactcttggattcattacacccaagtgaaggcctggaaagctgatggagccacctctgtcaacccagaagagcacccaaagtaccaaggtgaaataaacagccatgttgctcacagaaagcctgtttggtggtctcttcacacggacgtgaatgaaatttggtgccgtgactcggatcgggggacctcccttgggaaatcaatccccggtcctcctgctctttgctccatgagaaagatccacctatgacctcaggtcctcagaccgaccagcccaaggaacatctcaccaattttaaatcaggagcttgctacacgtgccggaaatctggccactgggccaagcgaatgcccgcagcccgggattcctcctaagccgcgtcccatctgtgcgggaccccacttgaaaattcggacttgttcaactcaccttgggcaagccactcccagagcccctggaactccggcccaaggctctctgactgactccttcccagatcttctcggcttagcggctgaagactgacactgcccgatcgcctcggaagccgcctagaccatcacggacaccgagcttcgggtaactctcacagtggaggtatgggacatctctactccttccctggcaactgatcacatgcccgttaccatcccattaaaacctaatcacccttaccccgctcaacgccaatatcccatcccacagcacgctttaaaaggattaaagcctgttatcactcgcctgctacagcatgggcttctaaaacctataaactctccttacaattcccccattttacctgtccaaaaactggacaagtcttacagattagttcagaatctgcgccttatcaacaaaattgtttcacctatccatcctgtggtgcccaacccaccagcctttactagtcaaatcacccaagcagtttctcaggctcttggtattcagtggaaccttcatatcccttatcatcctcaatcttcaggaaaggtagaacggactaatggtcttttaaaggtacacctcaccaagctcagcctccaacttaaaaaggattggacagtacttttacctcttgctcttctcagaattagagcctgtcctcgagatgctacagggtacagtcgatttgaacttttatatggacgcactttcttgcttggccccaacctcatcccagacaccagccctctaggcgactatcttccagtcctccagcaggctagacaggctgctaatcttctcttgcctactccagatccccagccacatgaagacaccctagctggacgatcagttcttgttaagaatctgacccctcaaactctacaacctcgatggaccggaccccacttcatcatctatagtaccccgactgccgtctgcctgcaggatcctccccactag

SEQ ID NO: 132777 - DNA, 1758 bp, Homo sapiens
atggccatactgtccaaggtaatttatagattcaatgccatccccatcaagataccaatgactttcttcacagaattggaaaaaactgctttgaagttcatatggaaccaaagaagagcccgcatcgccaagtcaatcctaagccaaaagaacaaagctggaggcatcacactacctgacttcaaactatactacaaggctacagtaacttttccaaaaacatacaatgctatctccaagagagaatctgactcagcccgcctgcacccaggtgaaataaacagccatgttgctcacacaaagcctgtttggtggtctcttcacacagatgcgcatgaaatttggtgctgtgactcggatcgggggacctcccttgggagatcaatcccctgtactcctgtgttctttgctccgtgagaaagatccacctacgacctcaggtcctcagaccgaccagcccaaggaacatctcaccaattttaaatcagcttagcagcttaagactgacactgcccgatcgcctcagaagccccctagaccatcacggacgccgagcttcagcccgcctgcacccaggtgaaataaacagccatgttgctcacacaaagcctgtttggtgttctcttcacacggacacgcatgaaatttggtgccatgagtcggatcgggggacctcccttgggagggcaatcccctgtcctcctgttctttgctccatgagaaagatccacctacgacctcaggtcctcagaccgaccagcccaaggaacatctcaccaattttaaatcgggaaaagtagaacggactaaagggtcttttaaaaacacacctcaccaagctcagccaccagcttaaaaaggactggacaatacttttaccactttcccttctcagaaatcaggcctgtcctcagaatgctacaaggtacatcccatttaagctcctgtatagacgctcctttttattaggccccagtctcattccagacaccagagaacaaaccccctttgactgtaattttccattaccttccctaatcctataaaacggccccaccccatctccctttgctgactctcttttcggactcagcccgcctgcacccaggtgaaataaacagccttgttgctcacacaaagcctgtttggtggtctcttcacacggacgcgcatgaaatttggtgctgtgactcggatcgggggacctcccttaggagaccaatcccctgtcctcctgctctttgctccgtgacaaagatccacctacgacctcaagtcctcagacccaccagcccaagaaacatctcaccaatttcaaatccggctgctcctcaccaggccgagctaggtcccaatccttcctcagcctctgctcctccaccctataatctttttatcacctcccctcctcacacctggtctggcttaccgtttcgttccgtgactagccctccccctcctgcccagcaatttactcttaaaaaggtggctggagctaaaggcacagtcaaggttcctgatcctgttccttcagactggatgagacctcccaacaggggtccccagccatctacagatgcattgaggctggcaataggtcagtgccctactgggatgcagcttcagaggaaggggcaggctgccatctttgctgtttctcagccttcactggtgatacctccaggtatgggaataactgaggaaactagagtctggagggcactcacagaaaactgcagcagtactacagaagagtag

SEQ ID NO: 132778 - DNA, 6218 bp, Homo sapiens
atggaggctgagaagttccatcagatgccatctgtgagccggagaaccaggaaagccagtggtgtaattcagtccaaatctgagaacctgagaaccaggggagccaatagtcacgctttaaaaagattaaagcctgttatcactcgcctgctacagcatggccttttaaagcctataaactctccttacaattcccccattttacctgtcctaaaaccagacaagccttacaaacggtttctcgccttttacggttggagtccacgttctttaatagtggactcttgttccaaactggaacaacactcaaccctatctcgggttattcttgtgatttataagggattttgccgatttcggaaccaccatcaaacaggattttcgcctgctggggcaaaccagcgtggaccgcttgctgcaactctctcagggccaggcggtgaagggcaatcagctgttgcctgtctcactggtgaaaagaaaaaccaccctggcgcccaatacgcaaaccgcctctccccgcgcgttggccgattcattaatgcagctggcacgacaggtttcccgactggaaagcgggcagtgagcgcaacgcaattaatggattttgccgatttcggaaccaccatcacacaggattttcgcctgctggggcaaaccagcgtggaccgcttgctgcaactctctcagggccaggcggtgaagggcaatcagctgttgcctgtctcactggtgaaaagaaaaaccaccctggcgcccaatacgcaaaccgcctctccccgcgcgttggccgattcattaatgcagctggcacgacaggtttcccgactggaaagcgggcaatcttctcagcttagcagcttaagactgacactgcccgatcgcctcagaagccccctagaccatcacggacgccgagcttcaggtaactctcacagtggaaggatcgggggacctcccttgggagatcaatcccccgtcctcctacactttgctctgtgagaaagatccacctacaacctcaggtcctcagaccaaccagcccaagaaacattctcaccaatttcaaatccgagacaaaggagacacgttttatccgtggacccacaactccggcgccagtcacggactgggaaggcagccttcccttggtgtttaatcactgcagggacacctctgtgattattcacccacgtttcaaaggtgtcagaccacgcagggacgcctgccttggtccttcacccttagcggcaagtcctgcttttctggggaaggggcaagctgctccttgccaggcggagctaggtcccaattcttcctcagcctctgctcctccaccctataatccttttatcacctcccctcctcacacctggtccggcttacagtttcgttcggtgactagccctcccccacctgcccagcaatttactcttaaaaaggtgcctggagctaaaggcatagtcaagcggctgaagactgacactgcccgatcgccttggaagacccctagaccatcacggacgccgagcttcagaaaagcagaacggactaaaggtcttttaaaaatacacctcaccaagctcagccaccaacttaaaaaggactggacaatacttttaccactttcccttctcagaattcaggcctgtcctcggaatgctacaagactggctactggccaattgggatatccttttatcagtcaaagctatgtcctggtcaatggatttcaaactgttgaggatctatgtgaagctgcagaccttcgagtgagtgttgcagaccttcgagtgagtgttacagctcttaaggtggcgcgtctggagttgttcgttcctcccggtgggctcgtggtctcgctggcttcagcagtgaagctgcagaccttcgcggtgttacagctcataaaagcaaaaagatgggactggggcaccttggagcagggggcggcgctcatcggggaggctcgggacgcacaggagcccacggagggggtgggaggctcaggcatggcgggctgcaggtccagagacctgccccgcgggaaggcagctaaggcccggcgagaaatcgagcgcagcgccgggctgacgatcaagaaggaaagatgcatacgaaatggatacagcaaagaaaaaatgaaactcatagttgtttctcatggcctccatgtaaatgacttgcagcataaactgacgcttttcaccaaggaaacatacacatacctagccagggattcagagaagcagaagcaggggtatctagcaggacttgaaggagcccatgccaacagggtgaaccagcagatcagtgacaacttagtagttaaaacaggggccttaccccctccttatagaaccaagggagaaaagctctatttttatatgtccagacagaactgccttttcagcgtatcagggcaactcctccaaggtttctttcctaatggaggacaagctgcacctaacccttatgctctgctttcccaaataccagaagaagcagaatggtttacagtcctggaccttaaggatgactttttctgcatcccttacatcctgactctcaattcttctttgcctttgaagatccttcgaacccaacgtctcaactcacctggactgttttaccccaaggtttcaggccatctatttggccaagcattagcccaagacttgagccagttctcatacttggacactctcgtcctttgtggggtgttaaagtctcccattattattgtgtgggagttgaatcaaatagacacaataaaaaatgataaaggggatatcaccaccgatcccacagaaatacaaactaccatcagagaatactataaacatctctacacaaataaactagaaaatctagaagaaatggataaattcctcaacacatacaccctcccaagactaaaccaggaagaagttgaatctctgaatagaccaataacaggagctgaaattgaggcaataattaatagcttaccaaccaaaaaaagtccaggaccagatggattcacagccgaattctaccagaggtacaaggaggagctggaggccagcatcatcctgataccaaagcctggcagagacacaaccaaaaaagagaattttagaccaatacccctgatgaatattgatgcaaaaatcctcaataaaatactggcaaaccgaatccagcagcacatcaagaagcttatccaccatgatcaagtgggcttcatccctgggatgcaaggctcgttcaacatatgcaaatcaataaacgtaatccaggatataaacagaacgaatgacaaaaaccatatgattatctcaatagatgcagaaaaggcctttgacaaaattcaacaacccttcattctaaaaactctcaataaattaggtattgatgggacgtatctcaaaataataagagctatctatgacaaacccacagccaatatcatactgaatgggcaaaaactggaagcattccctttgaaaactggcacaagacaggggtgccctctctcaccactcctattcaacatagtgttggaagttctggccagggcaatcaggcaggagaaggaaataaagggcattcaattaggacaagaggaagtcaaattgtccctgtttgcagatgacatgattgtatatcgagaaaaccccatcgtctcaacccaaaatctccataagctgataagcaacttcagcaaagtctcaggatacaaaatcaatgtgcaaaaatcacaagcatttttatacaccaataacagacaaacagagagccaaatcatgagtgaactcccattcacaattgcttcaaagagaataaaatacctaggaatccaacttacaagggatgtgaaggatctcttcaaggagaactacaaaccactgctcaaggaaataaaagaggatacaaacaaatggaagaacattccatgctcatgggtaggaagaatcaatatcgtgaaaatggccatactgcccaaggtaatttatagatttaatgccatccccatcaagctaccaatgactttcttcacagaattggaaaaaactactttaaagttcatatggaaccaaaaaagagcccgcattgccaagtcaatcctaagccaaaggaacaaagctggaggcatcacactacctgacttcaaactatactacaaggctacagtaaccaaaacagcatggtactggtaccaaaacagagatatagaccaatggaacagaacggagccctcagaaataatgccacatatctacaaccatctgatctttgacaaacctgacaaaaacaagaaatggggaaatgattccctatttaataaatggtgctgggaaaactggctagccatatgtaggagaaagctgaaactggatcccttccttacaccttatacaaaaattaattcaagatggattaaagacttaaatgttagacctaaaaccataaaaaccctagaagaaaacctaggcaataccattcaggacataggcatgggcaaggacttcatgtctacaacaccaaaagcaatggcaacaaaagccaaaattgacaaatgggatctaattaaactaaagagcttctgcacagcaaaagaaactaccatcacagtgaacaggcaacctacagaatgggagaaaatttttacaatctacccatctgacaaagggctaatatccagaatctacaaagaactcaaacaaatttacaagaaaagaacaaacaaccccatcaacaagtgggtgaaggatatgaacagacacttctcaaaagaagacatttatacagccaaaaggcacatgaaaaaatgctcatcatcactggccatcagagaaatgcaaatcaaaaccacattgagataccatctcataccagttagaatggcgatcattaaaaagtcaggaaacaacagaccaagctccaatgtcttctctgtgaaactttctgagatccaatccttggctctcatagagactaggtgcttaatgaatgctgatgaacagggtgtgccactgattcaagaaatgctggaatcttgggcaagtatttgcaaagttcccaagtatccaaatgccgaagcagtgcggccagaagagcaaacaccccacctgcacccaggtgaaataaacagccatgttgctcacacaaagcttgtttggtggtctcttcacacggacacgcatgaaatttggtgccgtgactcggatcgggggagacctcccttgggagaatcaatcccctgtcctcctgctctttgctccgtgagaaagatccacctacgacctcaggtcctcagaccgaccagcccaagaaacatctcaccaatttcaaatccagctgctcctcgccaggctgagctaggtcccaattcttcctcagcctctgctcctccaccctataatccttttatcacctcccctcctcacacctggtccggcttacagtttcattccgtgactagccctcccccacctgcccagcaatttactcttaaaagggtggctgaagctaaaggcatagtcaagcatgctttgaaaggattaaagcctgttatcactcgcctgctacagcatggccttttaaagcctacaaactctccttacaattcccccattttacctgtcctaaaaccagacaagccttacaggaaggcaggcccctccccactcaaatccctgtccagggtccagggtccagagaagggagtggcccaggcagagaaccccattgtccactttgcctctgctgctctgccagtctgcaggggcagaaggatgcccgtgcccaggaagaatgctgaagccagatccgaaatcgctaatttacaggcagcgcagtgggatgcttttggattcgggacacctgggcccagacccagccgccccaccccggcgccccgggcttgtgcacagcaggagcctccgccccgcgggtgtgggttggacgaggccaagggcagcggccggccaggggccaggccagagtccagcactgccctcggaggaagccgggtgggggcggcgctcctgaaggctccagccccggggagggaagccggccccgcacctcccgcactgggcgctcagacccctggtgcttccacggcgtctgagggtttctcagccaccgaagggtgtctccgccgcacccaacgggtcccccggtggagagatttgccttcacatcagattaaagggggttccgtttggtga

SEQ ID NO: 132779 - DNA, 5621 bp, Homo sapiens
atggatgcagttggaggccattatcctcagataattaacacagaaacagagaaccaaatatcacatgttttcacttataagtgggagctaaacactggctctttgctccgtgagaaagatccacctacgacctcaggtcctcagaccgaccagcccaagaaacatctcaccaatttcagatccgagacaaaagagacatgttttatccgtgaacccaaaactccagcgccggtcacggactgggaaggcagccttcccttggtgtttaatcattgcagggacgcctctctgattatacactcacgtttcaagggtgtcagaccacgcagggatgcctgccgttggtccttcacccttagcggcaagtcccgctttcctggggcaggggcaagtacccctcaaccccttctccttcacccttaagcggcaagtcccgcttttctggggcaggggcaagtacccctcaaccccttctccttcacccttagcagcaagtcccgctttcctagggggcaagaaccccccaatcgcttatttccgccgcaccccaacctcttatctctgtgccccaatcacttatttctgcaccctgacctcttatctctgtgccccaatcccttatttccctgccccaaccccttctctgctttcctggagggcaagaacccccccaccccttctccatgtctctactcttttctctgggcttgcctccttcactatgggcaagcttccaccttccattcctccttcttctcccttagcctgtgttctcaaaaacttaaaacctcttcaactcacacctgacctaaaatctaaatgacttattttcttctgcaatgccgcttgaccccaatacaaactcgacagtagttccaaatagccggaaaatggcactttcaatttttccatcctacaagatctaaataattcttgtcctaaaattgacaaatggtctgaggtgcctgatgtccaggcattcttttacacatcggtccctgtgcccagtctctgtgcccagtgcaactcatcccaaatcttccttctttccctcctgcctgttccctcagtcccaaccccaagcatcgctgagtctttctaatcttccttttctacaggcccatctgaactcttcccctcctccccaggcatgctgctccttgccaggccgagctaggtcccaattcttccatcagcctctgctcctccaccctataatctttttatcacctcccctccctcacacctggtccggcttacagtttcgttccgtgacttagccctcccccaacttgctcagcaatttactcttaaaaaggtggctggagccaaaggcatagtcaaggttaatgctcctttttctttatccaacctctcccaaaatcagttagcgtttaggctctttttcatcgaatataaaaacccagacaagttcatggctcatttggcagcaactttgagacgctttacagccctagaccctaaaaggtcaaaaggccatcttattctcaaaatacattttattagccaatctgcttcccgacattaaataaaactccaaaaattaaattccggccctcaaaccccacaacaggacttaattaacctcgccttcaaggtgtacaataatagagtagaggcagccaagtagcaacatatttctgagttgcaattcctccttgcctccactgtgagacaaaccccagccacatctccagcacacaagaacttccaaacgcctgaactgcagcggccaggcgttcctccagaacctcctcccacaggagcttgctacacttgccggaaatctggccactgggcaagggaatgcccgcagcctgggattcctcctaaggcgcgtccccatctgtgtgggaccccactgaaaatcggactgttcaacttcacctgggcagccactcccagagcccctggaacactggccaaaggtctcgtgacctgacgtcgttcccagatcttcttggcttagcagcctgaagactgacactgcccgatcacctcagaagcacccttgaccatcacggatgcccgagctatggggtaactctcgacagtggaaggtaagcccgtccccttcttaatcaatacggaggctacccacgccacattaccttcttttcaagggcctgtttcccttgcctccataacctgttgtgggtattgacgggccaggctttctaaacctctttaaaactccccaactcatggtgccaacattagacaatacgtcgttttaagcactcctttttagttatccccatcgtgccaggttcccttattaggctgaggacactttaactaaattatctgcttccctgactattcctggactacagctgtatctcattgccacccttcttcccaatccaaagcctcctttgtgtcctcctcttgtatacccccaccttaacccacaagtataagatatctctactccctccttgggcgaccgatcatgcaccccttaccatctcattaaaacctaatcacccttaccccactcaacttaaagtgccaatatcccattcccgcagcacgctttaaaaagattaaagcctgttatcattccgcctgttacagcatgggccttttaaaccctataaactctccttacaattcccccatttttcctgtcctaaaacgagacaagccgttacaagttaagttcaggatctgcgccttatcaaccacattgttttgttgcctatccaccccgtggtggccaaacccatatactctcctatcctcaataccgtcccgtcgtactacccatttattctgttctggatctcagacatgctttctttactattgctttgcacccttcatcccagcctctctttgccttcacttagactgaccctgacacccattaaggctcaacaaattaccctgggctgcactgccacaagggtttcacagacagcccccattacgttcagtgaagcccaaatttcatcctcatctgttagtcatactcccgttcaccgttctcaactactcatacatgccctggctccttctttacactggccgggtttacactggtttctccaaggacatcacagctggatatctcctgggtgctatccccaaactggccacttctaaactcttgaagtaaataaataatctttgctggcaggactctgctgaatctccttaaggcactcttctaatcagatatcctgagtcgtcccaattcttagaccttttatacctgtttttctccttctgttattccatttagtttctcaattcatccaaaaccggtatccaggccatcaccaatcattctatatgacaaatgtttcttcttacatccccacaaatatcaccctttaccacaagacctcccttcagcttaatctctcccactctaggttcccaaggtgccccctaatcccacttgaagcagccttgagaaacatcgcccattctctctccctaccacccctcaaaaattttcaccaccccaacacttcaacaactattttggttttatttctccttattaatataagaaggcaggaatgtcaggcctctgagccccaagccaagccatctgcatcccctgtgaacttgcacgtatacgtccaggatgggcctgaatgtaactgaagaaatcacaaaagaactgaaaagggcccctgccccgccttaactgatgacattccaccaatggtgatttgttcttgccccaccttaactgagtgattaaccctgtgaatttgcttctcctggctcagaaagctccccaaactgagcaccttgtgaccccccacccctgcccaccagagaacaaaccccctttgactgtaattttcctttaggtacccaaatcctataaaacggccccacccctatctcccttagctgactctcttttgggactcagcccgcctgcacccaggtgaaataaacagcccatattgctcacacaacgcctgtttggtggtctcttcacacggacgcacatgaaatttggtgccaagacccgggacttggatcaggggacttcccttgggagaatcaatcccctgtcctcctgttctttgctccgtgagaaagatccacctacgacctcaggtcctcagacccaccagcccaaggaacatctcaccaatttcaaatccaagacaaaggagacaggttttatccatggacccaaaactccggcaccggtcacggactgggaaggcagccttcccttggtgtttaatcattgcagggacacctctctgattattcacccatgtttcaagggtgtcagaccacgcagggatgcctgccttggtccttcacccttagcggcaagtcccgcttttctggagaaggggcaagctgctcctcgccaggccgagctaggtcccaattcttcctcagcctctgctcctccaccctataatctttttatcacctcccctcctcacacctggtccggcttacagtttcgttctgtgactagccctcccccacctgcccagcaatttactcttaaaaaggtggctggagccaaaggcatagtcaagaccatcacagacgccgagcttcgggtaactctcacagtggaaggccgagacagtttaactaaattatctgcttccctgacgattcctggactacagccacatctcattgccgtccttctccccaacccaaagcctccttcgcgtcttcctctcatatccccctaccttaacccacaagtatgggacatctctactccttccctggcaactgatcacatgcccattaccatcccattaaaacctaatcacccttaccccactcaacgccaatatccaatccctcagcacgctttaaaaggattaaagcctgttatcactcgcctgctacagcatgggcttctaaaacctataaactctccttaccattcccccattttacctgtcctaaaaccagacaaggcttacaagttagttcagaatctgcgccttatcaaccaaattgttttgcctatccactccatgaatgctccttattttctctccgagtcgtggactctatgcctgctcatgtgtcaagacgtagctcaacttccaacttcactaaaattatcaacctcacgaactagctaccaagtgaccactttgacgagccttgaggaaaaggcggagggggctttagcacacactcagctaacgaaagtgtgccggttcatttcccacagctccacacaaactcccagggcctctgcagttctgggagaaccagtacccatcagtgctctagggctcccaagtcctgcagccttctgggaatgcctttcctttcccatctgccatcacactaatgataatagtcggccacctccaggatgccctaggattcccaaggccacatcacctacaccacttcttgacagagccaagagtgatgctggaaggggaagcaggaagcagaagaagaaagggacccagaacagtggaatgcaggagctcaggggccacgcaggagtgtggttctgcgtctggcccaggcacatcacacctgccttgggcatagtatcctcaaacctgctagttgaggggcgggaaaaattcacagaatattttagtgatttcttgctcagataa

SEQ ID NO: 132780 - DNA, 979 bp, Homo sapiens
gaccagcaccatggcggttggcaagaacaagcgccttacgaaaggcgcgcaaaaagggagccaagaagaaagtggttgatccatttcctaggcaaagattggtattgacgtcgaaagcaccctcttatgttccattataagaaatattgaaaaagacgttgggtcccccaggaccccaagggacccaaaattgcaatctgatggtctcaaagggtccgtgtgtttgaaagtgagtcctgctgaattgccagaatgattgaagtttgcatttagaaaattcaaggctgattactgaagatgtttcaggggtaaaaacttgccctgacttaacttcccatggggcatgggatctttacccgtgacaaaattgttgttccatggtccaaaaaatgggcagaccaatgattgaagcctcacgttgaatgttcaagacttaccgattggttacttgctttcgtctgttctgtgttgggttttacctaaaaaaccgcaacatatcagatcacggaagaccctcttatgctcagccacccaacagggtccgcccaaatccggatagaagatgatggaaatacatgacccgcagaggttgcagaccaatgtgccttgaaaagaagtggtcaataaattgattccagccagcattgggaaaagacataggaaaaggcttgccaaatctatttatcctctcccaaaatgtcttcggttaaaaaagtaaaaatgctgaaggaagcccaagttttgaattgggaaagctcatggagcttcatggtgaaggcagtagttctggaaaagccactggggacgagacaggtgctaaagttgaacgagctgatggatatggaccaccagtccaagaatctgttggaaagttcagacttccaatagtgggcaatagaagtggccattgtgtgaaaaaagaaaaacaaagttcacgccgccgcgattttggtgttagtgtccacccgcggattccgcc

SEQ ID NO: 132781 - DNA, 957 bp, Homo sapiens
  misc_feature (1)...(957): n = a,t,c or g
gcgtcgaccgcagcaccgcgcatgctccttctttttcagccccggtaccggaccctgcagccgcagagactgttgatgcctaagaagaaccgctattgccatttatgaaactcctttttaagggagggagtcatggtgcccaagaaggaatgtccccatccctaagcacccggagctggcagaacagaaatgtgcccaaccttcatgtcatgaaggccatgcaagtctctcaaagtccccgaggcctacgtgaaaagaacagtttgcctgaagaaaatttcctactggtgccttaccaattgagggtaccaaggggtttnaatttcctnccgtgattaccttgcatctgcccccgggagattgtgcctgcccacccctacgccgtagccgtccagaagactgggcaggccttcggcctaaaaaggtctggaagggtgaagcgaccttgcgagacttcacaagaacggggaagctggacagagattaccttacagacgggagtgctgtgccaccctggtggccgacaagaaagccgaggctgggggcttgggtcagaaacccgaatttccagttttagaggcggatttgttcgtggacgtggtcaagccacctcagtaaaatttggagagagattctttttgcattggaataaacttacagccnnnnnnnnnnnnggggggccccctttaaggagcccacttttatccccccggggtggccgacgaaaaatttttttataggggccccaaaaataaatcccggggccccgttttaaaaccgctgggagggggaaaacccgggggtacccacatttaatccccttgggacaagaattnaaacagnntntgtnaaccctatttacttcttaattgtactttgcgcatttggaggaaaaacccgcctggggagctacacactcacatgaaaactgtgcaaacgagtactaggcttgactct

SEQ ID NO: 132782 - DNA, 455 bp, Homo sapiens; identical to SEQ ID NO: 128231

SEQ ID NO: 132783 - DNA, 2039 bp, Homo sapiens
atgtttgccccaaaccccaggtctgaccacatacctgtattttccacagctcactttagtgccaaggaggctggggacctgtctacactcttcgatgttggtggcatcataggcggcatcgtggcagggctcgtctctgactacaccaatggcagggccaccacttgctgtgtcatgctcatcttggctgcccccatgatgttcctgtacaactacattggccaggacgggattgccagctccatagtgatgctgatcatctgtgggggcctggtcaatggcccatacgcgctcatcaccactgctgtctctgctgatctgaccttgcatgtggattggttttgctgctgtaaggaaagggctcaaggacagcagctcagcatcctgtggctgcacacgcagagtgagagggacatggtggcagggcctatcgagggtctgcgtggccaggaacgaggaggtgcggctctggggcctctgctggctgggctcatctcccccagcgggctggaacaatgtcttctacatgctcatctctgccgacgtcctagcctgcttggagcctcgtgctaacaaggaggccgctaatgagctggccggagctgtggacctgggctggatggcaaatgtgaggaggaacccccgggacatggtaaccagcacgcatctggggacacacttccacttaaggaagacaccacccaggggagagaaaacgtgtgagcttgcctcgcagcagcctctcattgaagctacaactaaaaccaagagtgtggccgtatctcacatactgacttatacgcctccaacactaaacggcgtggctgcggttagctctcgggtccatttttcattctggcccccaactctgcagacgggcctggagcagggcagcatgagcttcaccatttgctttaccacctccaccaactaccagtccctgcattccatccagccacacagccacagcgtccagttcatcagcagcacagccaaagtctatgcagtcctcaggggcttgggctcccggacctcagtgtccttctccaccagcttctggagtggctgggggtctggaggcctggctgcagggatgccagggattgacaatgcccgtcttgctgctgatgactttagagtcaagtataagacggagctggtcatgtgcctgtctgtggagagcaacgtccgtgggctccacaaggtcactgatgacaccaatgtcactcggctacagctggagacagagatggaggctctcaaggaggagctgctcttcatgaagaagaaccaagagaaggaagtaaaaggtctacaagccctgattgccagctctgagttgaccatggaggtaaatgcccccaaatctcaggacctcagcaacatcatggcagacctcccggcccagtatgatgagctggcccagaaagaactgagaagagctggacaagtactggtcccaagaagacttgaggaacacaccacagtggtcaccaacaccagtctgcttgaggtttggagctgctgagacgcacgcctcacagagctgagacgtaccagtccaggtctttggagattcgacctggactccatgaagaaatctgaaaggccagcttggagaacagccttgagggaggtggaggccccctacgcccttacagatggagcagcttcaacgggatcctgctgcaccttgagtcacagctgggacagacaccgcgcacagaggcacagcgccaggcccaaggagtatgaggccctgcttgaacatcaaggtcaagcttggaagctgagatctgccaccttacccggccgccttcttggaagaatggccaaggactttaatctttggtgattcctttggacgaacgcaactcctttcaaaacctcccaaaaaaccaacaccccgccgggtaatgtggatggcaaagtggtgtcttgagaccaattgacaccaaagttctgaggcattaagccagcagaagccagggtacccttttggggagcaggaggccaataaaaagttcagagtttcaaaa

SEQ ID NO: 132784 - DNA, 897 bp, Homo sapiens
atgggccaccatcgtcggcaaagcctgagtcctgtcctatctctctactccccggacagcatgagcttcaccactcggtccaccttcttcaccaactaccagtcactgggctctgtccaggcgcccagctacggcgcccgggcggtcagcagcgcggccagcgtctatgcaggcgccgggggctctggttcccggatctccgtgtcccgctccaccagcttccggggtggcatggggcctgggggcctggccgcggggatggctgggggtctggcaggaatgggaggcatccagaacaagaagaccatgcaaagcctgaacgaccgcctggcctcttacctggacagagtgaggagcctggagactgagaaccgtaggctggagagcaaaatccgggagcacttggagaataagggaccccaggtcaaagactggagccattactgcaagaccatcgaggacctgagggctcagatcttcgcaaatactgtggacaatgcctgcatcgttctgcatattgacaatgcccgtcttgctgctgatgactttagagtcaagtatgagacacagctggcgatgcgccagtctgtggagaacgacatccatgggctccgcaagctggagacagagattgaggctctcagggaggagctgctcttcatgaagaaccacgaagaggaagtaaaaggcctacaagcccagattgccagctttaggttgaccgtggaggtagatgcccccaaatctcaggacctcgccaagatcatggcagacatccgggcccaatatgacgacctggctgggaagaaccgagaggagctagacaaatactggcctcagcagtttgaggagaacaccacagtggtcaccacagtccgccgaggttggagctgctga

SEQ ID NO: 132785 - DNA, 423 bp, Homo sapiens
aaagcctgagtcctgtcctttctctctccccggacagcatgagcttcaccactcgctccaccttctccaccaactaccggtccctgggctctgtccaggcgcccagctacggcgcccggccggtcagcagcgcggccagcgtctatgcaggcgctgggggcctggccaccgggatagccgggggtctggcaggaatgggaggcatccagaacgagaaggagaccatgcaaagcctgaacgaccgcctggcctcttacctggacagagtgaggagcctggagaccgagaaccggaggctggagagcaaaatccgggagcacttggagaagaagggaccccaggtcagagactggagccattacttcaagatcatcgaggacctgagggctcagatcttcgcaaatactgtgggacaatgcccgc

SEQ ID NO: 132786 - DNA, 2349 bp, Homo sapiens
  misc_feature (1)...(2349): n = a,t,c or g
cacctggtcactctgggccccctacaccctggattggctcctcccaaaggaaggcctcttgtttactcctagatgactcagccttagccacatccgcttaaccctccaatagtccccattccgccagagccagtgtctcctcctctttacaggcctttccttacctccctccatgctgtccacttcctctgtaaagctctcaaccctgtccccttccccctctctcctgggaaagagccctcccatgcctagctgctgctcttagggaccctgtggctaggtgcgcggatggaaatccagccctcaggtcctcgatgatcttgaagtaatggctccagtctctgacctggggtcccttcttctccaagtgctcccggattttgctctccagcctccggttctcggtctccaggctcctcactctgtccaggtggaggaggtgctggcgagtttgaaatttgggagtcttgaccgggcgcagtggctcatgcctgtaatcctagcactttgggaggctgaggcgggtggatcacctgaggtccaggagttggagaccagcctggccaacatggcgaaaccccgtctctactaaaaatacaaaaattaggtcatcagcaaagcctgagtcctgtcctcttgctctcctccccggacagcatgnagccttcaccactcgctccaccttctccaccaactaccggtccctggggctctgtccaggcgcccagctacggcgccgggccgggtcgagcagcgcgaccagcgtcgtatgcaggcgctgggggctctggttcccggatctccgtgtcccgctccaccagcttcaggggccggcatggggtccgggggccttgggcaacgggaattagccgggggtcatggcaggaaatgggaggcatccagaaacgagaaggagaccatggcaaagccctgaacgaccgccttggcctctttacctgggacagagtgaggagccttggagaccggagaacccggaagcttggaagagcaaaattccgggaacactttggaagaaagaagggaccccaaggtcagaagactggagccattacttcaagattcatcgaggaccttgagggctcagatctttcgcaaatacttgttggacaatgccccgcatccgtttctgcaagatttgacaattgccccgtctttgctgcttgattgattttaggagttcaagtattgaggacagagcttggccatgcgccagttcttgtggagaaacgacattccattgggctccgcaaaggtcaattgatgacacccaatatcacaccgacttgcaagcttggagacagagattcgaggctcctcaaaggagggagcttgctctttcaatgaagaaggaaccacgaagaaggaagttaaaaggcctatcaagccccagattgcccagttcttggggttgacccgtggaggttagattgcccccaaattttcaggaccttcgccaaagatcattggcagacatcccgggcccaaatatgaacgagctgggctcgaaaaagaacccgagaaggaagcttagacaaagtacttggtctcagcagatttgagggagagcaccacagttggtcaccacaaccagtctgcttgaggttggaagcttgctgaagacgacgcttcacagaagctgagacgtaccagtccaggtccttggaagattcgaccctggacttccatgaagaaatcttgaaaggcccagcttggaagaaacagcccttgaagggaagttggaaggcccccctacggcccttacaagatggaggcaagcttcaaacggggatccctgctgcacccttgaagtcagagctggcaacaagacccggggcagaggggacagcgccccaggcccccaggagttatgagggcccttgctgaaacatcaaaaggtcaaagctggaggcttgagatcgcccaccctacccgcccgccttgttggaagattggcgaggacttttaatctttggtggatcccttggacagcaagcaactccatgcgaaaccgatccaaaagaccaccaccccgcccggataagttggattgggcaaagtggtgtcttgagaccaattgacacccaaagttcttgaaggcatttaagcccagcaagaagcaagggtacccttttggggaagcaaggaaggccaataaaaagtttcagaggtcattgcaaaaaaaaagtattatctcgctaacaaagctaaatataatgaactatacgttaatattttgcctatatttttcatgtgctttataatatttaactttaatattgaaatgcatttcagcagaaatataaagttgggctctaattttgttttcaa

SEQ ID NO: 132787 - DNA, 1961 bp, Homo sapiens
  misc_feature (1)...(1961): n = a,t,c or g
agagatctgaagtgattttacctttatttccttcactttaagccaatcatgaaatttcagagtggaagcaggtgtgagaggtgttcagcagaaggaaacatgtgctttcaaagtgctagagtccattgcgcaagtttgcgcctggccttagctgttgcaggaggcgtggtgaactctgccttatataatgtggatgctggggcacagagctgtcatctttgaccgattccgtggagtgcaaggacattgtggtaagggaaagggactcatttttctcatccccgtgggtacaagaaacccaattatcctttgactggccgttctcgaccacgtaattgtgccaagtcaatcaactgggtaagcaaaagatttacagaatgtccaacatcacactgcggcatccctcttccgggcctgtcgccagcccagctttcctcgcatcttcaccagcatcggagaggactatggatggagcgtgtgcttgccgtcccatcacaactgaggttcctcaaggtcagtgtgggctcgctttggatgctgggagaactaatcaccaaaagagaagctggtctccaggcaggttgagcgacgacctttacagagcgagccgccacctttgggctcatcctggatgacgtgtccttgacacatctgaccttcgggaaggtatttcacataagcggtggaagccaaacaggtggctcagcaggaagcagagaagggccagatttgttggttggaaaaggctgagcaacagaaaaaaggcggccatcatctctgctgagggcgactccaaggcagctgagctgattgccaactcactggccactgcaggggatggcctgatcgagctgcgcaagcttggtaagctgcagaggacatcgcgtaccagctctcacgctctcggaacatcacctacctgcccancggggcagtccgtgctcctccaagctgccccagttgaggggcccacccttgccttgcacctcccgcgggcttgacttggggccacagccccgattgattcttaacaacagcctttcttttctgcttcccaccccagaaatcaattgtgaaattttcatgattggcttaaagtgaaggaaataaaggtaaaatcacttcagatctctaattagtctatcaaatgaaactctttcattcttctcacatccatctacttttttatccacctccctaccaaaaattgccaagtgcctatgcaaaccagctttaggtcccaattcggggcctgctggagttccggcctgggcaccatgcatttggcagcacgcaggcgggtgcagtatgtgatggactggggagcacaggtgtctgcctagatccacgtgtggcctccgtcctgtcactgatggaaggtttgcggatgagggcatgtgcggctggaactgaggaaggcaggcctccgtctttcccagcggttcctgtggcagatgcttgcttgaaggagaggtgccgggggaggggcagagagggaagtggtctgtctgtttaccaataagtcttgattctctttaactgtgtgaaccagcggaaacaaggtgtgtgtgaaactggggcaacaagattgaagaatcctgccccctgttgaaggtgggtgggccctgacttgttgcccccccaggggtccttaaaacttggatggaccttgtatagtgagagaggaggccttggaccgagatgtgagtccctgttgaagacttcctctctaccccccaccttggtccctctcagatacccagtggaattccaacttgaaggattgcatccctggtggggctgaacatgcctgccaaagacgtgtccgacctacgttcctggccccctcgttcagagactgcccttctcacgggctctatgcctgcactgggaaggaaacaaatgtgtataaactgctgtcaataaatgacgaccccagaccttccggctcaaaaaaaaaa

SEQ ID NO: 132788 - DNA, 479 bp, Homo sapiens
taaaatacatatgtatatacttcattatcatgtaattaaatgattatcctctacggcacaaaaaaatagtacatcattagaatagatgtaatttgaaaattagctattatttcttaactagtacaaataatggaatagcaaaaagctatttttggtcttttagaaatcatattttaaaaagaaggctgcattacctcataaatcttgttaaggtgttttgcatgaacatgcatacggccattccatcctctggagttcctagtgatttcacagcattcagatcagatcctgaagagaaagtattttttgccccacggacaatgaggcctttcccctctgtccaattttccaattcaattactttttccagaagttgtagcatcataacacctgaaaaggcattcattctacttggattgttcagagtaagaatgccaatgccattgtcttccttctgaaggtcaatggatccaccagga

SEQ ID NO: 132789 - DNA, 2758 bp, Homo sapiens
  misc_feature (1)...(2758): n = a,t,c or g
tttttttttttttttttagaccacaaaatccacttttatttggtagtttttacatctatggccaaatagtattgggttgacacagtaatctagagtttacctctgaaaaaaagtaatgtgagtctgtctaaccatattttcctaactcaacagtaggatcatgatggtaagggcaaatgcaagttatttttaccatgattctcaaatggtgaattgaatgttacagtagcaaatacttttgacctcttgtgatgagtcagaactagaacttaattctttgactttcacattttttaaaaagtgtattgctgggatcataaacattttatgttgtgcatttttattacatttacttttgaaagatagttgttagaaggttagttgtttttcaggaaaaaaaagaaatctgatgtaaaaatgcaaatttatgttgcaggatgcttcatgagtcccttcaagtggtttaaaactacatcaacagtagttgtttattactagttggaaattccagggcacacaaataaatgtccaattgtagaatcagttgactttccccatgtccagggcctacccactgtttagtagggtaatttacaatagaaaactaattattgaaaagaacaaagttcccaaatttgtagtgggtagtgaggtacatctttttttaaatgaagggccattcccccatgaattttaccccagctggtttggagcagaagaaaatgattgatcataccctttcttgttttcttgttcccctgatacctcnccccacttttgttcctttagcagcaacactcagttattttggtaaattatttccccnggtaaaacagaacaaaaaatggtatggaaaagtaacgcccaggaataggttttggtaatagaagctctccctttttaaacactgcctctttgggttataagcctaagaattattattgggaattgacagcaataatttttaagccaaaagtgtatattttagctaaatgttccagattacgcagtaaagtacccaagtgagtaattggcaagaaatgaggtaaatgagttcagatattcaaatgattaaaagtaagtctgcatattaatagtagccttcaaagtaattctgatgttcatatttaatatcatttaacatttatacatattagtcactgggagctttacttgggagtacatccacacggaaaaacccaattatttattaaatgggtggtttcttaggcaatagcctcttaaatttggcagggcccaccccaaaactggtccctaaaagatctctttcgttctgtaatgcttccccccaaatatagctctctgcctgaacaaacagattttttcaaaagctcttaattacttccggtggcccttggatgaattgctttagccattcttgtgcctcttctagagatttagtttcatctgaagactgcaagaccctcttcaacccattccaatgtttaagagcattttttgaatccagtttaagggccccactcaacactttggagagcttgtctacttccgattatttcaactagccgggtgggtgccaccccagcttggtattatgcccatctctttgtggacgaatctggatcttactctctggagtcattaaccctgaaatcacatgctgtagtaaattctgctccttcacccaatgcccaaccttgaaccagcgcaacacttattaaaggaagtctcataaatcttgttaaggtgttttgccatgaaacatgcaatacggcccattcccatcctctggagttcctcagtgattttcaccagcattccagatcagatccctgaaggagaaaggtatttttttgcccccacgggacaatggaggccttttcccctctgtcccaatttttccaattcaattacttttttccaggaagttgtagcatcataaccacctgaaaagggcatttcattctacttggaatggttccagagtaagaatgccaatgccattgtcttccttctgaaggtcaatggatccacccaggaaactgctgaacgtgtttttttcacttcttcctcataaaatacatgggatgagctataaagtgacaatcctgtttgatgtagcaattttgtccttccagacagaaaggctgtcttcaaaagacttttcgccatttcgtcgcaggccacggtggtgacttccttttccgctcccctacacacgcttttccgttttgcgtgcctttgtttccgctccccccgggaccatagtgcgcccctgtcccccgttctcgtaggtcctctcctcttctccgagaaattctcaaaatactatcccacgctctcctttcctttctccgggaactttatcccgttcccctgccggttcccgtgaccccggaaatcccgctccaggctccaacaccaggttgggccctacagccccagtctccaggttggcaccagtggatataggctttaggtccactgactgctggtccctacagccccaggttccagtgaacccaggttccaggcctgctccaacaaacccaaggtccaggtctaccccagtagacccaggctccaacaccaggttgggccctacagccccagtctccaggttggcaccagtggatataggctttaggtccactgactgctggtccctacagccccaggttccagtgaacccaggttccaggcctgctccaacaaacccaaggtccaggtctaccccagtagaccctggcaccagaactaccccagagggcctagc

SEQ ID NO: 132790 - DNA, 343 bp, Homo sapiens
cgccatgggcttcatcgtggcgcccagcctggggtgcttcgtgggtcccgctttgtccacggcgagggtctccgctggtacgccggcctgcagaagccctcgtggcacccgccccactgggtgctgggccctgtctggggcacgctctactcagccatggggtacggctcctacctggtctggaaagagctgggaggcttcacaggggtcagcagagcttcagaggttgccccacctgagcccccacccgggagcagtgtcctgtgctttctgcatgcttagagcatgttcttggaacatggaattttataagctgaataaagtttttgacttcctttaaaaa

SEQ ID NO: 132791 - DNA, 1156 bp, Homo sapiens
gaagcgcggtcccaggagtggccgacgctccctctcctgcccattccgcggatgggcaatcccaggcggaactcccttgagggtctcagaatatctgggagacctcgggctcttgatctccgagacaccccgtttcgtagtggagaacagtccagatcggggaagtttattttgcccaaagccggttagaggccccctggccctcgattcccagtgcggggctcaggtgcgttgcagcctagacgggtcttactgtgagccgagcagcctctgggacctgtctgcttcccctaccccttgcaaagaagccggagcccagagctcccctgaacagcagctgcagcagccatggccccgccctgggtgcccgccatgggcttcacgctggcgcccagcctggggtgcttcgtgggctcccgctttgtccacggcgagggtctccgctggtacgccggcctgcagaagccctcgtggcacccgccccactgggtgctgggccctgtctggggcacgctctactcagccatggggtaggtgggcgtgcactggcctggggataagcctggccctttgcaaggggaggcctggcccaggacagaggacactgggcagctggccctgaactgggcatggccccccatcttctttggtgcccgacaaatgggcggggccttggtgaatctcctgctggtcagttggggcggccggtcacactacccttggaggacgtggggcatcacatatggctggccgcccgcctgctctaccccttaccttggcctggcttggccttctacgaccacaactcaaactacttgcgtatggcggggacaaaccatggctggcatgggggacggcggcttgccagagtgagtgcccggcccaccatgggactgcagctgcaccaagcaggtgccatcacgcttgtgatgtggtggccgtcacgctttcatgaccactgggcctgctagtctgtcagggccttggcccaaggggtcagcagagcttcacgaggtggccccacctgaagcccccacccgggaagcaagtgtcctgtgctttctgcatgcttaagagcatgtttctttggaacatggaattttataagctgaataaagtttttgacttcctttaaaaaagccaataaaaaaaaaaa

SEQ ID NO: 132792 - DNA, 606 bp, Homo sapiens; identical to SEQ ID NO: 130773

SEQ ID NO: 132793 - DNA, 1785 bp, Homo sapiens
atgaaactcatggaaacacttaaccagtgcataaacgctggtcatgaaatgacgaaggctatcgccattgcacagtttaatgatgacagcccggaagcgaggaaaataacccggcgctggagaataggtgaagcagcggatttagttggggtttcttctcaggctatcagagatgccgagaaagcagggcgactaccgcacccggatatggaaattcgaggacgggttgagcaacgtgttggttatacaattgaacaaattaatcatatgcgtgatgtgtttggtacgcgattgcgacgtgctgaagacgtatttccaccggtgatcggggttgctgcccataaaggtggcgtttacaaaacctcagtttctgttcatcttgctcaggatctggctctgaaggggctacgtgttttgctcgtggaaggtaacgacccccagggaacagcctcaatgtatcacggatgggtaccagatcttcatattcatgcagaagacactctcctgcctttctatcttggggaaaaggacgatgtcacttatgcaataaagcccacttgctggccggggcttgacattattccttcctgtctggctctgcaccgtattgaaactgagttaatgggcaaatttgatgaaggtaaactgcccaccgatccacacctgatgctccgactggccattgaaactgttgctcatgactatgatgtcatagttattgacagcgcgcctaacctgggtatcggcacgattaatgtcgtatgtgctgctgatgtgctgattgttcccacgcctgctgagttgtttgactacacctccgcactgcagtttttcgatatgcttcgtgatctgctcaagaacgttgatcttaaagggttcgagcctgatgtacgtattttgcttaccaaatacagcaatagtaatggctctcagtccccgtggatggaggagcaaattcgggatgcctggggaagcatggttctaaaaaatgttgtacgtgaaacggatgaagttggtaaaggtcagatccggatgagaactgtttttgaacaggccattgatcaacgctcttcaactgctgccccgatggtggattcgttaattgcgcgcgtaggagtaatggctcgcggtaatgccattactttgcctgtatgtggtcgggatgtgaagtttactcttgaagtgctccggggtgatagtgttgagaagacctctcgggtatggtcaggtaatgaacgtgaccaggagctgcttactgaggacgcactggatgatctcatcccttcttttctactgactggtcaacagacaccggcgttcggtcgaagagtatctggtgtcatagaaattgccgatgggagtcgccgtcgtaaagctgctgcacttaccgaaagtgattatcgtgttctggttggcgagctggatgatgagcagatggctgcattatccagattgggtaacgattatcgcccaacaagtgcttatgaacgtggtcagcgttatgcaagccgattgcagaatgaatttgctggaaatatttctgcgctggctgatgcggaaaatatttcacgtaagattattacccgctgtatcaacaccgccaaattgcctaaatcagttgttgctcttttttctcaccccggtgaactatctgcccggtcaggacttgcatgggtattaggagatgctgaagaactgccctttgatgatgacaagtttgatatttacaccattgcctttgggatccggaatgtcacacacattgatcaggcaacaatcacatag

SEQ ID NO: 132794 - DNA, 879 bp, Homo sapiens
gtattacgcctagcgtggcacgagcggcggcccccgggagctgtgctctatggagctattgcggccttgggtggtcgcgggcgatgcggggctgccagggcctcgggcttcgtagctcttggcccggcgacctactaagtgctcggctcttgtcccaagagaagcgggcagcggaaacgcactttgggtttgagactgtgtcggaagaggagaaggggggcaaagaactcctttaatgtgaaagtttttgctggcatcacttcttctgggacatcttcaacctttttgtcacagctccatttcttgttcatgttgactatcaggggtttgaaagtgtggctaaaaagtatgatgtgatgaatgatatgatgagtcttggtatccatcgtgtttgggaaggattttcctgctctgggaagatgcacccacttcctggggacccagctgcttgatgttgctggaggcacaggtgacattgcattccggttccttaattatgttcagtcccagcatcagagaaaacagaagaggcagttaagggcccaacaaaatttatcctgggaagaaattgccaaagagtaccagaatgaagaagattccttgggcgggtctcgtgtcgtggtgtgtgacatcaacaaggagatgctaaaggttggaaagcagaaagccttggctcaaggatacagagctgctcacaagtctggagtcatccttgactgcctctggttccctcctattctgcatccaattgctcagcaaatctgtcagctctaccttcagaatacatctggaatctggccatctctgccctatctctgctaccacctccttgtccaagccaccattccttcttacctggactgctgcaatagcctctaa

SEQ ID NO: 132795 - DNA, 1545 bp, Homo sapiens
cggcccccgggagctgtgccctatggagctattgcggccgtgggtggtcgcgggcgatgcgggactgccagctcctcgggcttcgtagctcttggcccggggacctactaagtgctcggctctttgtcccaagagaagcgggcagcggaaacgcactttgggtttgagactgtgtcggaagaggagaaggggggcaaagtctatcaggtgtttgaaagtgtggctaaaaagtatgatgtgatgaatgatatgatgagtcttggtatccatcgtgtttggaaggatttgctgctctggaagatgcacccgcttcctgggacccagctgcttgatgttgctggaggcacaggtgacattgcattccggttccttaattatgtttcagtcccagcatcagagaaaacagaagaggcagttaagggcccaacaaaatttatcctggggaagaatttgccaaagagtaccagaatgaagaagattccttgggcgggtctcgtgtcgtggtgtgtgacatcaacaaggagatgctaaaggttggaaagcagaaagccttggctcaaggatactagagctggacttgcttggttattatgagatgctgaagaactgccctttgatgatgacaagtttgatatttacaccattgcctttgggatccggaatgtcacacacattgatcaggcactccagggaagctcattcgggtgcttgaaaccagggaggacggtttctctgtctgggatttagccaagttgaacaatcccctcatatccaggctttatgatctatatagcttccagggtcatccctgtcctgggagaggtcatcgctggagactggaagtcctatcagtaccttgtagagaagtatccgaaggtttccgtctcaggaaagagttcaaggaccatgatagaagatgcaggctttccacaaggtgacttacgaaagtctaacatcagggcattgtggccattcattctggcttcaaactttaattcctttcctatcatggagcatgaaccagtcatatcctgtttgaaagcctggaactggaaggataatctggcaaatgggacagcagcagagcatcctccctcttaaagggataccgtgcccttgggactccatgtttgaatcggaaccagtctccaaagtggaagaaccaaattcttgtcacttttttacaagctttctttgggagctgcttcagtccatctcccagagggcatttgggtctgtatctttgcttcaactgcgtaatttctcttgggctgtaggggtgtgtgggttaagggtacaaccacccctaaagctcaagtttttgaagtgaagtgtatttataagccttctcctgcttggtgctgccttctaagaggggatgatagatcattttgaaccccagtgacaattttttaaaccagaaaatttaattgtacctggaatcaacctttccagcctaggaccgaatctaaggcccaagtccagagtattatatgtatcatgagaattgtgtgctgaatccagtaaacgatgttatccttttga

SEQ ID NO: 132796 - DNA, 422 bp, Homo sapiens
  misc_feature (1)...(422): n = a,t,c or g
gcagaagaggaagccatcgcctggccccggctctctggaccttgtctcgctcgggagcggaaacagcggcagccagagaactgttttaatcatggacaaacaaaactcacagatgaatgcttctcacccggaaacaaacttgccagttgggtatcctcctcagtatccaccgacagcattccaagattaaatctcttgatgaacagtgtgtggttggcaaaatttccaagcactggactggaattttgagagaggcatttacagacgctgataactttggaatccagttccctttagaccttgatgttaaaatgaaagctgtaatgattggtgcctgtttcctcattgacttcatgttttttgaaagcactggcagccaggaacaaaaatcaggagtgtggtagtggattagtgaaagtctn

SEQ ID NO: 132797 - DNA, 500 bp, Homo sapiens
  misc_feature (1)...(500): n = a,t,c or g
ntcactaatccactaccacactcntgatttttgttcctggctgccagtgctttcaaaaaacatgaagtcaatgaggaaacaggcaccaatcattacagctttcattttaacatcaaggtctaaagggaactggattccaaagttatcagcgtctgtaaatgcctctctcaaaattccagtccagtgcttggaaattttgccaaccacacactgttcatcaagagatttaatcttccagaagttcaatttgctgatgaatcagtatctgatctatcttggaatgctgtcggtggatactgaggaggatacccaactggcaagtttgtttccgggtgagaagcattcatctgtgagttttgtttgtccatgattaaaacagttctctggctgccgctgtttccgctcccgagcgagacaaggtccagagagccggggccaggcgatctcgtgccgaattcntacaggcggtcgagggggnntcaaggncnnnnnctcgtccn

SEQ ID NO: 132798 - DNA, 722 bp, Homo sapiens
caaagaaacatttcatatttatatccttttttgcttaaattttcttttgggtcaattcaaataatttattaatgtctatattaatataaaatagaaattgttaaatatttcaggaaaactttctgaaatataatttctccgtacaatgaaacagtttttttcatatatctataaatagatacaggagcctccagttatctaatgagggttacatatggtgcataattttaataccatatttgtttcatcttacttcaaatttgaaagtacttttgctataagtttcctaaaagtatttaatacttttttttttcaatttagattaaatctcttgatgaacagtgtgtggttggcaaaatttccaagcactggactggaattttgagagaggcatttacagacgctgataactttggaatccaattccctttagaccttgatgttaaaatgaaagctgtaatgaaagtaggcatatgtggaaaaaatttagtgaaacaaggaaactttaccatgactcatagtaattaaattaaaccatctaatataggagtatgaagtacaataagagtgtacattcactcaagtgtgtagacctaactaccaaattacaggaaataattggatataccagtgattctgaaattgccttcacattagaaccacctagggactttaaaaaccccaaggactagtccatacctcagttcactaaatcagaaact

SEQ ID NO: 132799 - DNA, 1245 bp, Homo sapiens
atgctgctccacaagctggcctctctcctgttgctattgctgctgccattcaacttcaccttcatagtactcagtgctcttctcctaacacctgctgccttcctagaagaaccagggcaaccatttattactcaagatggtcataccatcctcttggctctgtgccatgaagcccttgaccttttcaagaagcatcagtttgactttgccaccagcctgcagtttttatggcccactcacttgattccaacccaagccctaaggcagttttcccctatctcagtagatggaatatacaattgggctttacacctagacgttccattgcccagggacgagcaggagacagataccttcctcttatctcaactgcaaagacgcgttccttcctcttttactaatccccctcagtgcagaccctttacgggtgtcggactggtggacgttttaacaggttttgaaactaataacaaatatgaaattaagaacagctttggacagagggtttactttgcagcggaagatactgattgctgtacccgaaattgctgtgggccatctagaccttttaccttgaggattattgataatatgggtcaagaagtcataactctggagagaccactaagatgtagcagctgttgttgtccctgctgccttcaggagattaaatctcttgatgaacagtgtgtggttggcaaaatttccaagtactggactggaattttgagagaggcatttacagacgctgataactttggaatccagttccctttagaccttgatgttaaaatgaaagctgtaatgattggtgcctgtttcctcattgatcgcaactgctcaccagcaatggaacaaagctggatggagaattactttgacgagatgacagaaataggcttcagaaggtcagtaataacaaacttctctgagctaaaggagcatgttctaacccattgcaaggaagctaataaaaaccttgataaaatgttagatgaatggctaactagaaaaaacagtgtagagaaaaccctaaatgaactgatggaggtgaaaaccattaatgaaaagcttacaattgggaagatttcaaagtactggtcaggatttgtaaatgatgtcttcacaaatgctgacaatttcggaattcatgttcctgcagatctagatgtaacagtcaaagcagcaatgatcggtgcctgttttctctttgccttcaggcttggatcggaactacacaactag

SEQ ID NO: 132800 - DNA, 2443 bp, Homo sapiens
tcaagatccagagtctctgtaaattccatactttgctccatcttgcactatagttatgcttaactgcttgtattcttcaaatacaccatggccttcctttgcttgtgttgctgtcttttgcttttgaatatcttctactcttctttcaaaacttagttgagaaggcttgtcttgtgtgatgtattcaactcgatctatgaactcaacttgtcgcttcaggagagaaggacaacagggggtgggcgcagtccctcctccagctccttcaccctccagtagtctcgtgggtccccgagcgccagcgcggggaaccgggaaaaggaaaccgtgttgtgtacgtaagattcaggaaacgaaaccaggagccgcgggtgttggcgcaaaggttactcccagacccttttccggctgacttctgagaaggttgcgcagcagctgtgcccgacagtctagaggcgcagaagaggaagccatcgcctggccccggctctctggaccttgtctcgctcgggagcggaaacagcggcagccagagaactgttttaatcatggacaaacaaaactcacagatgaatgcttctcacccggaaacaaacttgccagttgggtatcctcctcagtatccaccgacagcattccaaggacctccaggatatagtggctaccctgggccccaggtcagcttacccacccccaccagccggccattccaggtcctggcccagctggctttcctgtcccaaatcaggcagtgtagtaatcagccagtatataatcagccagttggagctgcaggggtaccatggatgccagcgccacagcctccattaaactgtccacctgggattaggaatatttaagtcagataggttcagatactgatttcatcaggcaaatttgaacttctgggaagttttaacaggttttgaaactaataacaaatatgaaattaagaacagctttggacagagggtttactttgcagcggaagatactggattgctgtacccgaaattgctgtgggccatctagaccttttaccttgaggattattgataatatgggtcaagaagtcataactctggagagaccactaagatgtagcagctgttgttggtccctgctggcttcaggagatagaaatccaagcttcttcctgtggtaccaataggttatgttattcagacttggcacccatgtctaccaaagtttacaattcaaaatgagaaaagagaggatgtactaaaaataagtggtccatgtgttgtgtgcagctgttgtggagatgttgatttttgagattaaatctcttgatgaccagtgtgtgggttggcaaaatttcccaagcactggactggaattttgagagaggcatttacagatgctgataactttggaaatcaagttccctttagacccttgatgttaaaatgaaagctgtaatgattgggtgcctgtttcctcattggacttcatgttttttggaaagcactgggcagccagggaacaaaaattcaggagtgtgggtagtgggatttagttgaaagtctccttcagggaaatctggaagtctgtaatattgattgagactatctaaaacctcatacctggtatggaattaaagctgttaaggccctgtagctcctgggtttgtatactttttgctttttccaaatttatagtttatcttctgtataactgatttataaaggtttttgtacatttttttaatactcattgtcgaatttgagaaaaaggacgatatgagtttttgcatttattaatgaaacttcctttgaaaaactgctttgaattatgatctctgattcattgtccattttactaccaaatattaactaaggccttattaatttttatataaattatatcttgtcctattaaatctagttacaatttatttcatgcataagagctaatgttattttgcaaatgccatatattcaaaaaagctcaaagataattttctttactattatgttcaaataatattcaatatgcatattatctttaaaaagttaaatgtttttttaatcttcaagaaatcatgctacacttaacttctcctagaagctaatctataccgataatattttcatattcacaaggatattaaaattaccaattttccaaattattgttaggtaaaggaacaaaatggattgctctccccaaaggaaaggacacatttttaaatactccttcactctaaaactgtggtattataacttttgaaagttaatatttctacatgaaatgtttagctcttacactctatccttcttagaaaatggtaattgagattactcagatattaattaaatacaatatcatatatatattcacagagtataggcctaaataatgatctattagattcaaagtatttgaaataaaaacttgatttttttgtaaaaaaaaaaaa

SEQ ID NO: 132801 - DNA, 230 bp, Homo sapiens
catgctgtctgcctggcagctgtgcatttctctagctgggctctgaacaactcagaaacattcaactcgatctggagctgtgcctcagcaattctcggtaacctgggcattctcacgggttccccacctcttgctctatgcaggacactttgtctaacatatcccatctgatgccccagggatgccaaggcacttaggagacccagagagtgtgtaatccgacatgacag

SEQ ID NO: 132802 - DNA, 1659 bp, Homo sapiens
atgaccattcccatcgcacccgcgaggatctcatccttactgaagaagcccgcagtgacagcggtagtgccgacagtgctgcgccgcccaccaggaagcagagataaacagcggaatagatttacgcagaccgcccatcttgaagatgttctgttcggatggcaggccagaatgacggaaccggatgccaggaacagcagcgctttaagaacgcgtgggtcatcaagtggaaaatcgccgcatcccatgcctgcagccaagcgcgaggaacatgtagccaatctggctcatgcgcggaaaaaccggccagcagagcgtaaccgccccgacaatacccaccagatgcagaacttccggcgtcatcaggaacaggccgttggtacgggcgatcaggtagacacccgcggttacatgcgttgcggctttgatcagcgcggagacaggcgttggggcccgccatgccgtcgtcaagccatgtctgcaagtgcaactgcgcagatttaccgacggaccgcccagcagcatcagcgtcgcccacatcagcatgttattgccgtcgcaaatgcgctggtgccagttccaccatttcgcggaagttcagggtgccagttcgttgtaaagaatgaacagtgcgaaagcgaggaacacgtcaccccacgggtcacgacgaacgctttcattgccgtgcgccattcttcggatcgtgtaatagaacccgatcagcagataggagcacaggcccacgccttcccaccgagtggagatgttgacgctggtgtttctggtgctctggatgtgtgtgttcaccaggacccgggctccaaggccgtcgccgaccgctacgctgtctactggacagcagcaaccccagtgggttcaaggtgccagaaatttgatctaatgccgggttacgtcatgtgtgcagaacaagctgccagagtggccgagccaggagctgtcatgtcggattacacactccttgggtctcctaagtgccttggcatccctggggcatcagatggcggggcgacccccagaaatctcagaggagtcgtaagtgctgcgtaccgggcggtgcgccgagaagggtggggatccggagccgcaacccagcttgtcggtgtcctggaactggttaagcggcagctgcgccggctttcgagcggtcttgcctcgaaaacctcaaagaaaagtttggctcttcgcgtcttcggcaggcacagcagcaacagagccccctcgttaatgacttgcgtggaaagccgacagcggcggcgacccatggcagcagcctcagcagagcgcgaggccgcacgcgtgaacgtggacgtggcggggggatggggctccgcccgggcgtgttgcgcgggacgcgggacggcgggcggcgcgagcgcgggtgtgagctccggacgaagcagggggagtcctcagacgggattccaggcgcttcagagctgtttagaagcgtccagacgccctccagtggtggcctgcaatccgcacccagcaggggcattgcctgccgctcaggccggaaacagggctaccttgatgactggcagctgcctgcagatgcctataatgtatgaagaagcccagttgagactagaagaactgtgcaccaaagcccgcctaaactgccaatggttcttgtaa

SEQ ID NO: 132803 - DNA, 1656 bp, Homo sapiens
atgtgtgtgaaagccacatctttcacaaacattacctgcctgtcacggtatcagggcttggccgaaggccttagtgttggttcagtaatatcggctttctctagaagcaggccttctgggggtccagagtttacaataagacccttttatacttcaaatgtcagcaaaacattcagactagctcttcccaaaacacgaaggggctacgttcccaagcaagatttgagttttatgttcacaattgacttgtttcagagtgaccaggtggccaaagtgcctctgaaaaccccctcagggcctgaggaaatttgtgttggcaattatgttagtcattttgcaggtgaaagtatatcagtgggggttcgttgtaccgtggcgtttgcccaggccgtgttcgatggcgaaatgacggtcgaaggcgtcactgctcgcctggcaaccagctctgcggaagcgatgaaacttaccgaacgcggattctctgaacagcgccagtgggcaagtggtgagcaggcacttggcaaagggcgaatctctaccgccacaggagaacgcgttaacgccgcgcagcgccgacgcctggcgattgcgcacaaatcccagctctgcaattttctgagactctggtttgtaaacggcacgtttgagtttctcaataaacggtcgaccgctgttgatacagaacatcccctgctcgcccagcggcggattaccttttactgcgaggatatatttgccattgtattgcgtgatgatgtcttcaaagacttcttccgcctgggttccggcggcagccatcaaagtatcgtcgtaatcgagggaaatcagggaaaggatgacgtccttcgccagtggcgacgtggcagccagactacaatatttgagaaagctgcgccgggtaacgccctgacgccgcatggcctggtaaaatgtttcctcgttattcatatcgcacgtctctcctccttgcgacaccggcaggacaccgggcgcttatggtcggcaagcgacgtccctgtagcaaggcaaaccatcgcttcacgtgagatgctgaaaacgaaagctcatccttctgcactggcgcacgtcgccagaaaggtgggcaacctgctgtggcccgatgaaggtttcggcgtgcgggtgggggaccggctgtatgcccattaccactggcccgagtatgtggagattgtcgatggcggtactcagggactgaacttgctggggtatgtcgaaagcgccagccatctgttgattctcgatgccattgactacgggctggaacctggaacgctgcgaacctatgccggagaacgcattccggcttatctcagcgcgaagaaaatgagcctgcatcagaacagtttctccgaagtgttggcgctggcggatatccgcggacatctgccagcacatattgccctcgtcggtctgcaacccgcaatgctcgacgactacggcggtagcctgagcgaactggcacgggagcaactgcccgctgcggaacaggcggcgctggcgcagcttgctgcgtggggaattgtgccgcaaccggctaatgaatcgcgctgtctcaattatgactgtctgtcgatggaaaattacgaaggcgttcgcttgcgccagtaccggatgacacaggaggagcagggatga

SEQ ID NO: 132804 - DNA, 2772 bp, Homo sapiens
atggctagtatggtgcaggtaaatttaggaagaaacaattttagcagagatccgttttccctgcataacactgtggatggagtggtggacgcaggctccactgcacgcactgctcacagatgccgattcgctcacattgaaaaggtcctattccagctccaggatcctccttttctgaagagcctgtccctgcatctctttggcagtcatgttctgactgcggcctggtgctcccctaacctgcatggaataaatttaaagctaagagataacatattgttgttctctagaagcaggccttctgggggtccagagtttacaataagacccttttatacttcaaatgtcagcaaaacattcagactagctcttcccaaaacacgaaggggtcaagttgaagggtacggtcacctgcagggaacaggaccaagtgtgttcattgagcattttgctgttttacatgacctcgccataaaggagtgtctctacgagaaaggaaaaacctgtttcataacgcagtgcagagctttgttttctctcgtcagggtgacagccctttggttcctgccagtgggtatgcgacaggaagttcccaacccttgccgccctgggccccattcttggattagttctcaggcagctgaaaatactgatgtgctacttcctgttgagagagagagagaagagagagtgcacccgtgcaactgcaacagacagatatatatgaaagagtcaaatgatggtttaagaagaagagtcacaacgaatgatcagaaaataaagccccagacagcagaagttaccatgaagaagggttttggaggcaatgggacccagcagggctgcaaaggatatgttagacaaagtgtcctgcatagagcaagaggtggggaacccgtgagaatgcccaggttaccgagaattgctgaggcacagctccagatcgagttgaatgtttctgagttgttcagagcccagctagagaaatgcacagctgccaggcagacagcatgtgtcctgtttggtagggaagaatatggagatcggcagggagttgctaaagtagatcagaaaaaattcttgtatggatccctcaatctggactccaggcacagagccataggtactaaccaatccctttttacatttgagaggtgctatttctgcatgggtcaggcaaccccatgggtgctgaaggatctggacagcataggaggcctgggaaggtggctgctcattcctcatggccagagccagaactcagggcagcaatgcctgatcccaggacaaggcccaggccactgccaggactctcacagggacatccctacgcagaggcatcctacatcagaggactggcccttctcccttccctcttaccactgtggaagcctgggacccaacaggcttgaaatgagagctgaagagattgaatttgatgactgtgagatagagaaagatgtgggtgctcgctgtcatgtcggattacacactctcttgggtctcctaagtgccttggcatccctggggcatcagatggcctggcagcaccaggaacctgtgttcccaagaaatggaagaggccagcagggaagcacccatgggtctgctccaagcccttcctgggcagggcttcccggcagagttacacaacagctgatacatctgtgcacactcccggagcctccactccgacaggagctaaattcatccatcagtgagaaaacaaaacagatatatatgaaagagtcaaatgatggtttaagaagaagagtcacaacgaatgatcagaaaataaagccccagacagcagaagttaccatgaagaagggttttggaggcaatgggacccagcagggctgcaaaggtgctgagtgtctgtgtaagaagccggattggcccattaatttgttctcaacgccatccagcaacgagcaagacaaaaccacagggacgcccccccggcgaacaggggacgcccagggacaacccaaggagaaacaaccggccggccagaagcgcaacaccgcgaggggcacgcaaggagcacccccacgacccggggaggagccaaacgccccacagaccatcgacaagggcccccccagccccccgagccgcgggcacacgagacggctagcgagaagcgggaaccaaccgccagaaagacacacaccagccgcaggcggaaagacacgatatgttagacaaagtgtcctgcatagagcaagaggtggggaacccgtgagaatgcccaggttaccgagaattgctgaggcacagctccagatcgagttgaatgtttctgagttgttcagagcccagctagagaaatgcacagctgccaggcagacagcatgtgtcctgtttggtagggaagaatatggagatcggcagggagttgctaaagtagatcagaaaaaattcttgtatggatccctcaatctggactccaggcacatgcgtgcccctctgaagcgcataaaatgccggggaatcccagagatgggggggcggggatttgcaaatcttcgccgggcggaaagggtgagcggcgaaaagtggagggggggtccaccacccgcgcggggaccagcagagacagcgtgtcaaagaggcacgcaaacacgatgggagaacaggcacaaggtgagaaacacccgagagggacggtgtagaaaacaaaacgacggggaccaaagggccaaacccgaggcacaaaagcgccggaagaagaaacgagccgagaaccaccatgcacgggacccataa

SEQ ID NO: 132805 - DNA, 532 bp, Homo sapiens
acaccaaggacagagacgctggctaggtaagataaggaggcaagatgtgtgagcagcatccaaagaggcctgggcttcagttgtggagagggagagagccaggttggaatgggcagcaggtagggagatccctggggaggagctgaagcccatttggcttcagtgtcccccaaacccccaccacccttttcctaggccgccctccccactgttaccaacatgaagctgctcgcagcaactgtgctactcctcaccatctgcagccttgaaggtgggtgtgatatggagagggggccaaaagggagaatgtgctggtggttatagctacctatctgcctgtgctcttatatccagggctggcaaccaaagggctcaaaaggaagatcattccctctctaaagcccagaaagcccatccaaagatctggctggatacctttttggggagggggcagagagctggggtgggtactggcacaggtttggcgggaggccgggatccattggtggggccccctctaaaaaagtggtgg

SEQ ID NO: 132806 - DNA, 719 bp, Homo sapiens
ggaggcaagatgtgtgagcagcatccaaagaggcctgggcttcagttgtggagagggagagagccaggttggaatgggcagcaggtacggagatccctggggaggagctgaagcccatttggcttcagtgtcccccaaacccacaccaccctcttcctaggccgcccttccccacttgttacccaaccatgaagctgctcgccagccaactgtgcctactccctcaccccatcctgcagcccttgaaaggagcctttggttcgggagacagggcaaagggagcccatgtgtggagagccctggtttcctcagtacttcccagacccgtgactgacttatgggcaaggaccctgatggagaaggtccaagaaccccagagcttaacttcaggcccgaggcacagttcttactttgaaaagtcaaaggagcagcttgacacccctggattcaagaaaggctgggaacgggaactggttaaactttctttgagcttattttcgtgggaacttgggaacacaagcctgcccacccagttgaaagtgttccaagaccatttggtctttccaaaccccaggctgggcctcttaggaacaccccactgggcccagttccttaggaggttcttgttccctaacccatttttttgttaacaataaatagcagcatgaaacatcatgttggttcagtcagtcgacatctatgctacaagcactagtgcg

SEQ ID NO: 132807 - DNA, 317 bp, Homo sapiens; identical to SEQ ID NO: 130995

SEQ ID NO: 132808 - DNA, 449 bp, Homo sapiens; identical to SEQ ID NO: 130994
  misc_feature (1)...(449): n = a,t,c or g

SEQ ID NO: 132809 - DNA, 560 bp, Homo sapiens; identical to SEQ ID NO: 130996

SEQ ID NO: 132810 - DNA, 1044 bp, Homo sapiens
atgctcccagcagagatgattgaactgttgctcggggtagggcccccagaagtgtggttcatcaaccctgactggtgggtgtcagtaattaacactgtggatacctcccatgaggacatgattcacgacgcccagatggactactatggcacccgcctggcaacctgctcatcagacaggtccgtcaaaatctttgatgtgcgcaatggagggcagatccttatcgccgacctcaggggtcatgagggtcctgtgtggcaagtggcctgggctcaccccatgtacggcaacatcctggcatcgtgctcctatgaccggaaagtcattatctggagagaggaaaacggcacctgggagaagagccacgagcatgcgggacacgactcctcagtgaactcggtgtgctgggccccccatgactacggcctgatcctggcctgtgggagctcggatggggccatctccctgctgacttacaccggggaaggccaatgggaagtaaagaagatcaacaacgctcacaccattggctgcaatgccgtcagctgggcccctgctgttgtacctggaagcctcatagaccacccatcggggcagaaacccaattacatcaagaggtttgcatcaggtggctgtgacaacctcatcaagctgtggaaggaggaggaggacggccagtggaaggaggagcagaagctagaagcgcacagtgactgggttcgagatgtggcctgggccccctccatcggcctgcccaccagcaccatcgccagctgctcccaggatggtcgtgtgttcatttggacctgtgatgatgcctcaagcaatacgtggtcccctaaattgttgcacaagttcaacgatgtggtgtggcatgtgagctggtccatcacagccaacatcctggctgtctctggtggagacaataaggtgaccctgtggaaggagtcagttgatgggcagtgggtgtgcatcagtgatgtcaacaagggccagggctccgtatcagcatcagtgacagagggccagcagaacgagcagtga

SEQ ID NO: 132811 - DNA, 941 bp, Homo sapiens
cgtatatttgtaccatgacgaccgcccgaattcccggtcgacgatttcgtgccgccgggagctgccacgtccgagacctgttcagctaccgccgcaatcatggtgagtgttggtactgaggaggcctagcagggtgaaggccacggtcgcggccttcacgggttcctcggccgtcctgagtcccaaatcccaagctggagccgttcagctcccctccaccgcttaaagatttggggggctctggccccgtccttgcggaccattccgaggggagtccagaggtgaggccgaggaacctccctgactttgcggggcgcgccgctcctgcgtctcctgccagtctcccttccttcttttcgggcaacaattgaaaacaaaacgaggaacagcagaggagctactgtataccgagccctcagcattgttcgtaatctccgcctgctaacagccttgtgaagaaggtgtcagtaattaacactgtggatacctcccatgaggacatgattcacgacgcccagatggactactatggcacccgcctggcaacctgctcatcagacaggtccgtcaaaatctttgatgtgcgcaatggagggcagatccttatcgccgacctcaggggtcatgagggtcctgtgtggcaagtggcctgggctcaccccatgtacggcaacatcctggcatcgtgctcctatgaccggaaagtcattatctggagagaggaaaacggcacctgggagaagagccacgagcatgcgggacacgactcctcagtgaactcggtgtgctgggctccccacccgccagctccaggactgccccttcctgggccaactaaccagacaactgggaagagcccccaactccaacaggattattttcccaggaggagttacagatgcagccacagattgatcatctgccttaacgtgatcggagat

SEQ ID NO: 132812 - DNA, 1428 bp, Homo sapiens
gaagtaaagaagatcaacaacgctcacaccattggctgcaatgccgtcagctgggcccctgctgttgtacctggaagcctcatagaccacccatcggggcagaaacccaattacatcaagaggtttgcatcaggtggctgtgacaacctcatcaagctgtggaaggaggaggaggacggccagtggaaggaggagcagaagctagaagcgcacagtgactgggttcgagatgtggcctgggccccctccatcggccctggccaccaagcaccatcgccagctgctcccaggatggtcgtgtgttccatttggaccctgtgatgatgccctcaagcaattaccgtggtccccctaaattgtttgcacaagttcaacgatgtggtgttgggcatgttgaactggggtccatcacagccaacatccctggctgtctctggtggagacaataagaatgggactaatacagtctgccctacaggatggctgcaagattcaaacacgctagtgcatctggtgacctacaaaatgccacgcagcctgggcctgggcttcctatggtgccagctgctgtcgccaagaaaataccgagaaggaactagtcccgtgtcactctgggttggtgaagtgtggttcatcaaccctgactggtggggctcaattcgtgtctaccaccccagcccctcaggctcctacaggacacacaaaccaccattaaataatttatcttgcgacactagcattattcgcgagcttctcaagggcaaaaagttcctcttatttgtgtctgtatatccagttcctagcacagtgcttggcagaaagaaggtgtcagtaattaacactgtggatacctcccatgaggacatgattcacgacgcccagatggactactatggcacccgcctggcaacctgctcatcagacaggtccgtcaaaatctttgatgtgcgcaatggagggcagatccttatcgccgacctcaggggttggcccagggcttcccggtatcaacagggacaccaggatttatttattctgcgaagtgatcttccgtcacaggtatttattcgcgataagctcatggagcggcgtaaccgtcgcacaggaaggacagagaaagcgcggatctgggaagtgacggacagaacggtcaggacctggattggggaggcggttgccgccgctgctgctgacggtgtgacgttctctgttccggtcacaccacatacgttccgccattcctatgcgatgcacatgctgtatgccggtataccgctgaaagttctgcaaagcctgatgggacataagtccatcagttcaacggaagtctacacgaaggtttttgcgctggatgtggctgcccggcaccgggtgcagtttgcgatgccggagtctgatgcggttgcgatgctgaaacaattatcctga

SEQ ID NO: 132813 - DNA, 1617 bp, Homo sapiens
cgtcccatggtgaaggttggtactgaggatgcctagcagggtgaaggccacggtcgcggccttcacgggttcctcggccgtcctgagtcccaaatcccaagctggagccgttcagctcccctccaccgcttacagatttggggggctctggccccgtcccttgcggaccattccgaggggagcccagaggtgtcagtaattaacactgtggatgcgctcccatgaggacatgatttattgacgcccagatggactactatgggcacccgcctgggcaacctgcttcatcagacaggtccgtcaaaatcttttgatgtgcgcaatgggagggcagatccttattcgccgaccttcaggggtcatggaggggtcctgtgtggcaagttggctgggggttcaccccattgttacgggcaacatcctgggcattcgttgcttccttattgaccggaaagttcatttattcttgggagagagggaaaacgggcaccctggggagaagagccacgagcaatgcggggacacgactcctcaagttgaacttcgggtgttgctgggccccccatggacttacggtcctgattcctgggcctgttgggtagtctcggatgggggccatcttccctggctggactttacaccgggggaaggccaatggggaagtaaagaagatcaacaacggtcacaccattggcttgcaaatgccgtcagctgggcccctgctgtttgtacctggaagcctcatagaccaccccatcggggtcagaaacccaattacatcaagaggtttgcatcaggtggctgtggacaacctcattcaagctgtggaaggaggaggaggacggccagtggaaggaggagcagaagctagaagcgccacagtgactgggtttcgagatgtggcctgggccccctccatcgggcctgcccaccagcaccatcgcccagctgctcccaggatgggtcgtgtgttcatttgggacctgtgatgatgcctcaagcaatacgtggtccccttaaattgttgcacaagttcaacgatgtggtgtggcatgtgagcttggtccatcacagccaacatcctggctgttctctggtggagacaataaggtgacccctgtggaaggagtcaagttgatgggccaagtgggttgtgccatccagtgatgtcaaacaaaggggcccagggctcccgtatcagcaatccagtgacatgagggcccagcaagaaacgagcaagtgaacaaagaccagggtggggccctggctcccccacccgcccagctcccaggacctgccccttccccgggcccaactaacccagacaacttgggaagagccccccaactcccaacagggattattttccccaggagggagttacagatgcagcccacagattgatccatctgcccttaactgtgatctgagatgctttgtaatctactgtccgagctggaaacagctcatgttacgcggaaaaaactacaagtaatgttcaaatctattttgggtcatttttatgtacctttgggttcaggcatttatttgggggggttttgtttccaaaggaactaaataaagtcgatattgcttataaaaaaaaaaaaaaaaaaa

SEQ ID NO: 132814 - DNA, 926 bp, Homo sapiens
ctccatcagcatcgtcatccccggctcggatcccggccgcgacccgccagggccgccggagtccgcgaataccgcccgctcccagcaacgaagctccccggctcccggccgaccgcgagttcctggagcagcagcctccaaggttcccaaagcccacgattcaggcgagcggtgccgaccgggccgtggactgtggcattttaaaactacagaagtctcactgcacgactggcgcggccgaggtggcccaggagaccctccaagagattctggtcagctgccgggagcgtggaagagcaaccaaagccaccaaggcgccgcgccaagtccccggagcagtcacctcagctttccgttctccctctagttacaattactccacaggcttctggcgcttccttcgagaaaatgaaaaactaaaaacgcgtagaggtggtagaagtcgttggcattttccgtttaatgtgatcccccaggctccatcccttaagtggggtttccaaactcggatgcatcctcagcagaggttttccatgttgacagatctctcgcctcccacaaaatggggccggggaggcggccgcggtctcctctatgggcgccgccattttggaatccccggcactgacggttacgtaaggggctgtgcgcaagtgcggcgtttagggaatccgcacagcccgggccacgcagctccgaggcccacatctccacttcccctaagaggaccgatgggggaagggacagctgaccgggtcttcctcgcagcagcctcacccctagtcttccgcggccggcgagcttctccacctccccgggccgggtctccgcccctcacaggcttccgagacactcactggccctgggttgtcaggatcttcctagccacaaccttattccgaccccacttaagagacaaactttag

SEQ ID NO: 132815 - DNA, 399 bp, Homo sapiens
atggggccggggaggcggccgcggtctcctctatgggcgccgccattttgtgaggcggcggcggcgcggcggcaggagcccgggggaatccccggcactgacggttacgtaaggggctgtgcgcaagtgcggcgtttagggaatccgcacagcccgggccacgcagctccgaggcccacatctccacttcccctaagaggaccgatgggggaagggacagctgaccgggtcttcctcgcagcagcctcacccctagtcttccgcggccggcgagcttctccacctccccgggccgggtctccgcccctcacaggcttccgagacactcactggccctgggttgtcaggatcttcctagccacaaccttattccgaccccacttaagagacaaactttag

SEQ ID NO: 132816 - DNA, 422 bp, Homo sapiens
acactagtatcactccaagtctttagcctttgatacttgctctgaaaacacactatcgtatgtttgtgtatgtacacacacacacacaacagtgacttaaaagtggcaaccgcctcttgaaaagtaaaaatatgtcatccctccattctgcccttaaatgagaaataaagacaatagatttgcccactgcagactgggataccagaaaagacgttctaagtctcgcctgagacaatattaacctgctatcttaagtcccaacttggatgacttaaatttcagtgtacgtgcctccgttcccactcttgccccatcagctccatcagcatcgtcatccccggctcggatcccggccgcgacccgccagggccgccggagtccgcgaataccgcccgctcccagcaacgaattccacgactcta

SEQ ID NO: 132817 - DNA, 1316 bp, Homo sapiens
ggcacgagaaaaaaaacaaaaaacaagaaggcaaaacaaaaatattcccagacagataaacaaaactcagagaatttgttgctagcagtcatgccttacaatgacacaggattttttttggcccctttgccagggtcacagcaggggggcaccctgtctacttgtcccacctgggctaagtctgacttgtgcaccagcacagcctgcagctagaccaggggtgtcccagctcacctgtgctatagcttgtacccacattcagtggttcccaagctcttgtcccccatccgagaagaatggggatacactgacagttgaagactccatcagcatcgtcatccccggctcggatcccggccgcgacccgccagggccgccggagtccgcgaataccgcccgctcccagcaacgaagcttcccccgctcccggccgaccgcgagttcctggagcagcagcctccaaggttcccaaagcccacgattcaggcgagcggtgccgaccgggccgtggactgtggcattttaaaactacagaagtctcactgcacgactggcgcggccgaggtggcccaggagaccctccaagagattctggtcagctgccgggagcgtggaagagcaaccaaagccaccaaaggcgccgcggccaagtccccggagcagtcacctcagctttccgttctccctctagctacaattactccacaggcttacggcgcttccttcgagaaaatgaaaaacctaaaaacgcgtagaggtggtagaagtcgttggcattttccgtttaatgtgatcccccaggctccatcccttaagtggggtttccaaacatcggatgcatcctcagcagaggttttccatgttgacagatctctcgcctcccacaaaatggggccggggaggcggccgcggtctcctctatgggcgccgccattttgtgaggcggcggcggcgcggcggcaggagcccggggtgtgtataatggttgaatagaatgaccccctccagggaatccccggcactgacggttacgtaaggggctgtgcgcaagtgcggcgtttagggaatccgcacagcccgggccacgcagctccgaggcccacatctccacttcccctaagaggaccgatgggggaagggacagctgaccgggtcttcctcgcagcagcctcacccctagtcttccgcggccggcgagcttctccacctccccgggccgggtctccgcccctcacaggcttccgagacactcactggccctgggttgtcaggaacttcctagccacaaccttattccgaccccacttaagagacaa

SEQ ID NO: 132818 - DNA, 411 bp, Homo sapiens
ggcacgaggaggattgaagggccactttggggacccttgctgaagatgatgggctctgctctggggatgcccagcctaggtggtcacagaacccagcttgctataaatacttgccgaatggtggggacttcctgatgtgccttcatcctaacatgctctgcagggcccatgacttagccacagactccatccatattgtcctgggggaaaccccaggcctggagtcagggacagtggagggcaaggatttgggttttcttagatcccagtttgtctgttgtctcccattgatttcaggctctacacagagaacagagggagctggttgctgtgctgagggagcctgagtgaggagaccgccagccccagaagcagagggcagtcaaggtcaagagcctgtggtccagcatg

SEQ ID NO: 132819 - DNA, 487 bp, Homo sapiens
gttgattaccgtggtgaagctcctcgacaccatggtggacacttttcttcagaagctggtcgccgccggcagctaccagagattcactgactgctataagtgcttctaccagttgcagcctgcgatgacacagcgaatctatgacaagtttatagctcagttgcagacatctatccgggaggaaatctctgacatcaaagaggaggggaacctagaagctgtcttgaatgccttggataaaattgtggaagaaggcaaagtccgcaaagagccagcctgcaacgggacaccctgcggcgccatgtgcagaaacaggaggccgagaaccagcagctggcagatgccgtcctggcagggcggaggcaggtggaggagctgcagctacaggtccaggcccagcagcaggcctggcaggctctacacagagaacagagggagctggttgctgtgctgagggagcctgagtgaggagaccgccagccccaat

SEQ ID NO: 132820 - DNA, 511 bp, Homo sapiens
  misc_feature (1)...(511): n = a,t,c or g
cttcaacatggccgaagcaagtagcgccaatctaggcagcggctgtgaggaaaaaaggcatgaggggtcgtcttcggaatctgtgccacccggcactaccatttcgagggtgaagctcctcgacaccatggtggacacttttcttcagaagctggtcgccgccggcagctctccactccttcattgggacggaagtgctggtccccgcctgccctctggtggacagtctgtgaaacaggccttcagttgggcggcgtgcaggttaccacaggggaggaaggaggaaatctctgacatcaaagaggaggggaacctagaagctgtcttgaatgccttggataaaattgtggaagaaggcaaagtccgcaaagagcccagcctggcgccccagcgggatcccagagaaggatctgcacagtgttatggcaccctacttcctgcagcaacgggacaccctgcggcgncatgtgcagaaacaggaggccgagaaccagcagctggcagatgccgt

SEQ ID NO: 132821 - DNA, 1218 bp, Homo sapiens
  misc_feature (1)...(1218): n = a,t,c or g
gccgaagcaagtagcgccaatctaggcagcggctgtgaggaaaaaaggcatgaggggtcgtcttcggaatctgtgccacccggcactaccatttcgagggtgaagctcctcgacaccatggtggacacttttcttcagaagctggtcgccgccggcagctctccactccttcattgggacggaagtgctggtccccgcctgccctctggtggacagtctgtgaaacaggccttcagttgggcggcgtgcaggttaccacaggggaggaagctaccagagattcactgactgctataagtgcttctaccagttgcagcctgcgattgacacagcgaatctatgaccaagtttatagctcaagttgcagacatctatccgggaggaaattctcctngacaatcaaaagnaggaaggggaacctaggaagctgtcttggaatgccttgggataaaaatttgtgggaacgaagggcaaagtccgcaaagagccagcctggcgccccagcgggattcccagagaaggatctgcacagtgttatggcaccctacttcctgcagcaacgggacaccctgcggcgccattgtgcagaaacaggaggccgagaaccagcagctggcagatgccgtcctggcagggcggaagccaggtggaggagctgcagctacaggtccaggcccagcagcaggcctggcaggctctacacagagaacagagggagctggttgctgtgctgagggagcctgagtgaggagaccgccagccccagaagcagagggcagtcaaggtcaagagcctgtggtccagcatgcctggcctgggcgggctacctctgagaacggcttgaaatggtgcccagtccatcagcagtgatggaatttgctggaggacttaggccagagcaagcctcactgccacttgtgcctttggggcacccttggggtctggacatacaccccctttaagattcctctgtttcttctacctggataattcttggccatgttctctcttctctaggttcaggtcagctctgcccctccgcccacaccgcgtgtggttccccagcccttttccctggccctggcttggagaatctgttttcaatctccactgattgcccccttgctggccaagcccaggggcctttaccatgttctctccacatccgtaaataaacttccttcactacactgtaaagaaaaaaaaaaaaaaaaaaac

SEQ ID NO: 132822 - DNA, 421 bp, Homo sapiens; identical to SEQ ID NO: 125684

SEQ ID NO: 132823 - DNA, 2590 bp, Homo sapiens
  misc_feature (1)...(2590): n = a,t,c or g
atgaatgctgggagacgtggattctggtgtttagctcagggagcttctgcacgacagaggaaagttggtggggaaatggaaaagtacagagacacctgggagagggagaagtggctcagaggagacgtggagggcaggtatgtaatgcaagaaagccaggcgagagtgacagaggtgcaaggaggcaaaagaggcagaaacagaaatgccagagaggcgtttacagagattgacaaacaaagagggagaagctgcaagaaagaagcaggagtggagaaatggacagagacaatgggaagggaaagaagagagaggaaagactggaacagtttggagagcttagaagaagacaggaagatgagagaaagtttggaacatgctagagacttgttaaattgttgtgaccaaaatgctgatcatcatatggacagtgaagtccaggctgaggtggtctcagaaggagatgaagaacttattgggaaatggagtaaagcatactgccataggtgtgagcaaaaagatgatctgaaatgggaacttatatttaaaagggaagcagagcataaaagtttggaaattttgcagcctgaccatgtggtagaaaagaaaaacccgggaggaggcaggaaccagagcacgagcagttagctgggtgggcaccatgagctgggatcaccaccatcgaggcggcgaagcgcacgattcaggttctgcatctacaggcaaatgatgcacaggagcgagcttgagcgctcccagcgagagtttagggaagaaaggcgggcccgggaaccaggcctgaggctgaagtagtccttcttgaaccgtaggatccagcgtggttgaagaagagcttggaccgtgctcaggagcgccttggccacttgccttgcaaaaagctttgaagaagctgaaaaaagcttgctgatgagagtgagagaaggtattgaaggttatttgaaaacccgggccttaaaaagattgaaggaaaagattggaacttccagggaaatcccaactcaaaagaagcttaagcacatttgccggaaagaggcagattaggaagtatgaagaggtgggctcgtaagttgggtgatcatttgaaggaagacttggaacccacagaaggaacgagctggagctggcagagtcccgttgctgagagatcgatgagcagatcagactgatcgaccagaacctgcagtgtctgagtgcagctgaagataagtactctcaaaaagaagacaaatggtgaggaagagatgaagattccttactaataaactcagggaggcagagaccccgtgctgagtttgctgagagatcggtagccaagctgaaaaagacaattgatgacctggaagataaactgaaatgcaccaaagaggagcacctctgtacacaaaggatgctggaccagaccctgcttgacctgaatgagatgtagaacgccccagtcccaccctgctgctgctcctccctctgacccagactccgcctgaggccagcctgcgggaagctggacctttaactgagggctgatctttaactgggaaggctgctttctccctttcaccaccccctcctttccctgtgtcttttttcgcccaaactgtctcttgccttcttcccgggagaaatccagctggggntagaggctggagcacctttgggaaacaacattttaaggggaatgttgaggcacaatggcattaatgtttttaaaaaggcatgttgttgatgtacacattttgtaaattacctttttttgttggttttgtaggcaaccatttgtaaaaacattcccaaataattccacagtcctggaaggcaggcaatcgaaatcccctttcttaactttttggaaggtgacttttcaccttaaatgcatattccccctnttcccatagaggagaggaaaaggtgtaggcctggcttaccgagagccaaacagagccaaggggagactccggctgtgggaaacctcattgttctgtacaaagtactagctaaaccagaaaggtgattccagggaggagttagccaaacaacaacaaaaacaaaaaatgttgctgtttcaagtttttcagcttttaagatatctytyggataatgttatttctatttttttatttttttcattagaagttaccaaattaagatgggtaagacctctggagaccaaaattttgtcccatctctaccccctcacaactggcttacagaatggatcatggtcccccttatggttgagggtgacccacttaattggctttcctggcctccttgaaaagaaaagaaaagaaagaagactgtggtttttggccactggatttaggccatgtggaaactcatcttcattaccctttttctggggtttggaagctggctgttcttctaggaaggtggccatctcaattggtggctttgttatcagtcaagtgctgggaggaaattcttggaataagcctatgttacaaaactttttaaattttaataatnattttggaaccttggccttggggttgtggcaccccggcaacccatctggctgtgaagcctctgcagtccgtggggtggcagttgtgat

SEQ ID NO: 132824 - DNA, 2066 bp, Homo sapiens
  misc_feature (1)...(2066): n = a,t,c or g
ctcagctgcccccggagcggttcctccacctgaggcagactccacgtcggctggcatgagccggcgcccctgcagctgcgccctacggccaccccgctgctcctgcagcgccagccccagcgcagtgacagccgccgggcgccctcgaccctcggatagttgtaaagaagaaagttctaccctttctgtcaaaatgaagtgtgattttaattgtaaccatgttcattccggacttaaactggtaaaacctgatgacattggaagacttagtttcctacaaccctggcatatttggaaggttcctgtaaagactgcattaaagactatgaaaggctgtcatgtattgggtcaccgattgtgagccctaggattgtacaacttgaaactgaaagcaagcgcttgcataacaaggaaaatcaacatgtgcaacagacacttaatagtacaaatgaaatagaagcactagagaccagtagactttatgaagacagtggctattcctcattttctctacaaagtggcctcagtgaacatgaagaaggtagcctcctggaggagaatttcggtgacagtctacaatcctgcctgctacaaatacaaagcccagaccaatatcccaacaaaaacttgctgccagttcttcattttgaaaaagtggtttgttcaacattaaaaaagaatgcaaaacgaaatcctaaagtagatcgggagatgcctgaaggaaattatagccagaggaaattttagactgcagaatataattggcagaaaaatgggcctagaatgtgtagatattctcagcgaactctttcgaaggggactcagacatgtcttagcaactattttagcacaactcagtgacatggacttaatcaatgtgtctaaagtgagcacaacttgggaagaagatcctagaagatgataagggggcattccagttgtacagtaaagcaatacaaagagttaccgaaaacaacaataaattttcaccctcatgcttcaaccagagaatatgttatgttcagaaccccactggcttctgttcagaaatcagcagcccagacttctctcaaaaaagatgctcaaaccaagttatccaatcaaggtgatcagaaaggttctacttatagtcgacacaatgaattctctgaggttgccaagacattgaaaaagaacgaaagcctcaaagcctgtattcgctgtaattcacctgcaaaatatgattgctatttacaacgggcaacctgcaaacgagaaggctgtggatttgattattgtacgaagtgtctctgtaattatcatactactaaagactgttcagatggcaagctcctcaaagccagttgtaaagataggtcccctgcctggtacaaagaaaagcaaaaagaatttatgaagattgtgatcttcttattaaatcaattgttactgatcatgaatgttagttagaaaatgttaggttttaacttaaaaaaaaattgtattgtgattttcaattttatgttgaaatcggtgtagtatcctgaggtttttttccccccagaagataaagaggatagacaacctcttaaaatatttttacaatttaatgagaaaaagtttaaaattctcaataccaaatcaaaccaatttaaatattttaaggaaaaagggaaaagtagatagtgatactggagggtaaaaaaaaattgattccaattttatggtaaaggaaacccatgcaattttacctagacagtcttaaatatgtctggttttccatctgttagcatttcagacattttatgttcctcttactcaattgataccaacagaaatatcaacttctggagtctattaaatgtgttgtcacctttctaaagcttttttttcattgtgtgtatttcccaagaaagtatcctttgtaaaaacttgcttgttttccttatttctgaaatctgttttaatatttttgtatacatggtaaatatttctgtatttttttatattngtcaaagaatatggtctcttgtatgtccatataaaaataaattttgctcaatacaattgtaagcttaatgtaaaaa

SEQ ID NO: 132825 - DNA, 1277 bp, Homo sapiens
tgaaggaaagctgcttcctcatatgtttcaagaatggctctccctatcattgtaaaatggggtggacaggagtattcagtgaccacactttcagaagatgatactgtgctcgatctcaaacagtttctcaagacccttacaggagttcttccagaacgccaaaagttacttggactcaaagttaaaggcaaacctgcagaaaatgatgttaagcttggagctctcaaactgaaaccaaatactaaaatcatgatgatgggaactcgtgaggagagcttggaagatgtcttaggtccaccccctgacaatgatgatgttgttaatgactttgatattgaagatgaaagtagtttgaagtagaaaatagggaagaaaacctactgaaaatttctcgcagagtgaaagagtacaaagtggaaattttgaatcctcccagggaagggaaaaagcttttggtgctagatgttgattatacattatttgaccacaggtcttgtgcagagactggggtagaattaatgcggccatatcttcatgaatttctaacatctgcctatgaagattatgacattgttatttggtctgcaacaaatatgaagtggattgaagctaaaatgaaagtaaagcctcttggtgttatatggggaaagttttcggagttttacagcaagaaaaacaccattatgtttgatgacatagggagaaattttctaatgaacccacagaatggactaaagataaggccttttatgaaagcgcacctaaatcgtgataaagacaaagaacttttaaaattaactcagtacctcaaggagatagcaaaattagatgactttttggatctaaatcacaaatattgggaaaggccacgtgtgaggtgccacatcttccatggtaaagaagacagatatgacccctgccctatgggagcatgcagctgcaagactgtgtgcaccacaaacttagcccttccagctttaccactgggttcaatgaagaatggacagccatgtagaaatgtgattggacaaaaaggttatgctctaacggtaataaacagcggaccccagcaaggcctgtttgttcggattcttcttggcctcttcatacgggattttttccctgctgggtgtggggcaagacccttctggaatgagggtcttatggcctattttcagaggaggacactggtaggtgttatgctggtgctgtcgagcagcaaatcatttaaagccaagtgctacaatttgctggctgccatccagttcactgagtaa

SEQ ID NO: 132826 - DNA, 257 bp, Homo sapiens
  misc_feature (1)...(257): n = a,t,c or g
attcaggctgtgctgggaagaagagacctgggcttggaaggaaccggtccccgacggtttctggttgcctcgcctcttcccncttttgtcagctgagcagtttgtggtttctatgcccgcaagtttcaggcatattcacaaaagaaaaatacattttttcccccaactcactctggcctcagtagatttttttttcagttgtggttgttgcccaggctggagtgcagtggcgccatcttgggttcactgcacctcca

SEQ ID NO: 132827 - DNA, 398 bp, Homo sapiens
ttagccccaacaactcagaatttcacttccttgtacggccctcactttctccacctggccccggggcaggtctgagggtctgaagtctgttgatctgaaggtcctaggcaaatccagtcacttgggagccggagatatttaacatcacggcccggtcccctttcccaggggactcatttcctagcactctctccactgtccttgccccacccctgggggaaaaaatgtatttttcttttgtgaatacttcctgaaacttgcgggcatagaaaccacaaactgctcagctgacaaaagggggaaaaaagtctgctgcctgatcccacgctgacactcacagacccttggttgactggcagcactgaacgggtcaagaaaaaaaaaaaaaacgcacgagg

SEQ ID NO: 132828 - DNA, 432 bp, Homo sapiens
acaagggcccctcgtacgggctggcggccgaggtcaagaaccggctcctgtccaaatatgacccccagaaggaggcagagctccgcacctggatcgagggactcaccggcctctccatcggccccgacttccagaagggcctgaaggatggaactatcttatgcacactcatgaacaagctacagccgggctccgtccccaagatcaaccgctccatgcagaactggcaccagctagaaaacctgtccaacttcatcaaggccatggtcagctacggcatgaaccctgtggacctgttcgaggccaacgacctgtttgagagtgggaacatgacgcaggtgcaggccaagactaaggggctgcagagcggggtggacattggcgtcaagtactcggagaagcaggagcggaatttcgacgatgccaccatga

SEQ ID NO: 132829 - DNA, 422 bp, Homo sapiens
ttttttcgtacaaacagaggttttattgcgtttggtccacagtcgtatttcacattatctcacggagcagggcccctgggtggggggtccctgtgcagtaattggcggggcatgtggccggggaagatggagcagtataagctggtcgggcccagaagggaggagggctggggactccttaaaacctactgagggcctgggcacggtggctccaattgcacatttttaaggtccacataattaacaaatcagcaagttctatttatgtttttatgcgaatctatacgtctacaaggttaagtgtagacatacactgatacatttagcaagataaatttagtttgaaaacactttttttcaagtgacaggtttttgtctgatagctttcaataagtccaatattttaaaaacctaatgactgt

SEQ ID NO: 132830 - DNA, 2220 bp, Homo sapiens
tgtcgtcccgtcctgtgcggccccgtcccgccgcccgcttgtcagccatgagctccacgcagttcaacaagggcccctcgtacgggctgttcggcccagggtcaagaaccggctcctggtccaaatatgacccccagaaggagggcagagctccgcacctgggatcgagggactcaccggcctctccatcggccccgacttccagaaggggcctgaaggatgggaactatcttatggcacactcatgaacaagctacagccggggctccgtccccaagatcaaccgctccatgcagaacttggcaccagctagaaaacctgtccaacttcatcaaaggccatggtcagctacggcatgaacccttgtggacctgttcgaggccaacgacctgttttgagagtgggaacatgaccgcaggtgcaggtgtctcttctcgccctgggggggaaaaggccaaagactaaaggggctgcagaaggggggttggacattggcgtcaagtactcggagaagcaggagcggaatttcgacgatgccaccatgaaggctggccagtgcgtcatcggggctgcagatgggcacccaacaaatgcgccagccagtcgggcatgactgcctacggcacgagaaggcatctctatgaccccaagaaccatatcctgccccccatggaccactcgaccatcagcctccagatgggcacgaaacaagtgtgccagccaggtgggcattgacggcttcccgggacccggcggcacatctatgaataccaagctgggaacccgacaagttgtgacaacttctccatgttccttgcagattgggctacacgcagggcgcccaaacccagagcggccaggtctttcggccctgggcggccagatatatgaaccccaagtacttgcccgcaaggcacaattggccgatggggctccctcgggcaccggcgactgcccggacccgggggaggtccctgaatatcccccttactaccaggaggaggccggctactgaggctcccagcacgctctctccccacatcgtcttcccatctgggtttttgggtttttctgtgttttcatcttttttttttatttttcttaacccgttcagtgctgccagtcaaccaaaagggtctgtgagtgtcagcgtgggatcaaggcaagcagagcttttttccccctttgccttgatcccttcgcaaggctgagccactgggctgtgggggaaggggtcaaggccatatcccaatacgtgtagggcgagggtccctgctggcacattcaggctgtgctgggaagaagagacctgggcttggaaggaacccggtccccgacggtttcctggttagcctcgcctctttccccttttgtcagatgagcagtttgcggttcctatgcccgcaagtttcaggaacgaattccaggagaaaaatacattttttcccccaggggtgggggcaaggacagtggagagagtgctaggaaatgagtcccctgggaaaggggaccggggccgtgatgttaaatatctccggcttcccaagtgactggatttgcctaaggaccttcagatcagacagacttcataccctcagacctgccccggggccaggtggagaaagtgagggccgtacaaggaagtgaaattctgagttgttggggctaagcctgaccccctctccatgctccccgccccaacccactctggcctcagtagatttttttttcagttgtggttgttgcccaggctggagtgcagtggcgccatcttggcttcactgcaccttccacctttccgggcttcaaagcgattctccaagccttcagcctccctgagtagcttaggacttgcaggtgctccaaccacgcccgggcttaatttttgtatttttagtagagatggggtttcccccatgttgggccaggctggtctcgaactcctggcctcaggtgtgatccgcccgcctccgcctccccaagcgctggagattacaggtgtgagccagggtgcccaggccctcagtaggttttaaggagtccccagccctcctcccttctgggcccgaccagcttatactgctccatcttccaccggccacatgccccggcaaagtactgcacagggaccccccaccccaggggacctgctccgtgagataaatgtggaaatacgactgtggaccaaacgcaattaaaacctctgttttgtacggagaa

SEQ ID NO: 132831 - DNA, 388 bp, Homo sapiens
ggatttcaatggtgatctaattcctgatatttttggtatcacaaatgaatccaaccagccacagatactattaggaggccataccaccctgaacgcgccccatctcttctgatctcggaagctaaccaaggtcagacctggttagtgcttggatgggagatcacctattactttttctgtaggtttttaataaagaatatgggtgctttgatgctagtaatagggaactttgaaataattattgtgaatcctgaatgagaaacctgtttttttctccaaaatttgaaaaatatcttgaagagagtcttgctttagagacaaattggaaggagatcctgatttgcttttgtggccgtatccaaaaggaattgagtgcaggtggggtgca

SEQ ID NO: 132832 - DNA, 513 bp, Homo sapiens
tttaacattttatcattttaatatttgatgggagcaatgtttccagagatgtttttaatttttttttaattgaataactctagctggccaactcagccaatccgcacatttagctctccaactaccatacaacgtgcttggtttaggtcggagcgcaaattttcttgaccatctctacgttggtattccccgtccatataaaaggtcccagacatttttcatgaagaaccaattccatctttggccccgaaagatcaaaatatcatctgaaagattccacaggtcttgaccggcgcgaagggcacggagagcctcgggctccctctgccgatgtccgcgcttccctgcccagggtcgagcaaggctgagctgggcaaagttttgaccttgaatggaggtctgggggactagggaccggcgcccctctctgtctgctagggctggcggagacccggcaggccggcgagggtgcggggccgaggtgggcggcgcttcccgggcgcctccgtcaga

SEQ ID NO: 132833 - DNA, 2888 bp, Homo sapiens
  misc_feature (1)...(2888): n = a,t,c or g
gcagccctagaaggagagagagaaaggagccggcagcgctcttacgcgtcccggggctgccgccactctctcggccggtaacgcggtgctttgcggctgtcgtcaagcgcggcgttgggccggcgggagggggctgaggggctgccatggcggcggcgggccggctccctagctcctgggccctcttctcgccgctcctcgcaggggttgcactactgggagtcgggccggtcccagcgcgggcgctgcacaacgtcacggccgagctctttggggccgaggcctggggcacccttgcggctttcggggacctcaactccgacaagcagacggatctcttcgtgctgcgggaaagaaatgacttaatcgtctttttggcagaccagaatgcacccgtattttaaacccaaagtaaaggtatctttcaagaatcacagtgcattgataacaagtgtagtccctgggggnttatgatggagattctcaaatggatgtccttctgacatatcttcccaaaaattatgccaagagtgaattaggagctgttatcttctggggacaaaatcaaacattagatcctaacaatatgaccatactcaataggacttttcaagatgagccactaattatggatttcaatggtgatctaattcctgatatttttggtatcacaaatgaatccaaccagccacagatactattagggggggattttatcatggcatccagcattgaccactacaagtaaaatgcgaattccacattctcatgcatttattgatctgactgaagattttacagcagatttattcggggcgacattgaatggcaccactagtaccttccagtttgaaatatgggaaaatttggatggaaacttctctgtcagtactatattggaaaaacctcaaaatatgatggtggttggacagtcagcatttgcagactttgatggagatggacacatgggctcatttacttgccagggctgtggaagataaaaattgccaaaagagtaccatcttacttagtgagatctgggatgaagcagtgggttccagtcctacaagatttcagcaataagggcacactctggggctttgtgccatttgtggatgaacagcaaccaactgaaataccaattccaattacccttcatattggagactacaatatggatggctatccagacgctctggtcatactaaagaacacatctggaagcaaccagcaggcctttttactggagaacgtcccttgtaataatgcaagctgtgaagaggcgcgtcgaatgtttaaagtctactggggagctgacagacctaaatcaaatttaagggtgccatggttgccaccttctttgacatttacgaagatggaatcttggacattgtagtgctaagtaaaggatatacaaagaatgattttgccattcatacactaaaaaataactttgaagcagatgcttattttgttaaagttattgttcttagtggtctgtccctctaatgactgtcctcgtaagataacaccctttggagtgaatcaacctgggaccttatatcatgtatacaactgtagatgcaaatgggtatctgaaaaatggatccgctggcccaactcggcccaatccgcacatttagctctccaactaccatacaacgtgcttgggtttagggtcgggagcgcaaattttcttgaccatctctacgttgggtattccccgtccatcttggagaaaaatcttttacggaaaacaagagtggactgcaatcattccaaattcccagctaatttgtcattccataccctcacaatgtccccccgaagttgggagtgccaaactgtattctttacaccaagttaatattgttctggcttactgctatagctctcattcggtgtctgtgttttcaatctttggcaataaattggcattttacattgggcagggaaaagaaagcaggatggatagaggaaaaacggacaaggaaggcccaccggtttccattttggatggctatgtggacttgcctttaatattacataatgggaatgggctgtttcacttggattagttggaaacacaaaaatcctgggcttggaaaaaataggggggagattaaaatattatttaataaatgatgtatccccatgggtaaattaattgggaaagtattcaaaataaatatgggtttgaatatgtcacaaggtcttttttttttaaagcactttgtatataaaaatttgggttctctattctgtagtgctgtacatttttgttcctttgtggaatgtgttgcatgtactccagtgtttgtgtatttataatcttatttgcatcatgatgatggaaaaactatgtgtaaataaaaataattaaatgagcaggaatttttgtgtccacttgacttggtcttgcttcttattctaatgatgcaaattatacttttgtgaatatatcacggagtcattaggcattcagcttcatcacagcaggtcaggggtctcactgatggcatacaatatagtgatcgggtactctgacttggtagcacagtaagacagacttgccttaaactcctaattcaaccacttacaaagtcattgtttgaacttggctcttgtttaacctcttgaaaccctcagttttcttgtttattgagtggggctaatagttgagttactgtaaacattaaatgggatgatgtatgtgaagtgcttagcttggtgcctagcacagagtaagtggtcaatatgtggtagttgtcattattaatattttagatgatcttattagacttatgacatctaattattaggaaatacatagacttggatagaattttattttccagggcatggaaggaaatattctttggaaaagc

SEQ ID NO: 132834 - DNA, 969 bp, Homo sapiens; identical to SEQ ID NO: 125398

SEQ ID NO: 132835 - DNA, 2072 bp, Homo sapiens
  misc_feature (1)...(2072): n = a,t,c or g
cggccgccttttccagttccaggtgtgcagaagtgtcctctccccacgcgcggcgggctgcacattggtcgctggctccgagatcgcgcggggccgccggaagcccaagacggtaccgggggccgcagccgcagccggcgccgccctccagccctccccaacagcaggccgagtcccgtagcatccggtagggaaatggtcgtgctttcggtccccgccgaagtcacccgtgatcctgttagatatccgaaggtaccacaaccaccgattgctttcgtgaaaggagcattttatttccttacatcgaaagaaaaatgttaaaagatgtatctgcagacacattggggaagaagaggagttccaagcaggatgtcagtctttttgaaggaaacaaggcttgaagaggacgcccacctggatgggggctgttcctatccctggcaagcatctgggaattggagttggatgattctgcaacagatgattccaagccgtggtagataatgtgtgctggcagatgtccctggatcgaaagaccactgcactcaaaacagctgcagggccacaatgtggagggcggcattcacagctgggcgcatgaaaagcagagttctttgcagatgtagttccagcaagtcaggtaagtggagagaggccggaaatgaaggtgtacatctattcctcagggagtgtggaggcacagaaactgttattcgggcattctacggagggagatattcttgagcttgtttgatggtcacttttgataccaagattggacacaaacgtngacgagtgaaagttacccgaaagacttgcagacagcattgggtgctcaaccaaacaaacattttgttttctggacagatgttacttcgaggagggccagtgctggcttgagggaagcaggatgttgcacgttagctgtggtgggtgagaccagggcaacgcagggattaacagatgattgaggaagacttactacagcctcatcacatcctttcagtggaactattacctgccttcctcaacctaggagaagggtttgtttaagggcagaccgccctgttccccagagttgtccctgtagtgtctaggtttattctaatggtaaaagtaacttacttaaaaaacatatgtacacatatgtatgcaaggtatgtatatatgtgtatgctccagattaacttccataggtacataagtgaaaggaagtcttcagtttcagtgaacacaaaactttatttaaagatgctttataatgtagaaattggtttcaaatcatactctaccccttagtgagggcaaagtgtagttggtagaagaaattgctaaatacctatctaatgtgctatgtttatcaaatcgtgtactaaaatggaaagctagttttgagaaattattcagaagccttgttattttaaaaatgaaatatttcaaagactgaatattttcaaagaaaatgaataattcattgcccttgtgatttagaagattataacagctgtatttcatatttgcctccttatatatatcaaagaccaaggtatttccttccggcttcaaaaggaaccaaaattgggaaagaaaactccacttgagtcttgatcaaaccaagtgtccttttactttanggaagaaacttgggtaatccattgtgggcaccccacagccaagccagttgccctttaccagtgaaaaaaggtggcactggaggtaacatcttaaaacagagatgtggttcttaaatgtttaacagaacagttcctaatcctgcccacggtgttatcattataggattttatagttgccctttcctaacctacttagccacagtttgaggaatacggttaattggctatttactatttaaaaaagttttactgaaattcagtcccataacctttagggtggggccctaatatgtaagattttcctctggaatggaatgtgagaaatcgtaaattttgataacagcagtatttatcctggtttaattctaatacggatgtcatgttaatttcatgttgtgattaataaaagcgttttttcttcaaaaaaaaaaaaaaaaa

SEQ ID NO: 132836 - DNA, 584 bp, Homo sapiens
  misc_feature (1)...(584): n = a,t,c or g
gacaatgagctcttggactatgaagatgatgaggtggagacagcagctgggggtagtatgtctgagcccctgccaagaaggatgtcaagggctcctatttctccatccacagctctggctttcgtgacttcctgctcaagccagagttgctccgggccattgtcgactgtggctttgagcattccttcagaagttccagcatgagtgcatccctcaggccattctgggaatggatttcctgtgccaggccaagtcgggcatgggaaagacagcagtgtttgtcttggccacactgcaacagctggagccagttactgggcaggtgtctgtactggtgatgtgtcacactcgggagttggcttttcagacacggtagaagactcgcccattttggaatgtgaccgtctgtccttcaggagaggacaccagggtgggggtgaaggagacactactgcccccacccctgacagcccccaccccatggcttccatcttttgcatcaccaccactcctgaacccccatttctgatttgtcagaatttttttttnnnnnnnnnnnnnnnnnnnnnnnnnnnnnnnnnnnn

SEQ ID NO: 132837 - DNA, 388 bp, Homo sapiens
acagtcttctaatagctgcttggaggaaaaacaaacttatgaggctagaggccaagtacaaagattcttgtagctggggtttcaacacaaccaaaaaaggaatgaagattttcacaacacttctttataattcagaggcccaggttttaagcctagaatgttaaagtatcatacttcagtttctgggtcttcagtacggaatgtgattcagaaaagtcaaacttctcgttaacaagtatcaagagctgcaatctggcaatcgaaaaatgcttcttgagcacctgctgtgtgccttgtcctatggataggaaccccaccccatggcttccatcttttgcatcaccaccactcctgaacccccatttctgatttgtcagaattttttttg

SEQ ID NO: 132838 - DNA, 564 bp, Homo sapiens
ggtggggttttcaatcttctctttcctccccatccccccatggggtgtattggagatcaacttcctccacccccccaggtttaacccccccactctgccctcctcccgttccccacccccttcctcccccccagccaattggagatcttcgtggatgatgagacgaagttgacgctgcatgggttgcagcagtactacgtgaaactgaaggacaacgagaagaaccggaagctctttgaccttctggatgtccttgagttcaaccaggtcagttagacgtccagtagggggatgagcattggagcactccagctgtagcagaaacctggatattaagtacacttttattgaggaaatcacatgtgtgatgtgggagagaataatgagggtataaatatcttaggggctgagcatgagtaaggtgggagctgcttttctattctatggctggcacgggtatgtcctcaataacctcaaggaaaataaacttcaaaaattaagatccttggccaggcacggtggcttatgtgtgtaatcccagcacttggggaggctgagggaggt

SEQ ID NO: 132839 - DNA, 1255 bp, Homo sapiens
  misc_feature (1)...(1255): n = a,t,c or g
tgttgctgccgccatacgcgctctccctgtttagttatggcagagaacgatgtggacaatgagctcttggactatgaagatgatgaggtggagacagcagctgggggagatggggctgaggcccctgccaagaaggatgtcaagggctcctatgtctaccatccacagctctggctttcgtgacttcctgctcaagccagagttgctccgggccattgtcgactgtggctttgagcatccgtcagaagtccagcatgagtgcatccctcaggccattctgggaatgggatgtcctgtgccaggccaagtcgggcagtggggaaagacaggcagtgttttgtcttggccacactgcaacatctggagccagtttactgggcaaggtgtctgtgctgggtgatgttgtcacactcgggagttggcttttcagatcagcaaggaatatgagcgcttctctaaatacatgcccaatgtcaaggttgctgtttttttttggtggtctgtctatcaagaaggatgaagaggtgctgaagaagaactgccccgcatatccgtccgtggggactccaggccgtatcctagcccctggctcgaaataagagcctcaacctcaaacacattaaacactttattttggatgaatgtgataagatgcttggaacagctcgacatgccgtcgggatgtccaggaaaatttttccgcatgaccccccacgagaagcaggtcatggatgttcagtgctaccttgagcaaagagatccgtccagtctgccgcaagttcatgcaagatgtaaatacccttctaccttctctccctccactccccgcccgctgcctcctccccttcctcgccctcttcctcagactcccttgtcattcaagtgccaagaaggcggcttgtgcccaactgggagtaatgactccttgaagagacatacagaagcagagacagctagtgttagggcctgcgcgggtgccagggaaactccggaagacttggtcggggttaatgtgaaaagcgggtagtggttcgacttttttcataaatcaccaacatttttgaaccctcttcttcctttgggggangggcagggatttttttgcctaacaaccacccaatccatcgncttttaaatggccccttnaagccacgccnccttcaaggggnattcgagcggaccaggtggagcccttttggttacccaaacttctantttcccgggggcgggagaaccaaganaggggcngaccgat

SEQ ID NO: 132840 - DNA, 1970 bp, Homo sapiens
  misc_feature (1)...(1970): n = a,t,c or g
cgtcgctgttgctgccgccatacgcgctctccctgtttagctcttctgttagaaatagtatctttgttttcctttgctgttcctcagtcccctgactcttcaccccttgttttcacctattttgcgagaacccatccagatcccccttcccttcttcccctgccggcccagttatggcagagaacgatgtggacaatgaagctcttggactatgaaagatgaatgaggtgggagacagcagctgggggagatggggctgaggcccctgccaagaatggatgtcaagggctcctatgtctcccatcccacagctctggctttcgtgacttcctggctcaagccagagttgctccgggccatttgtcgacttgtggctttgagcatccgtcagaagtccagcatgagtgcatccctcaggccattctggggaatgggatgtcctgtgccagggcaagtcgggcattgggaaagacagcagtgtttgtcttggccacactgcaacagctggagccagttactgggcaggtgtctgtactggtgatgtgtcacactcgggagttggcttttcagatcagcaaggaaatatgagcgcttctctaaatacatgcccaatgtcaaggttgctgtttttttttggtggtctgtctatcaagaaggatgaagaggtgctgaaggaaggaactgcccgcatatccgtcgtgggggactccaggccgtatccttagccctgggttcgaaataagagcctcaacctcaaacacattaaacactttattttggatgaatgtgataagatgcttgaacagctcgacatgcgtcgggatgtccaggaaatttttcgcatgaccccccacgagaagcaggttcatgatgtttcagtgctaccttggagccaaagagatccgtccagtctgccgcaagttcagtgcaagatccaatggagatctttcgtgggatgatgagacgaagttgacgctgcatgggttgcagcaggtactaccgtgaaactgaaggacaaccgagaagaacccggaagctctttgaccttctggatgtccttgagttcaaccacggtggtgatctttgtgaagtctgtgcaaccggtgcattgccttggccccagcttactagtgggagcagaacttcccagccaattgccatcccaccgtggggatgcccccaggaaggagaggctttctccggtaatcaagcagttttaaagattttccaacgaacgaaattcttgtnggctacccaaccctatttggccgaaggcatggaacatccgaagcgggtgaaacaattgctttttaatttatgaacatgccctgagggattctgaaaaccctaccctgccatcggggtgggcccagaacagggccggtttgggcacccaaggggcttgggctatcacatttgtgtccgatgaggaatgattgccaagatcctgcgatgatgtgcaaggatcggctttgagggtcaaatttagtgagctgcctgatgagataggacatcttcctcctacattggaacaggacacgggtagaagactcgcccattttgggaatgtggaccgtctgttcctttcagggaggagggacacccagggtggggggtgaaggagacacttactgccccccaacccctgaacagcccccaccccatgggcttccatctttttggcattcaccaccattcctgaacccccagtttctgatttgtcaagaattttttttttaacaaagactaaaaatgnnnnnnnnnnnnnnggggggcccgttttaaagaacccttagggggcccaaatttaacccggccttccaacgcaaaacttttccccttaaagggagcctatttaaaaccaacttgggaatttttgaaaggaaccttaattttggggggggaacatattgggccaacttccttccaaaatttaaagcctttagggaaaataaaaaattttaaggggt

SEQ ID NO: 132841 - DNA, 591 bp, Homo sapiens
agtgtgtcctggatgctgctttcctgcctcattctcctgtgtcaggttcaaggtgaagaaacccagaaggaactgccctctccacggatcagctgtcccaaaggctccaaggcctatggctccccctgctatgccttgtttttgtcaccaaaatcctggatggatgcagatggctctgagcctgatggagatggatgggagtggagtagcactgatgtgatgaattactttgcatgggagaaaaatccctccaccatcttaaaccctggccactgtgggagcctgtcaagaagcacaggatttctgaagtggaaagattataactgtgatgcaaagttaccctatgtctgcaagttcaaggactagggcaggtgggaagtcagcagcctcagcttggcgtgcagctcatcatggacatgagaccagtgtgaagactcaccctggaagagaatattctccccaaactgccctacctgactaccttgtcatgatcctccttctttttcctttttcttcaccttcatttcaggcttttctctgtcttccatgtcctgagatctcagagaataataataaaaatgttactttata

SEQ ID NO: 132842 - DNA, 972 bp, Homo sapiens
cggacgcgtgggttttataaaaaacccagtctttgctgaccagacaaagcataccagatctcaccagagagtcctaggggactacagaaggaaaaagacaagaggcagtaggatatctgtgtgtcctcccgctgaccacacttcctttagtgacccgattgcctcctcaagtcgcagacactatgctgcctcccatggccctgcccagtgtgtcctggatgctgctttcctgcctcattctcctgtgtcaggttcaagggtgaagaaacccagaaggaactgccctctccacggatcagctgtcccaaaggctccaaggcctatggctccccctgctatgccttgtttttgtcaccaaaatcctggaatggatgcagatctggcttgcccagaagcggccctctgaaaaactggtgtctgtgctcagtggggctgagggatccttcgcgtccctcctggcggaggagcattagtaacagctactcatacatctggattgggctcccatgaccccaaaaaagggctctgagcctgatggagatggatgagagtggagtagcactgatgtgatgaattactttgcatgggagaaaaatccctccaccatcttaaaccctggccactgtgggagcctgtcaagaagcacaggatttctgaagtggaaagattataactgtgatgccaaagttaccctatgtctgcaagttcaaggactagggcaggtgggaagtcagcagcctcagcttggcgtgcagctcatcatggacatgagaccagtgtgaagactcaccctggaagagaatattctccccaaactgccctacctgactaccttgtcatgatcctccttctttttcctttttcttcaccttcatttcaggcttttctctgtcttccatgtcttgagatctcagagaataataataaaaatgttactttatacttaaaaaaaaaaaaaaaagggcggccgct

SEQ ID NO: 132843 - DNA, 459 bp, Homo sapiens
  misc_feature (1)...(459): n = a,t,c or g
ncaattgccagccacaaagcacaccataaactacttagtgcatatgaatagcaaagtgaggtccaccatgggattatcagttacacaacaggacaaggagaaaacctctctgaacccatttggaagagctggcagaggagccaggacctatgacaggagaaccaccctgagatttattcactcacatannnnnnnnnnnnnnnnnnnnnnnnnnnnnnnnnnnnnnnnnnnnnnnnnnnnnnnnnnnnnnnnnnnnnnnnnnnnnnnnnnnnnnnnnnnnnnnnnnnnnnnnnnnnnnnnngaagtttggatggatggattcatttaactcatatcaagtaactgcagtgggtgcctgtagcagagaagttgtagcagaggagtaggatagtataaaggcagggcattccnccgcncggtgtatgcaactcaattnnnnnnnccccccccctanncccc

SEQ ID NO: 132844 - DNA, 2769 bp, Homo sapiens
tttttttttttttttttcaaaaactttattcttttctaataaaaatgatatatgttcattataaaaagtttcaaacacacaagagtctgaagaatgtaaagatcacccaaatcccacagcccagaaaaaaaaatccttaacatttggggaagatctctctatgaaacatacattatcttaaaatattcaatgttataaatgagctcatattcaacatatatcctgtagtctactttttgattcaataatatttggggaacatatatccatagcaataaacatatatctaaatatttttaaatgacaactggcatggaatttatttaatccatccttttactggagggatggtttcagttggttcccaatggttttaatatcataaacatccatggaaatatacctttggggctcatggtttgaagacttggacaacttttattcattaggataaattcctaaacaaactggctggggaaagggggtatccacatttagggtttccatacatggtggccaaattgccttctagaaaggttctaccaattttcactcctgccagtattgaacaagaattccatttttgtcaattgctttatctttgccaatatgggaggacaaaattaataataataaaataaaataacacatctttattagctgttttcatgttcaaataggagggacacttttaatttttaaggttattctttttcaaggcagatatttcctggacttgaataaagtgtttttggtttgtattctcattccatcagtagtatgacttagggcaagagccaactcctttatgcttcatttttttaaatctaatagatcaaggaaatggaaaccggctcaataggttgtttaaagcttaagagatgtgtgaatgcacctagcacctactagacacaacaatgagcctgcatttccgcaagtaagccattcctacctccttaccccccattccaattaatgtttgtctataagaatattttaaaattcaagagccaatgtaaaactctgtaaatattatcttgctatttatagagacgaccagaaaagtttgcaatgatgcagatgacatccataatgagtctcttaaatgaaggtttggcaggcaatacaggtcttttgaataaaaatgtctcccaggaaaatacttgcaagtcaagcccacagaccatcaagtatatataaatgatttggaacgggaagacagatacaaaacacaacaaacatcagtttattggctgccataacactggtttttcattgcttagacatggtttgggaatattgtccaccatagagaaaatttataagcaacacatacaacgactaatcttcttttcgaagatatctcagatattagtatttaaaattagtagcttttattcaagaatgatgaaatggaataatttaagcaatgattgattatattccgaatacatagaaagataaacttcgggtgcaatctagatgacaatcttgattctgaagatgctttgaaggactatttgattcattcattttacaaatatttgttgaaccatattatgcaccaggtactgtgccagccattagggatccaaaaatgagcaggacatagacctttccctcagggaacctgcagttttgtggaagaagaaatataatttaacaggcaactccagtatcacgtgatagtgacctgaggtttgtgtaggtgcctcagacccccggaagatgccatcagtatccaaacaaatgccccaaagaaaccacataccaatagaagaatagaatctgtcacaattgcccagcccacaaagcacacccataaactaccttaagtgccatatgaaatagcaaagtgaggtcccacccatgggattatcagttacacaacaggacaaggagaaaacctctctgaacccatttggaagagctggcagaggagcccaggacctatgacaggagaaccaccctgagatttattcactcacatataagctccatgagggcagtgagctttgctggtttccatctgcactgtagccccagctcctagaatagtgcctgatacaaaggaagccattgctaagtatttattcaatgaatggaagtttggatggatggattcatttaactcatatcaagtaactgcagtgggtgcctgtagcagagaagttgtagcagaggagtaggatagtgataaaggcaggacacatggtacttactaaaaatctgtggaatcatcaaatgacttttcacatcctatcccttttcataggagcttgagctgccagtgacttcattgggctatttggaacgcaagaaaaagcatggattttgaagtcatgacaaatgtgagttcaaatcctggctcctccagatctggaaggacttgatgggaggactgggaggacttgattttagcaagttagtttcctgactcagtgtcctcaccttattataagatgggatccacaccttcagggtgactctaagggttaaccagaaaaaaacatgcaaagctctagacccagttcccttcacccttaccccatttttctggcattagggatggttgtgcacagctgctgtggatccccaattccttgaatagccatcctgagtgcttcgtcagtgctcttttctatttctcttaattccgtatctcttttcagaaaccttctccaagaagccttcttcatcctctcaaaaatgcatagtaatctattccttcttctcaccctttcagcatttacttcggttgcattggtg

SEQ ID NO: 132845 - DNA, 400 bp, Homo sapiens
cgttgctccgtgggtgctcctgtgtcttcaagggagtaacagttacagaggtctcccccttgaagaaagcaaactaagtattgtccctagctgtacttagtatgcaaatgaagtttggccttgagtttcccttttcagaggaggctttttccctctacctttcttgtctcccttctactccacggggctgtttataacttgggcttggtcttctgttacagtcttggtgatgccttggacagcagcaactccatgcaaaccatccaaaagaccaccacccgccggatagtggatggcaaagtggtgtctgagaccaatgacaccaaagttctgaggcattaagccagcagaagcagggtaccctttggggagcaggaggccaataaaaagttcagagttc

SEQ ID NO: 132846 - DNA, 323 bp, Homo sapiens; identical to SEQ ID NO: 129412

SEQ ID NO: 132847 - DNA, 994 bp, Homo sapiens
gcgcccagctaccgcgcccactggtcagaagtgtggcaagcgtctatgcaggccctgggagctcaggttcccggatctccatgtcccgctccaccagcttccagggtggcttggggtccaggagcatggccgcagtatggccgggggtctggcaggaatgggaggcatccagaacgagaaggagaccatgcaaagcctgaatgaccgcctggcctcctacctggacagagtgaggagcctggagatgggaaactggaagctggagagcaaaatctgggagcacctggagaagaagggaccccaggtcagagactggggccactacttcaagaccatcgaggaggacctgactcagatcttcacaagtactgtggacaatacctgcatcattctgcagatcgacaatgcccatcttgctgctgatgactttagagtcaagtatgagacagagccggccacgtgccagtctgtggagaacgacatccatgggctccacaaggtcattgatgacaccagtgtcactcagctgcagctagagacagagatcgaggctcttcaaggaggcgctgctcttcctggaagaagaaccacgaagaggaaagctgagacatacagtccaggccttggagatcgacctggactggatgaaaaatctggaggccagcttggagaacagcctgaagggggggtggaggcctgctacaccctgcagatggaacaactcaatgggatcctgctgcacctggagtcagagctggcacagacctgggcagagggacagggccaggcccaggagtaccaggccctgccaaacatcaaggtcaagctggaggctgagatcgccacctaccgccgcctgctggaagatggcgaggacttcaattttggtgatgctctggacagcagcaactccacgcaaaccatccaaaagactcccacctgccaacagtggatggcaaagtggtgtctgagaccaatgacaccaaagttctga

SEQ ID NO: 132848 - DNA, 377 bp, Homo sapiens
caggaatgggaggcatccagaacgagaaggagaccatgcaaagcctgaacgaccgcctggcctcttacctggacagagtgaggagcctggagaccgagaaccggaggctggagagcaaaatccgggagcacttggagaagaagggaccccaggtcagagactggagccattacttcaagatcatcgaggacctgagggctcagatcttcgcaaatactgtggacaatgcccgcatcgttctgcagattgacaatgcccgtcttgctgctgatgactttagagtcaagtatgagacagagctggccatgcgccagtctgtggagaacgacatccatgggctccgcaaggtcattgatgacaccaatatcacacgactg

SEQ ID NO: 132849 - DNA, 316 bp, Homo sapiens
aatctgagacctcgagcaccatagtcagtgtggtggaattccaatccctccagatcttcgcaaatactgtggacaatgcccgcatcgttctgcagattgacaatgcccgtcttgctgctgatgactttagagtcaagtaagtttgggggctagagagctgggggtccaggggtggagctaagaaggatctgctccccaggctgggtcagttaggggctcacagtgggatcctgttaggtgtgggtggatgagagtcagggtccatcagtgtattcatttaactgttcatttgtataaccccgtttaagaatactgt

SEQ ID NO: 132850 - DNA, 490 bp, Homo sapiens
catgtgtctgttcactggtatccactgagcactgggccgttgctccgtgggtgctcctgtgtcttcaagggagtaacagttacagaggtctcccccttgaagaaagcaaactaagtattgtccctagctgtacttagtatgcaaatgaagtttggccttgagtttcccttttctggaggaagaggctgagggtgatttggagataaaggtagaggtcaggaggctttttccctctacctttcttgtctcccttctactccacggggctgtttataacttgggcttggtcttctgttacagtcttggtgatgccttggacagcagcaactccatgcaaaccatccaaaagaccaccacccgccggatagtggatggcaaagtggtgtctgagaccaatgacaccaaagttttgaggcattaagccagcagaagcagggtaccctttggggagcaggaggccaataaaaagttcagagttcattggaaaaaa

SEQ ID NO: 132851 - DNA, 1535 bp, Homo sapiens
gaaggcagatcaaaatggctgcaagggacgtggttgccaacattggggttgccatgacaactgtaatgcctgtgatagttgagctgagaaagcaggcggtaagaaaggggaggcgcccagctaccgcgcccactggtcagaagtgtggcaagcgtctatgcaggccctgggagctcaggttcccggatctccatgtcccgctccaccagcttccagggtggcttggggtccaggagcatggccgcagtatggccgggggtctggcaggaatgggaggcatccagaacgagaaggagaccatgcaaagcctgaatgaccgcctggcctcctacctggacagagtgaggagcctggagatgggaaactggaagctggagagcaaaatctgggagcacctggagaagaagggaccccaggtcagagactggggccactacttcaagaccatcgaggaggacctgactcagatcttcacaagtactgtggacaatacctgcatcattctgcagatcgacaatgcccatcttgctgctgatgactttagagtcaagtatgagacagagccggccacgtgccagtctgtggagaacgacatccatgggctccacaaggtcattgatgacaccagtgtcactcagctgcagctagagacagagatcgaggctcttcaaggaggcgctgctcttcctggaagaagaaccacggagaggagataaaaggcctatcaagacgccagattgccagctctggggttgacccgtggagggtagatgcccccaaatcttcagggccttcgccaaagatcatgggcagacatccggggcccaaatatgacgagctgggctcgaaaaagaacccgagaggaagctagccaagtactcgtctcaagcagattgaggagagcacccacagttggtcaccaacaccagtctgcttgaggtttggagcttgctgagacgaaccttcacaggtcttagacgtacaagtccaggtccttggaagattcgaccctggactccattgagaaatcttgaaaggcccaggcttggaagaaacagcccttgaagggaagttggaaggcccccctacggcccttaccagattggagcaagcttcaaacggggatccttgcttgcacctttgagtccagagctggcaacaagacccgggcaagagggacaagcgccccaggcccccaggagttatgagggcccttgctgaaacatcaaaaggtcaaagctggaggcttgagatcgcccaccctacccgcccgcctgctggaagatgccgaggbcctttaatctttggtggatcccttggacagcaagcaactcccatgcaataccatccaaaagaccaccaccccgcccggataagttggattgggcaaagtggtgtcttgagaccaattgacacccaaagttcttgaaggcatttaagcccagcaagaagcaagggtacccttttggggaagcaaggaaggccaataaaaagtttcagagttcaaaaaaaaaaaaaagaaaaagaaagttttg

SEQ ID NO: 132852 - DNA, 345 bp, Homo sapiens
  misc_feature (1)...(345): n = a,t,c or g
gncggcgtgagaagccagtgagcagcaaagtctctcgcgacaccctgtacgaggcggtgcgggaagtcctgcacgggaaccagcgcaagncncngcaagttcctggagacggtggagttgcagatcagcttgaagaactatgatccccagaaggacaagcgcttctngggcaccgtcaggcttaagtccactccccgccctaagttctctgtgtgtntcctgggggaccagcagcactgtgacgaggctaagaactggtcangaagctngccaagaagtatgatgcgtttttggcctcagagtctctgatcaagcagnttccacggantcctcggcccaggttta

SEQ ID NO: 132853 - DNA, 1133 bp, Homo sapiens
  misc_feature (1)...(1133): n = a,t,c or g
cgtggtgcaattcgcgcggcgtgagaagccatcgagcagcaaagtctctcagcgacacccgtgtacggaggcggtgcgggaagtcctgcacgggagaccagcgcaagtcgccgcaacgttcctgggagacggtggagttgcagatcagcttgaagaactatgatccccaggaaggacaaagcgctttctcgggcacccgtcaggctttaagtccacttccccgcccttaagttctcttgtgtgtgtcctggggggacccagcagcacgtgtgacgaggcttaaggcccgtgggatatcccccccacatgggacattcgagggcgcttgaaaaaacctcaacaaagaataaaaaaactggtccaaaaaagctggcccaaggaagtattgattgcgtttttttggccctcagaagtctcttgatcaaagcaagattccaccgaatccctccggcccagggtttaaataaagggcaggaaaagtttccctttccctggttcacacacaacggaaaacatgggtgggccaaagttggatgaaggtgaagttccaccaatccaagttttccaaatgaaagaaaggtgtttatgtctgggctgtagctgtttggtcacgtgaatgatgacagaccgatgagcttgtgtataacattcacctgggctgtcaactttcttgggtgtcattgctcaaagaaaaaaactgggcagaatgtcccgggccttatatatcaagagcacccatgggcaaagccccaagcgccttatatttaaggcacattttgaataaattctattaccagttnnnnnnnnnnnnnnnnnnnnnnnnnnnnggggggggcccgttttaaagaatccttgggggggcccaaagtttaccccggcttggcaagtttaaatttttttccttatggggggggatataaaaacctatttgggaatttttggaaaggaacctttcttttgggggggggacttattgggccaacctccctccagaatttaaaggctttagggaaaataaaaaattttaaaggggtaaagggggtaaaaactacctgaatagcttggtggttggaaagttttgcttccggggttggttttaggaaatttttatccccggggctggggtttattat

SEQ ID NO: 132854 - DNA, 555 bp, Homo sapiens
gccagcgccgttgctgcgggggattgtgggagtctccgcgtcccgctcgctgggagagagagttgtctgctggttctcagcttgaagaagattctgcagtccttattgatcctttttcttggcgttaccattttttgaagcaaagttaacctagctttctagtttgagctttctttttggccgtctttaaaaaaaattttttttttaatctataaaatagacaagagctagttctacaatgtccaagtcattccagcagtcatctctcagtagggactcacagggtcatgggcgtgacctgtctgcggcaggaataggccttcttgctgctgctacccagtctttaagtatgccagcatctcttggaaggatgaaccagggtactgcacgccttgctagtttaatgaatcttggaatgagttcttcattgaatcaacaaggagctcatagtgcactgtcttctgctagtacttcttcccataattgcagtctatatttaacattggaagagaggtccactccctttatcttctcaacaccgtggagatgcagacc

SEQ ID NO: 132855 - DNA, 4220 bp, Homo sapiens
  misc_feature (1)...(4220): n = a,t,c or g
attcccatgagggacgtcgcaccggaccggaaatcccggaacgacccacgcgaccggacgcgcgcctaaccaagaagagggggagggggctttctttttctcgagagagggatcgttcttgggctgcagccgctgccgccgcttctcgccagcgccgatgctgcgggggattgagggagactccgcgtcccgctcgctgggagagaggaacctctccttttccctctccctttccctaagagttgtctgctggttctcagcttgaaaaagattctgcagcccttattgatcctttttcttggcgttaccattttttgaagcaaagttaacctagctttctagtttgagctttctttttggccgtctttaaaaaaaattttttttttaatctataaaatagacaagagctagttctacaatgtccaagtcattccagcagtcatctctcagtagggactcacagggtcatgggcgtgacctgtctgcggcaggaataggccttcttgctgctgctacccagtctttaagtatgccagcatctcttggaaggatgaaccagggtactgcacgccttgctagtttaatgaatcttggaatgagttctttattgaatcaacaaggagctcatagtgcactgtcttctgctagtacttcttcccataattcgcagtctatatttaacattggaagtagaggtccactccctttatcttctcaacaccgtggagatgcagaccaggccagtaacatgttggccagctttggtctgtctgctagagactcagatgaactgagtcgttatccatcagacacgattactcctgagaatttgcgcccaatccttctacagcttaaaaggaggagaactgaagaaggccctaccttgagttatggtagagatggcagatctgctacacgggagccaccatacagagtacctagggatgattgggaagaaaaaaggcactttagaagagatagttttgatgatcgtggtcctagtctcaacccagtgcttgattatgaccatggaagtcgttctcaagaatctggttattatgacagaatggattatgaagatgacagattaagagatggagaaaggtgtagggatgattctttttttggtgagacctcgcataactatcataaatttgacagtgagtatgagagaatgggacgtggtcctggccccttacaagagagatctctctttgagaaaaagagaggcgctcctccaagtagcaatattgaagacttccatggactcttaccgaagggttatccccatctgtgctctatatgtgatttgccagttcattctaataaggagtggagtcaacatatcaatggagcaagtcacagtcgtcgatgccagcttcttcttgaaatctacccagaatggaatcctgacaatgatacaggacacacaatgggtgatccattcatgttgcagcagtctacaaatccagcaccaggaattctgggacctccacctccctcatttcatcttgggggaccagcagttggaccaagaggaaatctgggtgctggaaatggaaacctgcaaggacctagacacatgcagaaaggcagagtggaaactagcaggagttgtttcacatcatgggtttttcaacggagggaaaaactttgagataccagctattacagctggtagaaccatttggagttcatttcaaattcatctgattcttaaataaaaatttattgagggcatttattgaaatggcaaccacagagggattgcttcaaggccgcagtgggattattacacaaccacaccagcggttagtattttggcaagccagtgagagttcatttatcccagaagtataaaagaataaagaaacctgaaggaaagccagatcagaagtttgatcaaaagcaagagcttggacgtgtgatacatctcagcaatttgccgcattctggctattctgatagtgctgttctcaagcttgctgagccttatgggaaaataaagaattacatattgatgaggatgaaaagtcaggcttttattgagatggagacaagagaagatgcaatggcaatggttgatccattgtttgaaaaaagccctttggtttcaggggagatgtgtgaaggttgacctgtctgagaaatataaaaaactggttctgaggattccaaacagaggcattgatttactgaaaaaagataaatcccgaaaaagatcttactctccagatggcaaagaatctccaagtgataagaaatccaaaactgatggttcccaggaggctgaaaggtccaccggaaggtaaagaacaagaagagaagtccggtgaagatggtgagaaagacacaaaggatgaccagacagagcaggaacctaatatgcttcttgaatctgaagatgagctacttgtagatgaagaagaagcagcagcactgctaggaaagtggccagttcagtggggagacgagcaccgatctttgctaatttagggtgcatgttggcttctgatggggaaaaagggaaccatcagattaaagctgtggaaaaaaggtgggaagtgctttcagcaggcagccaaagaaaaagctttaaaaaggtggacaagatcgaggaacttgatcaagaaaacgaagcagcgttggaaaatggaattaaaaatgaggaaaacacagaacccaggtgctgaatcttctgagaacgctgatgcatcccaacaaagatacaagtgaaaacgcagatgggtccaaagtgatgagaaccaaggacgacttatacaattccccgatgagtatagaattgggaccatatcagcccaatgttcctgttgggtattgactattgtgatacctaaaacagggttttactgtaagctgtgttcactcttttatacaaatgaagaagttgcaaagaatactcattgcagcagcctttccttcattatcagaaatttaaagaaattttctggaataaattgggcagaagaacgcagacagaagaaggaaacttaagatgtgcaaggagatttaatgatttcaaagaaaataatggttctttgtttttaatgttaaccttttttaaatacaatactgatagttagaagaaaactattgtactcttttgttttagtggagaaataatagatgtctgttcatgtgttaagtgttatagcaaaaaaaatacacatatggttaagttaatgaatagtttttgttttatcagaatggcaacagacagaagtactttgtagagattgacttcctaagctacttaagacaacttggcaccactaagaaaaaaatgtaggaaccatttgggaaaaatgaaattttagtagttccagttttcaaagaaatgtcaacattttattccattcaataaagaacaaaaccaatagtgtttttattactttccatctgaaacattccatgttttaatctgaggccttggcaggactttcatttgggagttttggaacccgttttgggttgccatttccattttgggaggacttaattaacgtgagattggccaattggaaatgcaggtgcagtttttcggttaatgtcatgctgttgtttagggtaataaggaaatatttaagtaattgggctttaggattttgtaatttttttccctgagttcctgctagatttcgtattctagtagtcaatgtattttccggtgaaatgccaaaaatattccccattatctttgacccagtattaatttttgagatcttactgcttgtcacttgaatcccgtgattggtccatacatcctctgggtataaagcaacatttggatttttggaagtgtgtagacccatctcttcatattttcaagatgtaattttacaatttctggcatttttaaaacaggttgggccataatcctagatggcacggcttctaattcatgtacctgcacatgtgacctttgtgaacagaaatttgcatgtataatttgtgtttacttggtaactttctgggttatatactgcttatatctgtgggattcaagttactgaagtgaatacccaataaaaggaaaaccctagggccatgttaattgggttatacatgtttgggaatgttaacccaacgtatttgtccagttgtgggttttttattcgctctttaaactttggtggccatgcctttaacaattttatttactttttaaattccagtgtgaatttctaaaggactgnccg

SEQ ID NO: 132856 - DNA, 2114 bp, Homo sapiens
gcaactgcagagctgcttggagagctaagctggaagggtgcttatccctgcgtagaaacgcctgccaatgctttctcatttggacccagactccagatcgggagcagtcttatagcctggatcagctaccaagagaagttctaaaccaagaagagaaaagcatttcaatttgggacatttatttgcacctggaaatggggaatgggctgtcagaccagacttctatcctgtccaacctgccttcatttcagtctttccacattgttattcctgggtttggactgtgcctggaaaagacaactgtcttatacaaggctgcagtttcaattgaatttgtaaaataccggtaccctacccaaagggatttaacactgagaaaatttaggggtaaccttgggaaattctaaaacagtccacttttcactttctgggatgtaggtggtcaggagaaattaaggccactgtggaagtcatataccagatgcacagatggcattgtatttgttgtggactctgttgatgtcgaaaggatggaagaagccaaaactgaacttcacaaaataactaggatatcagcaaatcggggagtccctgtacttatagttgctaaccaaacaagatttgaggaactcattgtcactttccagaaattgagaaattgttagcaatgggtgaactgagctcatcaactccttggcatttgcagcctacctgtgcaatcataggagatggcctaaaggaaggacttgagaaactaccatgatatgatccattaaaagaagaaaaatgttgcggccaaccagaaaaagaaaagatgaatatcaattccctaatataatctgtgttggagtaggttttctctggtctgattttgacaaaaatagaagagtgtctacagccggggtttgcctgtctgcccctccttggatgctattaaagctttgttttgttgaacaattcagatgcccaactcgtgttgccttgtggaagatgagtaaatgcagtgcttcttaaagtggtctcttctccctaccccacaaatcgttttggtactaccatttggggaagccaagcaaggatagtaaatttgaccagaacacagttgtggggaatttggtctgaaataaatagaaataaaactttaaagagtgtctgcctagtgttttgtgcttacatctttcggggggaagcctttgcaagaaaattgcatacaaggctttgtaacgatcaagtgctaatcgatggaaatgttaaggtagattaacatatatgcagttatattgatcacattggtccaaccagtccttttttgaagtaagggacaaggagtaagtattttcttttttaagtttctgccaaatgatttttgacgctttctggaatcaagtaatttaatagtatagcttaattctagacaatgtttaagttggtctacctttattaaaaataagatatttggggtatattcaagtgcatggattagttttcctgacaaagcatgttttggtgtgtagtcttactttttagaaatagctatgcatcgttctacacaggtttaaaacaacttttttggggatttagggctattataggaatagtttgttgtcagaagcactttcacttgaagaacctaaaatgattgactcattcatagtaaatatgggcatgtaaactaataaatatgccactggatacatatatggatttatgaagaaggcgatttagtccaaggaggatgtaattaaaatatgtggtctctaaaatattcccagttacaagatatttgttttattaatatttgctggctaaaaacaaatgtggtttttatatatttttgtagtgtgttgagaagagcaaaagctttataaatatacctgatgcgctgtagaatgaaaatgtaaaagataacctgtatgtgttccgagctttaattttttgtttacaaattgaacagtgttacatgggctgtccagtcctgattatagagaggaagaaatggtaacagtatggcagataagaattccaattatagaaaatgaggggaaaataacaaacctgttttatgaaaattcactggtgctgtttacattggaataaaaagctctataaggaga

SEQ ID NO: 132857 - DNA, 1103 bp, Homo sapiens
gccgggaaaccggccttattactggagcagttatgtccattgaagattacctcaaaggcaagaattgcctagcttctcctaattatgacccggatgaccagcactcttcttggagagaagacctccctcaatttaagaaagacagggaacatctgacgttggtcaacactcgtcgtaatcggacttataacactaaactaaatcgtttcgaccctgagtattgggtagttgattacaatgccttaatggtagccaccatcattccgtatggttctaagtcttttaaagttccttgtcagtggcgtactaacaaagacttcttaggtgtccgttggatgacggaggatacctttgaccatcatctgtatcgttatgaaacagaccctaattacttaggtctgattctggcttttcgtcataaccctgatgaaccagataaattcacagttactattcagactcctgaaaaagcatatacgtatcgtctggctccatatggattcaataataaaacccgtcgatgggagtgtttggatacaaagtatggaaccaagagaacgtatcaggctgacatctttgtagctactgatgaagatattcctgaatctgaaatgacagaagtctatggcactaaggactatatcttcattctggactttgctgatttacgtacaggtgtggcatttaatggggtaactattaaccctcgtaatatcacaatgatttctttcgactgtactgaagcacatcatggtctagggaaagatgcttacattgccgccatgtataacaatgacgatggtgctactttccagatggaaattgggggtattcatactaatgctgctttagctgctggggataaactccaatgcatctggagatacttggatgttaatggtaatgctccagcagcagagaatgagttcgaagtaacagatggtcctattaaacaagtagactctgttaaatggtttactaaccttactgtatctggttccggtcgtaagcaactgggtcaacgtaaatatccacaagtagtgatgggtatgggcatgacttcaggctttgatgatggctataaccttactcctgagcgtcag

SEQ ID NO: 132858 - DNA, 844 bp, Homo sapiens
attagggagattcaattacagcttattaatgagatgactgatgttcatatgggggcattgacggcacagtacatgccggatgactttaccttcgaaccaggaataggacagattcatttcaatgttgagacttccagaaaggtttgtttagaccttgctaagtctgttcttagactggttcctgtttatccattacctactaacaaagatgctctggattttgtaagtaaagcccaatgtcagattttgaaagaatgccagaacttgggaatggagctgtacttccagattggtgagccttggtggtgggatggttcatacaatacaggtgagggtaagaatgccccttgtatttatgaccctaagactatggctttatacaaagaagagacaggtaatgatgtacctactccatggattaaagacatctttgctccagtagaagaacatcagtggccttatgtagattggctatgcaccaaactgggtcaatccactaactacatacgtgactatgtaaaaggtaagttccctgatgcacaggcaacccttctgttctttacaccacagattatgtcccctgcatctgaactaacaggtcgattaaacttccctgagtcagagtgggtattccctaactatgactttgttcagattgaagactatgattggattattgatggaagacttgacctggttccactgacatttgatgctgccgtgaatagactagggtatccattgaatgtagttcactacttcataggattcgtactgttacctgaagatgctaagaaaatctgggctgatgttgataaggcgtggggattggcactagaggcag

SEQ ID NO: 132859 - DNA, 1741 bp, Homo sapiens
atgctgggtaatgccactgccggattgagtaatgcattaggtgattttcgaaactctgcaagacagcaagctggtgatgcaattatggctgaagccatgcgttaccaagaccctaatgagtatcgtaatgccttagcttctggagcattatttgctggctatgacccttctctaatttcttctcgtactatggagaacttagataatcgtgctggcaatctgttagaccaagcatctaaacaacaaaatctggatttcactcgatacagtaatgacagaaccatgaaggtaaatgcagctactgatgctgctgcccctgcattacaggaattagctctggcttatcaatctggtgacccaagaaaggttcaggcagcacaggctcagtatggggatgtattaaaaacccttcctgctggtgttgttatggactacatgaacaaccttcaaggacagggtactgctggtattggtcaacgtcgcagcttattcaacttaggtgttgatatacgtaacgatgcggatactcaggctgctatgcagttactgaataatattcgtcgtggtgcatacagtgctgacgatgctcgtatgcttgcagagggtacgttcgaccaaatgtcaccaggagcagtaagtcgtgcactatctcagttagatagagcatatccaggtgcatatactccgggaactggttctgcatccctatctcctcctggtactcagggtactcggaatggttctgcatatgacactacctataagttcacaccaactgatgtacctattactcagatgaacttaggtgaggtggttcagcatcaagacactatgaagaagacactaggtgcttctcctgttggtgcataccagattaaccaagatactcttaaagactttgctccaaaggtatttggtgaagattggcagaacattcctatgtctccggagaaccaagacaaactgggtgaagctatttttaatgcccgtaagaatggcaatctgaagagtacatgggctgctttaccggatgatactcctggtgcttataagaacttgtcatgggatgaaatgaaggattacattgctcaagcagaaacaggtaattctattaatccattacaggaacaagcattcacttctgttgctggtaatactgttggtactcgtaatatgcagaatattggtaatactctgctgccagaataccaagctgctactgttgacccttctacgactggtcaggtggctaaacgtattattgatagcaatgaactgaaaggcattaaccaaggtgcactggttcgacaaatcaatgaggtagcaaaacagaatgctatttctcccgctatggcaggagcaatcattcaacgtagtatcaccgccgtagaagcaaatgcaaaacttgcaactactggtactgctattgaacagaatgctcgtaatcagcttactgcacaaattcaatcaaacatctatgcagcacagaatacgttagatactgcacttgctgatttacgtgaagtacagcgtcgtattcagaccggtcaggaaaaccttagaagtgtactacctcgctatcaggagcgagttaacactgctaaacgtcttcttgatggtgctcgtagtgctgtagctgctgaccctcagaatttggatattaagagcctacaaaatattaaacaggaagagagcgaggcaaaccggagaagtttaggcagagatgccggacgtcgattgg

SEQ ID NO: 132860 - DNA, 7556 bp, Homo sapiens
ctgagtgcctgcattggtaagcagagtatctacatcattccctaatttcttatctgctttaggtacaggcatttctttaatgattgaacgtagttcttcattaaccatagccagacccaggaatgtaggtaacagactggttctgcctttggcatctacttcaaccagattagcaccagagatagtgtcatatttctgttgagcgtagtaacggtcagcagggttagtactatcagggtcagccatgaaatgttctaccgtaaggtgtttcattacatgggtataaagttcctgagcacgagccatagcgtgtgggtcaattgcagcttcagttgctaatgcagcagtaaccatctggaatacagattgttcctgagcagtcatattgaagccacgagactgaacatcacgaactagtcgagtagcactcattaatgcattagccacattgccacgacgttctacttctgtaactgggtcagtacgaaggtaatcagttaccagtttatcgaaggtctgattcaactgagacagacgttcattgttaccatatgctttgctatggaacagtgtgccatctttagctactgcctgagttgtaggttggctacgcatcagaattgcagaattaaacagcagattagagaacatatcttctcccaatgcaggagcttgtttacgtccccaaatcaatttcttaatggcctgataaacatctttcaccatttgaaccagtgaagatgttctcttctgtttagcagccagagcacggttagctaacccccaagccataaactcattaagagcagcagctttagaaatagctgggtcaacaaagccattactcaaatgaccttcaatagttgcaatagcatcagcatatgcttctctcatttctggagaatctttggaaatatccagagaacggaactgttccatcagaccttcaaggttctcaatagcctgcttagaagtagggcttacttcattaccctgatagaaggaataaacttcctcgaaggtagaagcatgaaccagttcatgaatgagggtttccatagatgggctaaccagataaatggtcttatcgtcgaagttagtccagccataaatattacctgcctgagcttcttccatttcctgagaagtcaattcagtaacattcttctgacgagcatattctgcaacctgagtaggtgtaccgtagataatcttatagtctttagctgccagtgatttctgaatctctgcaagagtagctgcctgagtagatggcagattactaatcttagccaggttacgaatagcagtagcagacaggatacgaacaccggatgccttatgctcacggcctaccataccaaagtctggattcactggttctttttcagaaacaatttcttctttgacttcagccttagccttagcgactttttgtttacgggcttctaactcttcacggaaaagtatattcagttcatcagcctgttgttcaggagtcatattgctaaggtcaatcttaccgttgttctgataaggagcacctacagcagccatctggtcaatggacagatttaccttatccagtaccttatggcgaatatctacacccagtgcaatattacgtaagttacgttcaatcaaagatgcagcattagcaatatcatctacagtagcattctcacgttggtcatattccagagcagatttaccaattgcttccaatgcttcaggggacaacttgctgaaatctacattcttcatgaacttagcatatgattcgtaaacattcttaatagggttaccctgccaagaagtgtaaacagcttcattagccttacgactagcatcagtgatgtcattcaaaccaatgttcataccatcaaagattttgagggtattctttggtgcacctttcatagtggaaagagtttgcatcatcatgccatcaccagtaccaatagtcataaatggaatacctgctacaccagcctgtgctggggcatagatactcattggtacacgcatacggtcatcaaggttagtagctaatacctgatttgctacttctgcattttctgagccagcaatgtagaaagtctgagaacctgtctcaatcataggagctaagttattcagagaagcctgaatatcattcagttctttctgagtaaggaaatcgcctttcttccatgtcgggtctttagccttctctgtcagcttctcctgtactcgctgtttgaacatatcttccagcactacagattgaatctgagtagctttctgtaattgttcagtggagtacaccagactttcacctacagtctgagtaataccattacgtagtggttctacaaagaagtgcagcatattttcctgaagtgccttcagttgctcacccttaatggtataggtcttaggattgattttccctttggctcctgcacctgtggattgtagttccagtacacctttacgtttaacaggaacagtagaagtcagtgtttccatatctttcaggaaacgagcaagaagttcttcagcatgtgcttctgaagcagcttgcttaccaaacattgccatagcagcagagatgtttgggtctttagcacgagctttcagcacatcagacatacgctcatagatggcatcagtaacagaactaaccagcttacctgcaataccacgagcaccagaaccatagatggtaatagtcagcgggttcttagcaataccacgtttaagttctaaagcaccattctcaccaagattaatatccggtaggaacaaatccatcagagaaagaagactgtctatctgggactgaataggcatattagaagcatagttactacgtaacttacccaacgattccatcaaagcattagtggatgcttgatataaatcattattgtcagcagtagaacgatgctcattcatggtcttatttggagaaccaatgaacaagccccctttggcaatattacgaatccagtcaggagtaaacaggccacctgtcattagcatcatggcattgattggaccattagtaacaccatctgcttctacatacagtggggttacaaatgcagatttatcctctgctactaagtaacgggaatactccataagagccatcaatgctacgaatgacttcctatctcctaatgctgtattcagaacatcaactgcattttctggtaaggaaccagtggtattaaactcaaccatcatatcaatggctggtttcagattaccttccagtaatttagtcaactcgtcagacataacctcacgagtcatagtatggactttaatgtccaatgcctgagccagacctaactggaatgcagagaagtcttcattgttctggttcgataaatccaaagtagctttagtaggtaggatagcctcacgaaccagtttggctgattgaggattgtatttacctaacatctgcatacgaccaacacgggtcatattgtatgcatagtgaataggcacagtagagatgtcttcactctgtgctcttacctgctcaatgacggagaacagttggttgtaagagtcctctactgaacggttcttaccttccagagatttagcatgattatcattaagtaactctttattcagagtaccagcacccatcagttcgagaatacggtctttacctaacgtctcatagaattgaaccattggagtgtgtacatagaactctgtagcctgttctgctttcaatgcagccttctgttctggagtattacgaacagcagggttacgaagctgagtattagctacaggaggaatgtcatcaccaaagaacatcttctctgtaggatttactaaaacagcttcttcaatagcagtagggaagctattaattgggtcgaaggaatccagttcagtaatggtgtacagaccaatcgtcttcttattatctgggtcaatttctgacatatccacgatgttctctacaacatcagtagactctacaaatgcagccagaatttcagcagccattgcttctggcagcagggcttggtcaataccagtaatagcagcaacatcttttgcatctttgatagcagtattgctggtagcagtaagtctccactgaagacccgctaatacagcagtctgtagcaattgctcattgtacttaaaggtatccccatcctgttcaacgatgttaagtaacttaccgcctacccaacggttggcttctgtaccctgagcaaaacgtttaccaacatccttagtgttaaggaacttagccagacgggaacgaagaatatcagcaataccttccccatgttccatgagttctttatatcgcttaataacttccccattaaaagcaggattagcaacttctttctcagtaaagagttcataacgagcacgagaagacagagcttgagctacctcttttagaggtgcttctgaaccaacagtacgggatttctgttcttccggtaaggtaaaggacaatttgaaatagttcttaataccctctgctttagaatcagcagtacctaccaatgaggggtaaacagcatcgataccttctcttaattcttctgtaactgtgctttcttttgcagaagtttcagtttctttaacagattcagtaggttgcttgatggtgtcctcattagtaaggttaacatcccgtttttcagactggctcacaggttcttttatagcctgtggtctagactctttagtagtaggttctgttttaacaggttcactaacaggagtcttagtctgtacagtagatgtaactggttcctgttttgtaacaggagtttctttaacctgattcacggagtcagctttctgttgagaaaaagcaacgtctcgattgccttgacggaatgccttgaccacctcagcagcaggggcgttaagacgtgaatccaatggagtaacttttatatgactgaccttcagttccgggtaagccgaagcgagggcattagcaatatccgctaccgttttcgcttcaagagcaacttgctgggcaaatttaaccgacttagtgtcatagggattgacccccaatccggtacggctacgaacccattctctgtcagcagtaagagcttggtagtggacagacttattcttatccgcattccccgtaacaagatgctcattcaacgctccaaccttattctgcatgtgctgggcgaactgcataaagtcgttcaggtaagcggaggccaactcgaaattaccagagttatacgcagaccgaatcctattcgcatgttgcaacgcagagtattgtccttcctgagttctgctctcatccgttttaatctgtttactcacaatgtcttgaggacgtaatccaagacgggcagcttctgcatcatattcccgtgcccccttcaggattgcagcagcattctgaagggcagcaatttggcgattattcagtttaatacgaccatcagcagcatgtttaagaacaacatttacagattctggattgagcttttcaggagctacttcagcagctaatgctacgttctgcatttcctgtggactggattcttcagtcacatccaaagaaccattctgggcagattcattaatcattcgattaataacattcagtgcaccaattacttttggtgtgttctgaatattagctgtcagatttgtataacgattgagtaactcaatagccggagaatctttaggaatactatccagtgcagcagggtcacggttaatgaattgctcaaactctgaaacagcatcatacatataagatgcagcttccatcagtgcttgaggattagattcatctaatgtgttaactaggtctgctaacttttgaataacctgtacttggtcagtagaaccagctacagcattacgaatatgctctggtgcttcctgataattttcaggattaaaacgagtagcattcattaagtcagaaacatactggtgtgctgcaactttctgttccggagtagcatcagttgcttcaacagcatcacgaatagtaacttctgcttctggtgcttgagccatagcttcttgtgctgcctgtgcaacatagtcatcagcaacaggagatgcttcttcattctgcttcataacccgctcaccacgagctaccaaagtgttcttaataggggaaacaaccttacctgctacactaccagcagctttaacaccagccattgtggtacgcaatacaggagcagttgcagcacctgctaaacgagcagcaccagccggagcctgtacaacaccagcagaaccaaagccataaagagcacctaaaccagcttgtgtaccgacacctttaagcaggtcttggttcttatcaatgttttgttgctgtgcaatattctgagccagttggcctgtagcaccctgaacaccttcttccactgtttcacgggcaaggttcatacctacagcacctaaagaaccagcacggaaaggagccatctcaaaacgagataccagaggaccagttgcagcagcaataggtaattgaatagcagcagcagtaagaccagtttcagatgcagtctgacgacgagcctgttctggagacataccatctttaatatgttgttgataaacaggagacttctctaagtctttaagactcatcttcataatttcatcagcagtttgttggtatgcaccaccagcttccattgcaccaacaccaactatacctggtgcagctctgcctacagtagaagcaatacgagccagggactgagtaccagtacctgcatcaatagcaccagccaatgcagcactacgaagagtatttgctggaacaactgctttacccagtaaagatgcaccccttaatacaggaccagcacctaatagagaacctaccccttctgctaacccatcagaaataatggagtcagtttgggcagcgttctcaattgaacctacaaaatcacgtccaaatttagataaggaagctactatgtcattagtgccttctttcttatctgtttgatactgacgttcactctctacttcactcattaagttacgagcagcaaagagcttacgtttatcttgtaatgcttggctttgggtagcatggacagcatcattaaacttactcaattgttgagcaacaacagcacctgcatcatcgttgagtaagcctgccccaagagcaccaatgcccccaagggtattaacaaaaccaagaccaacaccagtagcaatatcccccagttcttccccaggagttcttgtagtaactgaatcattgaatacctggttccctgcatcagcacgagcgttgataagttgtaagccttgctcaaccccatacttattcatgatttgcattggagtcagattcatgaaatctgattgcactgtccctggttcaaatgcattagccccaacattaccagtacgggcagcttgcatttgataagcagcatcaggagaaacaagaggagtagtgacaccttgttcagctttcttctgggcggttgcagtagagacgtcaacttgctttgcattggttacgctgt

SEQ ID NO: 132861 - DNA, 6764 bp, Homo sapiens
ttagtgggtaaggttgaaccaaggattgagggttggtgctcttagtccttgtccgaagcctaatgaataatccagtcttccttcagccagcatggttaacatgttgtcctgaattggcagacctacattaccaaacatggcaggagcaggtactactgtagcaatcagagaatgtactgggttgtttctaatcatgctcatagcaactttaatggaacgaatcttaaagttgtagaaccacatcagacccatgctttccatataaccacggaaacgaccaggcaatctgtcatagttaacaaactcttcagttacttgacctaatgcttcagaagaggatttcttcttacgtttcactaaatcatcatagatgatggctttagcaatgaagtccgaatactctactgttttctggataccctggaacagagcagtgtccttagcaataagagcataacggccagcattacgtactttttctggaagtttattagcaagtttttccatgtactcatgaatcttaccttcagctactaacaggtcatcacgactaataccagcatcagcaatagaagagaactcacctgcttcaatcaaaggccagatgctcatacgacgatggctatcagtaatagattgaatctcggttttaagtttacgaaccagattaggattgccttcagcagcacgtaattctgcttctgcatcaatctgacgtaagcgagatttaatgtactgattaatctctgacgtcttacgaggaatattcacagcaatatccttaacaggaacaccacgtccaatcatctggtagatgttagcaaggaagttaactgccggtactacaacagatttaacaacaattactgtcttagcatccttcaccaagttctgaatggtattttcagcattcattactacatgatatgccttattaccaaatgcaccgaggaacatcttcttaacagtatcaagggtgctaggtgaccaacgagagttaccagtccatacatcaccaatagatgcagcacgatagccaagtgcatcattcagcatatccctacgaacccataactcatctttaccaaagagttcttcggccttatggcgagtctcaatgttcatcaggttaattgcatcagccagtactgggtcatcaattttacctaacaggtttacatattgagatttattagcactggagtctttaatgtctttctcatacatagcatgtaattgctcaatgagaatgtcattaaaacgttgtgctttagcctcttccacctgacgaccacgccatacacccaccatcttagcaaagtgattgtcttggtttagatgcttcaacatattagggtcgacggattgctcataagcaactacctgacctttgctgttataaattggcatcagcggttcacgtccacgttcacctttagccagagctttggtaatacgctctacggttggtttgtcagtaatacgaccagcaaccatagtacctaacgtaaagcctgtaccaatatccacaccaccagcagtattacgaacgttctgaagaataccttgagagtatggggcacgggcagctactgggctgaagtaataacctttagaaccagtacgtaaaccagtgcttccctgataagtaccaatacgagtaaaagattggctatttaacttagcaaactctttatcgtcagcaataatcaaattcacaccttgctggttctctacagggatatagcccttaaagtgattcagcaaagtacggttatcacctttagctttacgcatctcttcagtacgttgacccaccatataagcaatggagaactccataccctccacttctgattgagccaattctgacaaaaggccacggtcagacttattcatcaattccagagagtacaaagtaatgagcttatcaatagcagctacatctgccacaggaccattagtaatacgttcacctaataaacgactaatagcatgggcattacgaaggaggttattacctacctcccctgtaatcatgtattgagccagttgcttagatttcttctgaaccagattccagtttctacctgcttggttctgaatctctttttccagagtagagatttcatctttcactttcttaggtgaagagagtaaatctctaatttcagccatgctcatagtttcacgtagaacagctaaatctgttttacctaaaccagtatgcattgcagaccactcggtatcagtcagtttacgggaaaacttaccagcaatgactgtaggtaaatgctcacggaattgttgacggtcttgagaaatctggctcttaaccaatttgattaagtcatagacattggcattagtcttagtacggccaacaatgtcattaactaagtcatggaaaggatgccatactttaccctggttcatagcagtcataacaccctgagccactatctcaccttgtttgtcagatgcaatagcagcagtcagtctagccagatgagcaacacctttagcagctacattagaaggattagcaattaccttatctgccttctcaataacagtttcagataaccgttcaatgctatctgttacgtactgattagcacggtcaatgaaattaccggtaggggttgctacagcatcatagaaggactctcgtttcagagcagcagccatgattgtttctgacagagcatcaatactgtcctgaacattagtagctttctgagtgcctgcattggtaagcagagtatctacatcattccctaatttcttatctgctttaggtacaggcatttctttaatgattgaacgtagttcttcattaaccatagccagacccaggaatgtaggtaacagactggttctgcctttggcatctacttcaaccagattagcaccagagatagtgtcatatttctgttgagcgtagtaacggtcagcagggttagtactatcagggtcagccatgaaatgttctaccgtaaggtgtttcattacatgggtataaagttcctgagcacgagccatagcgtgtgggtcaattgcagcttcagttgctaatgcagcagtaaccatctggaatacagattgttcctgagcagtcatattgaagccacgagactgaacatcacgaactagtcgagtagcactcattaatgcattagccacattgccacgacgttctacttctgtaactgggtcagtacgaaggtaatcagttaccagtttatcgaaggtctgattcaactgagacagacgttcattgttaccatatgctttgctatggaacagtgtgccatctttagctactgcctgagttgtaggttggctacgcatcagaattgcagaattaaacagcagattagagaacatatcttctcccaatgcaggagcttgtttacgtccccaaatcaatttcttaatggcctgataaacatctttcaccatttgaaccagtgaagatgttctcttctgtttagcagccagagcacggttagctaacccccaagccataaactcattaagagcagcagctttagaaatagctgggtcaacaaagccattactcaaatgaccttcaatagttgcaatagcatcagcatatgcttctctcatttctggagaatctttggaaatatccagagaacggaactgttccatcagaccttcaaggttctcaatagcctgcttagaagtagggcttacttcattaccctgatagaaggaataaacttcctcgaaggtagaagcatgaaccagttcatgaatgagggtttccatagatgggctaaccagataaatggtcttatcgtcgaagttagtccagccataaatattacctgcctgagcttcttccatttcctgagaagtcaattcagtaacattcttctgacgagcatattctgcaacctgagtaggtgtaccgtagataatcttatagtctttagctgccagtgatttctgaatctctgcaagagtagctgcctgagtagatggcagattactaatcttagccaggttacgaatagcagtagcagacaggatacgaacaccggatgccttatgctcacggcctaccataccaaagtctggattcactggttctttttcagaaacaatttcttctttgacttcagccttagccttagcgactttttgtttacgggcttctaactcttcacggaaaagtatattcagttcatcagcctgttgttcaggagtcatattgctaaggtcaatcttaccgttgttctgataaggagcacctacagcagccatctggtcaatggacagatttaccttatccagtaccttatggcgaatatctacacccagtgcaatattacgtaagttacgttcaatcaaagatgcagcattagcaatatcatctacagtagcattctcacgttggtcatattccagagcagatttaccaattgcttccaatgcttcaggggacaacttgctgaaatctacattcttcatgaacttagcatatgattcgtaaacattcttaatagggttaccctgccaagaagtgtaaacagcttcattagccttacgactagcatcagtgatgtcattcaaaccaatgttcataccatcaaagattttgagggtattctttggtgcacctttcatagtggaaagagtttgcatcatcatgccatcaccagtaccaatagtcataaatggaatacctgctacaccagcctgtgctggggcatagatactcattggtacacgcatacggtcatcaaggttagtagctaatacctgatttgctacttctgcattttctgagccagcaatgtagaaagtctgagaacctgtctcaatcataggagctaagttattcagagaagcctgaatatcattcagttctttctgagtaaggaaatcgcctttcttccatgtcgggtctttagccttctctgtcagcttctcctgtactcgctgtttgaacatatcttccagcactacagattgaatctgagtagctttctgtaattgttcagtggagtacaccagactttcacctacagtctgagtaataccattacgtagtggttctacaaagaagtgcagcatattttcctgaagtgccttcagttgctcacccttaatggtataggtcttaggattgattttccctttggctcctgcacctgtggattgtagttccagtacacctttacgtttaacaggaacagtagaagtcagtgtttccatatctttcaggaaacgagcaagaagttcttcagcatgtgcttctgaagcagcttgcttaccaaacattgccatagcagcagagatgtttgggtctttagcacgagctttcagcacatcagacatacgctcatagatggcatcagtaacagaactaaccagcttacctgcaataccacgagcaccagaaccatagatggtaatagtcagcgggttcttagcaataccacgtttaagttctaaagcaccattctcaccaagattaatatccggtaggaacaaatccatcagagaaagaagactgtctatctgggactgaataggcatattagaagcatagttactacgtaacttacccaacgattccatcaaagcattagtggatgcttgatataaatcattattgtcagcagtagaacgatgctcattcatggtcttatttggagaaccaatgaacaagccccctttggcaatattacgaatccagtcaggagtaaacaggccacctgtcattagcatcatggcattgattggaccattagtaacaccatctgcttctacatacagtggggttacaaatgcagatttatcctctgctactaagtaacgggaatactccataagagccatcaatgctacgaatgacttcctatctcctaatgctgtattcagaacatcaactgcattttctggtaaggaaccagtggtattaaactcaaccatcatatcaatggctggtttcagattaccttccagtaatttagtcaactcgtcagacataacctcacgagtcatagtatggactttaatgtccaatgcctgagccagacctaactggaatgcagagaagtcttcattgttctggttcgataaatccaaagtagctttagtaggtaggatagcctcacgaaccagtttggctgattgaggattgtatttacctaacatctgcatacgaccaacacgggtcatattgtatgcatagtgaataggcacagtagagatgtcttcactctgtgctcttacctgctcaatgacggagaacagttggttgtaagagtcctctactgaacggttcttaccttccagagatttagcatgattatcattaagtaactctttattcagagtaccagcacccatcagttcgagaatacggtctttacctaacgtctcatagaattgaaccattggagtgtgtacatagaactctgtagcctgttctgctttcaatgcagccttctgttctggagtattacgaacagcagggttacgaagctgagtattagctacaggaggaatgtcatcaccaaagaacatcttctctgtaggatttactaaaacagcttcttcaatagcagtagggaagctattaattgggtcgaaggaatccagttcagtaatggtgtacagaccaatcgtcttcttattatctgggtcaatttctgacatatccacgatgttctctacaacatcagtagactctacaaatgcagccagaatttcagcagccattg

SEQ ID NO: 132862 - DNA, 1174 bp, Homo sapiens
ttaacgagttaagcgattagctgcaatgtaagcatcagccgtagattggtcacgattttctgcaacagcacgactacgagcacggtcttccagagcagtgttataggacttaatctggttattcagattagtgttagtaacatctttagcaaaagagaactgattcttagctaacttgttagcctgtaatgcaccatagatattacccagtgcattaagaccacctaaccccaactggaatgtaggaatgttcagacccagttggtcagtaagcccttgagtctgcccaccggtattccctgtagcaccaccagtaatattctgaagccagtcattactaaggatgccagattgcatagggttatagttcatggttggggtattaaaggaaccatacccatagccaaaattgctattagttaggttcattgcgtcaatgtaacccatgccctcagtgccaaacatttcctcgtacttttcctgaatggtttttatctggtcacggtactctgccataagtttctctgtctttttgacagtttccatagcagaagcattgatgtaatcacttatgccatttcctacagatgaagtgagtttaatgatgttgtctgctttcatcatttcacccagcatcgtagacatggatgaaccagtggataaagctgtgccgacattcatggctaccatagaggcaatagtagcaacaatgattccaatcttatccccaagcagactaacagagactgtttgaataatggacatcagaatcatagctgcaatggcattagccacagccccaacgataatagcagctaaccctgcaaaacctaatgcagcaccaatagaagcagcagtacccattaccccagcaccagcagcaggagtaaagaacacagacactactactgcaacaacaaccactactactttaaaaatgccagactgataccatttcttcttaactttcttatatgagttaagaaccagataacaacatgcagtagataactgagtaccatttaccaaagacatactacgataaatgttgttatgaagagggatgataaatccggactcttcatcatcatttagtgcatctacaccagaaatgcttacagatttattcttgtaaacattattgttatggttcaggccatagacagaaatcttc

SEQ ID NO: 132863 - DNA, 1698 bp, Homo sapiens
gtgattttcgaaactctgcaagacagcaagctggtgatgcaattatggctgaagccatgcgttaccaagaccctaatgagtatcgtaatgccttagcttctggagcattatttgctggctatgacccttctctaatttcttctcgtactatggagaacttagataatcgtgctggcaatctgttagaccaagcatctaaacaacaaaatctggatttcactcgatacaaaaaggttcaggcagcacaggctcagtatggggatgtattaaaaacccttcctgctggtgttgttatggactacatgaacaaccttcaaggacagggtactgctggtattggtcaacgtcgcagcttattcaacttaggtgttgatatacgtaacgatgcggatactcaggctgctatgcagttactgaataatattcgtcgtggtgcatacagtgctgacgatgctcgtatgcttgcagagggtacgttcgaccaaatgtcaccaggagcagtaagtcgtgcactatctcagttagatagagcatatccaggtgcatatactccgggaactggttctgcatccctatctcctcctggtactcagggtactcggaatggttctgcatatgacactacctataagttcacaccaactgatgtacctattactcagatgaacttaggtgaggtggttcagcatcaagacactatgaagaagacactaggtgcttctcctgttggtgcataccagattaaccaagatactcttaaagactttgctccaaaggtatttggtgaagattggcagaacattcctatgtctccggagaaccaagacaaactgggtgaagctatttttaatgcccgtaagaatggcaatctgaagagtacatgggctgctttaccggatgatactcctggtgcttataagaacttgtcatgggatgaaatgaaggattacattgctcaagcagaaacaggtaattctattaatccattacaggaacaagcattcacttctgttgctggtaatactgttggtactcgtaatatgcagaatattggtaatactctgctgccagaataccaagctgctactgttgacccttctacgactggtcaggtggctaaacgtattattgatagcaatgaactgaaaggcattaaccaaggtgcactggttcgacaaatcaatgaggtagcaaaacagaatgctatttctcccgctatggcaggagcaatcattcaacgtagtatcaccggtaaaccagagggatggtttagtggtattcgaaatgcctttgatactgatgttattgatttgggtggtgattaccaactggataaagcagccgtagaagcaaatgcaaaacttgcaactactggtactgctattgaacagaatgctcgtaatcagcttactgcacaaattcaatcaaacatctatgcagcacagaatacgttagatactgcacttgctgatttacgtgaagtacagcgtcgtattcagaccggtcaggaaaaccttagaagtgtactacctcgctatcaggagcgagttaacactgctaaacgtcttcttgatggtgctcgtagtgctgtagctgctgaccctcagaatttggatattaagagcctacaaaatattaaacaggaagagagcgaggcaaaccggagaagtttaggcagagatgccggacgtcgattgg

SEQ ID NO: 132864 - DNA, 938 bp, Homo sapiens
gaggattggtgtggcaataagtaagaagaaggttggcggtgttggaggggttattgcagcaatcattgctgctgtatttgctgttgagggtggatacgttaatgaccccaaagacccaggaggtgaaactaatcatggtgtaactattcaggttgctcaaaagcataagcaagaactagagtcgatgtataactgggatggttcaatgaagaacttaactcaggaaatggcatcaagtatttattacaacgattacatcttgaagcctggctttgttaagtttgcagatgtatcaccagcggtaacagaaaaactagtagatgctggtgttaatactggacctgcaagaccatctcgttggttacaagaatctcttaatgctttctccagaaatggcaaagactaccctaaaatacaagttgatggtaaagtcggttctggaactctaagtgcatataaaagccttcagaataaacgaggcaaagtagaagcctgggtagctctgggagctaccctttttcttcttggttcacaacatggtgaaaagaaagttcaagcactatgggatgaagataagaaggagtactcaaaagaacttgatagagtaaaactggcttatgaccaaaagaatcgggaacacagttatgaagtcgggcaacttacccttcgacttgataaagccaaagagtcttatgaagtcgttattgattctattactaaccagtacaatagtcggttgctccagtcagaaaaacgagccgagagttataaacgtcaagcctcaaccggaaccactcaatgcctcaatcttgcaagccatgcagccagactcgactcaagtcttgaagaaggcagacgtttggttgaagaactcagggcaactgttagactccgtgataaccaactgattgaactggggaaccagattcgttctgacc

SEQ ID NO: 132865 - DNA, 410 bp, Homo sapiens
ctccctacagatgctgtcataaaaggacagatactctgctgcctttgctgaactctctgggtatttcagagaagtgtaataacggtaagcaatgtaggcatccaaagctgggtcaagggtatcaggaatgtctatctcattatagccatcctctgctgtagacagtttaggatgtttagcctgatacattacgttcaatactccccatgcttttggagcaattgttctgtagaacgtttggcctgctaagtccataatgaagggacacttcacttcatttgggtcataagactgaacagcatacttagctagtaatgggtagttggttctaccttcttgcatctcaacaaccacgttgttgttacgcatgttgaagcgaccatgcagacgagtcagtgcctcattagcag

SEQ ID NO: 132866 - DNA, 1692 bp, Homo sapiens
cttccgtggtgttaaattcactgaatttaacctgaacacgaccgacatctacgattagagaaccataaggtactttatagattccgtgcataccacgagagtacatgatacccataccttccaatggggcatcaagtaaagaaccatctggtttagcaatcttcaatacgaaggaactatcagtatgactcttcagttgtgccgtaagctgagtaccatcggtaggtaacagtaagctaaatgtaacagtagaatctatgataagagtactgtgatataccgttaactcaccagatactgtatcgaatgcacaataagtacccgaatcccaatcagatacagcagcccaaccaccacctgaatatttcagttgtgcttctgcttcaccaaccataaccagtacagcagcccctgccgtaacactggagaatcgtggggtcagtggagccttgcctgtaggggtaatgaaagtcatcactggttctacagtctgaaggctaggtggatatccaagagtgatgccaccatatgcatctacattcagagtcactgcactggaaggcatgatacgggtattcacaccggagattgctttagcagttaggtctgctttaaaacggagtggggcagtaacagatacagtagctgtattgtcagtagtagatgcacccataatcaggccatccaatgccatttgttgactaggtgctaccaacaaaccactaactttaccggctttataattaagaaccaggttagctactgcaccagcagtaggggcattcatgttgatggaaccagtagctaacgaccatactccaccagtagaggtcagtttacctgctacagcataaccacctttgtcattatccatagtaataagctgacggagcattgcacctactgtattagctgcataagtctgtgcctgattaaagccaatcagacctgcaccttcagcagtagcatacttttcatggtcagcaatgattgtgtctagctgctctgcaatggtaactaagtcacctaatctggcatgtacagctaatagttcagtcatgtgattatccaaatcaagcagtgctgccatattggtattcacattcttaatcgcattgatattagtacttactgtattaacagcatcaatggaaccagcaacggtattcacgttggtaatgctattagcaacagtaattactttatcaatttgagcagaaacaataattactttagcaatatcagttgctactgtattaactgcgtcaatgttagaagctacagtattgattggagtcaggttgtcatagaccctcagcaatgcctgaagattgtcatatagaccagtcagtttagataattgattgtagagttcctgtaacttatccagattattatgaataagttgtagttcatctagcttagtgtagatagcagatagctcagttaactccctacagatgctgtcataaaaggacagatactctgctgcctttgctgaactctctgggtatttcagagaagtgtaataacggtaagcaatgtaggcatccaaagctgggtcaagggtatcaggaatgtctatctcattatagccatcctctgctgtagacagtttaggatgtttagcctgatacattacgttcaatactccccatgcttttggagcaattgttctgtagaacgtttggc

SEQ ID NO: 132867 - DNA, 595 bp, Homo sapiens
ttaattaatggtgtcttcattacacctctccagagggacattaccaatacgattagcaatccatcctgtagtgtactcaggcatattaagagataaatagtagtttaactgtttaccatctagagccttcaaaatgagcttacaggcttctactttgcctcgtttattctgaagggttttatatgcacttagagttccagaaccgactttaccatcaacttgtattttaggggaggctttggcatttctggagaaagcattaagagattcagcatctactagtttttctggtaccggtggtgatacatctgcaaacttaacaaaggcaggcttcaagatgtaatcggtgtaataaatacttgatgccatttcctgagttaaggtcttcattgaaccatcccaggtatacatcgactctagttcttgcttatgcttttgagcaacctgaatagttacaccatgattagtttcacctcctgggtctttggggtcattaacgtatccaccctcaacagcaaatacagcagcaatgattgctgcaataacccctccaacaccggcaaccttcttcttacttattgccacaccaatcctc

SEQ ID NO: 132868 - DNA, 209 bp, Homo sapiens
ctcacgagtagttagttgttctgtggttatcttctctatctctgcatagatagggctattaatgccaccaggaatatcatactcactgccagacatgtcgatgtcaggaagcgtaaaatcctcacctttggtaactcgaatgttcaggaacttacgttctttgaggaagttataaatacagtaagggatgtgatagccctcatcagtag

SEQ ID NO: 132869 - DNA, 932 bp, Homo sapiens
cagaggaccagttgcagcagcaataggtaattgaatagcagcagcagtaagaccagtttcagatgcagtctgacgacgagcctgttctggagacataccatctttaatatgttgttgataaacaggagacttctctaagtctttaagactcatcttcataatttcatcagcagtttgttggtatgcaccaccagcttccattgcaccaacaccaactatacctggtgcagctctgcctacagtagaagcaatacgagccagggactgagtaccagtacctgcatcaatagcaccagccaatgcagcactacaaagagtatttgctggaacaactgctttacccagaaaagatgcaccccttaatacaggaccagcacctaagagagaacctaccccttctgctaacccatcagaaataatggagtcagtttgggcaggggtctcaattgaacctactaaatcacgtccaaatttagataaggaagctactatgtcattagcgccttctttcttatctggttgatactgacgttcactctctacttcactcattaagcgacgagcagcagagagcttacgtttatcttgtaatgcttggctttgggtagcatggacagcatcattaaacttactcaattgttgagcaacaacagcacctgcatcatcgctgagtaagcctgccccaagagcaccaatgccctcaagggtgttaacaaaaccaagaccaacaccagtagcaatatcccccagttcttgcccaggagatcttgtagtaactgaatcattgaatacctgggtcccattaccagtacgggcagcttgcatgtgataagcagcatcaggagaaacaagaggagtagtgacaccttgttcagctatcttctgggcggttgcagtagagacgtcaacttgcttcgcattggttacgctgt

SEQ ID NO: 132870 - DNA, 1107 bp, Homo sapiens
atgtccattgaagattacctcaaaggcaagaattgcctagcttctcctaattatgacccggatgaccagcactcttcttggagagaagacctccctcaatttaagaaagacagggaacatctgacgttggtcaacactcgtcgtaatcggacttataacactaaactaaatcgtttcgaccctgagtattgggtagttgattacaatgccttaatggtagccaccatcattccgtatggttctaagtcttttaaagttccttgtcagtggcgtactaacaaagacttcttaggtgtccgttggatgacggaggatacctttgaccatcatctgtatcgttatgaaacagaccctaattacttaggtctgattctggcttttcgtcataaccctgatgaaccagataaattcacagttactattcagactcctgaaaaagcatatacgtatcgtctggctccatatggattcaataataaaacccgtcgatgggagtgtttggatacaaagtatggaaccaagagaacgtatcaggctgacatctttgtagctactgatgaagatattcctgaatctgaaatgacagaagtctatggcactaaggactatatcttcattctggactttgctgatttacgtacaggtgtggcatttaatggggtaactattaaccctcgtaatatcacaatgatttctttcgactgtactgaagcacatcatggtctagggaaagatgcttacattgccgccatgtataacaatgacgatggtgctactttccagatggaaattgggggtattcatactaatgctgctttagctgctggggataaactccaatgcatctggagatacttggatgttaatggtaatgctcaagcagcagagaatgagttcgaagtagtaagctatgaaggctttggtacttctaacttctctggtaaatgcaaaggtatgctcccagactctgttaaatggtttactaaccttactgtatctggttccggtcgtaagcaactgggtcaacgtaaatatccacaagtagtgatgggtatgggcatgacttcaggctttgatgatggctatacccttactcctgagcgtcag

SEQ ID NO: 132871 - DNA, 355 bp, Homo sapiens
actctgttaaatggtttactaaccttactgtatctggttccggtcgtaagcaactgggtcaacgtaaatatccacaagtagtgatgggtatgggcatgacttcaggctttgatgatggctatacccttactcctgagcgtcaggttgctattcacttcatgtctggtgcataccctgaccgtggctatgatgtattccagaagtacatgactgaaacttggggcattaactatgcaggtgtacgccctattaatgggacaactggttctactgctgtagaccgtgcatgtgcagttaatcctgattctgaagtatttgaccctacccaatcatccgatgcaggtggtctttggtg

SEQ ID NO: 132872 - DNA, 1400 bp, Homo sapiens
agcaagtaggtaagctcaagcctaaagctattattggggggcaaggtgaccaagatgccactgctttggcatatccaggtgaccgtgacccagcaccatcattaaccagaaccaagcaagctactaagaaggtatttgagtatcttcgtagtttgtatggacagattcctatcttcattcaggaactgagctatgcatggggcatcactaacactgatgaacctaatgtacctattcgtacaggattaccttctttcctggcagcccgtcgtaatacatggggagatattgagttccgttggaagtcttacggattagaccctgcattagctcaatatcgtattgaaatctataacccttctaatttgaaccagatacttcactcatttgtagtatcaggtactcaagaagcaaatggttatgtatatgctgacttcactgtagaagactggattcctgtaatgatggaagcggttggttctcctaatccgtgggagttcatgaagtggcgagtagtttgtctgtatcaggaaagagaaattccttcagcaccttggtcagataacattcctttggataatgcagggcttgttaagaagaccattctggtaggtattaaccagtttggtggtggacactttactgatatgtctgacccaactgctaccacagctaatggtgcaattggtcgtaaagacaaggtatctgcttctacgttacgtctgacttttgcagagaaagctggattacgtcctattcaggtaatgcctattaacgtagctgctgatagtgcagctactgttactgtacgtgataaacagattcagatggctacagctaatataggctttaaactgggttcctttgttcctggttctaacctgtacactgcgtaccgtaatgtggaatccagttggatttactacacggtagaagcattccatgccacagccattgagctaggtgaagcactggctcttaatgttaaccgtgctactaatccacctgattggtcttacttgcgcccaccagcaaatctgcaaggtcgtaagttagctactcgtgatattaagatgacatgggataaccgtgctgggattacccactggaagtatgctaaccgtcatgtcaccacaggggcagaaatctcttctggtatcctcaccagtcccgagtatgtgtttaccctgaatgaccagcaaaatgcttataacggggacactcttaatatgagtttctctgtttctgagtatgctgctgattctggtgcagtaggtgcatcttcttcctttgtaggggtagtccagaatggttcctatatgcagactcctagtcaactgaaagctgctaaacagcttaatggtgacattatcttcacttgggtaggacgtccttcatga

SEQ ID NO: 132873 - DNA, 1540 bp, Homo sapiens
atggaagcatgtatggctaatgctgtgcaattcctcaccactaaagaccaggcttattggaatgctgttactgctcaggtagctgcaattactgctcgtgctaatcttggtattatcaaagctaactttgttacagctaagattcaggctctggctactaaagctgaatatgcccttactaagctgaagctgtctaatgagtcagtaacttactgtactgctcaatacaatctatcctctatgcttcctcaacaattactgatgttgaagaaccagaccactcaggttgctgaacagactaagttaactactgaacaaatcaatatgacgaaagagcagaaggaagcacaacgtgctcagacttctgatactcgtactgatggtactcgtgtagctggttctgtaggtaaacagaaagaactctatgaccaacagattacgtcttataaacgtgatgctgaagttaaagctgccaaactgtttactgatgcatgggtcactcagaaaaccattgatgagggtctgtctcctcctaatggcttcactaacaccagtctggatagcattcttactgcattgagaataacaacgcatgcgggggatatacataaacgtcccaattatttcaagactacggtgattggtaccatcgtcagtaaatctgactttagtatgggtgataccatcactaactcttatttaaatggacctggtattcgtttacgtagattccctggttggcctgcacctaactatgacccttcaattggtattgcttatgggaccttgtcaatactgtctcagatagaccctgaagtagttaaatgccaagttcctcaaaaagcaggttatgaggtacaggttcagaccagtaggattggatttggtgattttgaggaatgggctgataaattcctctatgagaattatccaggccgtattactgaagagtttgaaatagacatcatggatgatgccaggattgtactcactgctactgatggtagtgagttatccttttatccagagaattacagtcaggatgcaatgtatctgtatgtgaactattactacatacagcctactagtgttgcagacccagtggttcatcctgctgtatctgtaccatctgctgatgacttaccttctacttctgaatggactcaggtatctcagccccatactcctaagtcagctaccctgaagccagttactcatattaagagtgtattctctgatggcagacctgatgaggaaagtaccaatactgaagaagaacaggttagttggactaacttctcagatgtttacgagaaagaatttcgtgaaccaagtgaagtaggcttaatcattattcgtaagactacaatgacccaggtacagactggtactgtatctactggttccactacaaacactgaagttattgatttaggtggtggggttactgaaaccagaactactacagtaactacagatactttaggttatacatggtcttatcagaatacagatgtagttactactatgtctgctggtg

SEQ ID NO: 132874 - DNA, 549 bp, Homo sapiens
atgattaacaatgtgacccaagaccagacagcagcagagcaaattagaaataactttgtgacttatgctggggtgatgaaggatggaaagtttaagacccaggattatcttaatgctgttcaatatgttacttacaaacacatggggtatagcaacaaagatgcttacttcaaaacattccccaacagacaagctgaattagtagcaaggggaaccagtgagaaggacatctctgcttatgtatctgcttaccataggggatttgttcaggaagcattgaaccatcaggcatggctcatgaagaatgctaccagtgagaaggtacagtgtgatgctgccaactctatccttactcacctccagaaaccgaaggatgctgttactaatatcaatctggatttgagagaaaactctggattgactgaactcaagaacacactaacccagttggctgaagctcagaaagcagctattgaagctggtacacctactaaagtaattgcaggttccacactggttcgagaagacgaggatattattgatgtctga

SEQ ID NO: 132875 - DNA, 2717 bp, Homo sapiens
agtctgagtaatagcattacgtagtggttctacaaagaagtgcagcatattttcctgaagtgccttcagttgctcacccttaatggtataggtcttaggattgattttccctttggctcctgcacctgtggattgtagttccagtacacctttacgtttaacaggaacagtagaagtcagtgtttccatatctttcaggaaacgagcaagaagttcttcagcatgtgcttctgaagcagcttgcttaccaaacattgccatagcagcagagatgtttgggtctttagcacgagctttcagcacatcagacatacgctcatagatggcatcagtaacagaactaaccagcttacctgcaataccacgagcaccagaaccatagatggtaatagtcagcgggttcttagcaataccacgtttaagttctaaagcaccattctcaccaagattaatatccggtaggaacaaatccatcagagaaagaagactgtcttccagtaatttagtcaactcgtcagacataacctcacgagtcatagtatggactttaatgtccaatgcctgagccagacctaactggaatgcagagaagtcttcattgttctggttcgataaatccaaagtagctttagtaggtaggatagcctcacgaaccagtttggctgattgaggattgtatttacctaacatctgcatacgaccaacacgggtcatattgtatgcatagtgaataggcacagtagagatgtcttcactctgtgctcttacctgctcaatgacggagaacagttggttgtaagagtcctctactgaacggttcttaccttccagagatttagcatgattatcattaagtaactctttattcagagtaccagcacccatcagttcgagaatacggtctttacctaacgtctcatagaattgaaccattggagtgtgtacatagaactctgtagcctgttctgctttcaatgcagccttctgttctggagtattacgaacagcagggttacgaagctgagtattagctacaggaggaatgtcatcaccaaagaacatcttctctgtaggatttactaaaacagcttcttcaatagcagtagggaagctattaattgggtcgaaggaatccagttcagtaatggtgtacagaccaatcgtcttcttattatctgggtcaatttctgacatatccacgatgttctctacaacatcagtagactctacaaatgcagccagaatttcagcagccattgctgtagggatacctttggtataacccaatggagcatttggattacgagataatccccagtaagactcaattttctgagccagggaactaactgcttcagtgagtgtcataccagtatcaaattgctctactaaaccttctggcagcagggcttggtcaataccagtaatagcagcaacatcttttgcatctttgatagcagtattgctggtagcagtaagtctccactgaagacccactaatacagcagtctgtagcaattgctcattgtacttaaaggtatccccatcctgttcaacgatgttaagtaacttaccgcctacccaacggttggcttctgtaccctgagcaaaacgtttaccaacatccttagtgttaaggaacttagccagacgggaacgaagaatatcagcaataccttccccatgttccatgagttctttatatcgcttaataacttccccattaaaagcaggattagcaacttctttctcagtaaagagttcataacgagcacgagaagacagagcttgagctacctcttttagaggtgcttctgaaccaacagtacgggatttctgttcttccggtaaggtaaaggacaatttgaaatagttcttaataccctctgctttagaatcagcagtacctaccaatgaggggtaaacagcatcgataccttctcttaattcttctgtaactgtgctttcttttgcagaagtttcagtttctttaacagattcagtaggttgcttgatggtgtcctcattagtaaggttaacatcccgtttttcagactggctcacaggttcttttatagcctgtggtctagactctttagtagtaggttctgttttaacaggttcactaacaggagtcttagtctgtacagtagatgtaactggttcctgttttgtaacaggagtttctttaacctgattcacggagtcagctttctgttgagaaaaagcaacgtctcgattgccttgacggaatgccttgaccacctcagcagcaggggcgttaagacgtgaatccaatggagtaacttttatatgactgaccttcagttccgggtaagccgaagcgagggcattagcaatatccgctaccgttttcgcttcaagagcaacttgctgggcaaatttaaccgacttagtgtcatagggattgacccccaatccggtacggctacgaacccattctctgtcagcagtaagagcttggtagtggacagacttattcttatccgcattccccgtaacaagatgctcattcaacgctccaaccttattctgcatgtgctgggcgaactgcataaagtcgttcaggtaagcggaggccaactcgaaattaccagagttatacgcagaccgaatcctattcgcatgttgcaacgcagagtattgtccttcctgagttctgctctcatccgttttaatctgtttactcacaatgt

SEQ ID NO: 132876 - DNA, 1680 bp, Homo sapiens
gataaagaaacgggtgagttaatcacagaacagactgtattagattacccaattctatttgctggtgaatctcaggttgctattcacttcatgtctggtgcataccctgaccgtggctatgatgtattccagaagtacatgactgaaacttggggcattaactatgcaggtgtacgccctattaatgggacaactgggtctactgctgtagaccgggcatgtgcagttaatcctgattctgaactatttgaccctaccaatcatccgatggcagtgtcctttggtggttattgctgcgaaacacttaatgacccaatcgttgataagatgattggtaatgcttactacgttgttaagttcgtagcattacgaatgacctttattaaaaatgtcagtgataatatgactcagctacttgctatccataacaagttaactgagctatctgctatctacactaagctagatgaactacaacttattcataataatctggataagttacaggaactctacaatcaattatctaaactgactggtctatatgacaatcttcaggcattgctgagggtctatgacaacctgactccaatcaatactgtagcttctaacattgacgcagttaatacagtagcaactgatattgctaaagtaattattgtttctgctcaaattgataaagtaattactgttgctaatagcattaccaacgtgaataccgttgctggttccattgatgctgttaatacagtaagtactaatatcaatgcgattaagaatgtgaataccaatatggcagcactgcttgatttggataatcacatgactgaactattagctgtacatgccagattaggtgacttagttaccattgcagagcagctagacacaatcattgctgaccatgaaaagtatgctactgctgaaggtgcaggtctgattggctttaatcaggcacagacttatgcagctaatacagtaggtgcaatgctccgtcaggttattactatggataatgacaaaggtggttatgctgtagcaggtaaactgacctctactggtggagtatggtcgttagctactggttccatcaacatgaatgcccctactgctggtgcagtagctaacctggttcttaattataaagccggtaaagttagtggtttgttggtagcacctagtcaacaaatggcattggatggcctgattatgggtgcatctactactgacaatacagctactgtatctgttactgccccactccggtttaaagcagacctaactgctaaagcattctccgggttctgtgcccggtataggttgggaaacacaaacccacatttaaaatttacggggggtggttgggctgctgtatctgattgggattcgggtacttattgggcattcgatacagtatctggtgagttaacggtatatcacagtactcttatcaaagattctactgttacatttagcttactgttacctaccgatggtactcagcttacggcacaactgaagagtcatactgatagttccttcgtattgaagattgctaaaccagatggttctttacttgatgccccattggaaggtatgggtatcatgtactctcgtggtatgcacggaatctataaagtaccttatggttctctaatcgtagatgtcggtcgtgttcag

SEQ ID NO: 132877 - DNA, 3951 bp, Homo sapiens
gtaaccaaccctcaacgtatggaacagcctccatatcaggccgagtgtgaggatattatccaagcactgaatatgacctttgatgaagggtgtctgttcaaggcattgtggcgtaatgctgctgctcgtttaggtaatggtaaaccaggtaacaatgccgtttatgatgcagagaagatggttcattatgctaaccgcatttttattaaagaatccgctgggcagaaaaaagaagcagaagaaccagtttctgcggctctgaagaagggtgaagagattcatatgtctctgtctgaattattcaccctggtaactggtgaagcagcagaagatagattcacagttactattcagactcctgaaaaagcatatacgtatcgtctggctccatatggattcaataataaaacccgtcgatgggagtgtttggatacaaagtatggaaccaagagaacgtatcaggctgacatctttgtagctactgatgaagatattcctgaatctgaaatgacagaagtctatggcactaaggactatatcttcattctggactttgctgatttacgtacaggtgtggcatttaatggggtaactattaaccctcgtaatatcacaatgatttctttcgactgtactgaagcacatcatggtctagggaaagatgcttacattgccgccatgtataacaatgacgatggtgctactttccagatggaaattgggggtattcatactaatgctgctttagctgctggggataaactccaatgcatctggagatacttggatgttaatggtaatgctcaagcagcagagaatgagttcgaagtagtaagctatgaaggctttggtacttctaacttctctgttaaatgcaaaggtatgctcccaggtaagttcataggatgtgatgcattctatggtaaatacttacagacagatggtcctattaaacaagtagactctgttaaatggtttactaaccttactgtatctggttccggtcgtaagcaactgggtcaacgtaaatatccacaagtagtgatgggtatgggcatgacttcaggctttgatgatggctataaccttactcctgagcgtcaggataaagaaacgggtgagttaatcacagaacagactgtattagattacccaattctatttgctggtgaatctcaggttgctattcacttcatgtctggtgcataccctgaccgtggctatgatgtattccagaagtacatgactgaaacttggggcattaactatgcaggtgtacgccctattaatgggacaactggttctactgctgtagaccgtgcatgtgcagttaatcctgattctgaagtatttgaccctacccaatcatccgatgcaggtggtctttggtggtgggatttagaagcagataaacccggtcctgcattactatattgtgtagagcaagtaggtaagctcaagcctaaagctattatttgggggcaaggtgaccaagatgccactgctttggcatatccaggtgaccgtgacccagcaccatcattaaccagaaccaagcaagctactaagaaggtatttgagtatcttcgtagtttgtatggacagattcctatcttcattcaggaactgagctatgcatggggcatcactaacactgatgaacctaatgtacctattcgtacaggattaccttctttcctggcagcccgtcgtaatacatggggagatattgagttccgttggaagtcttacggattagaccctgcattagctcaatatcgtattgaaatctataacccttctaatttgaaccagatacttcactcatttgtagtatcaggtactcaagaagcaaatggttatgtatatgctgacttcactgtagaagactggattcctgtaatgatggaagcggttggttctcctaatccgtgggagttcatgaagtggcgagtagtttgtctgtatcaggaaagagaaattccttcagcaccttggtcagataacattcctttggataatgcagggcttgttaagaagaccattctggtaggtattaaccagtttggtggtggacactttactgatatgtctgacccaactgctaccacagctaatggtgcaattggtcgtaaagacaaggtatctgcttctacgttacgtctgacttttgcagagaaagctggattacgtcctattcaggtaatgcctattaacgtagctgctgatagtgcaggtatgacggtaggtactcacaaatggtggaatacttccagtaattccccaggtgatgcactactggctattaacgatatggttaaaggtttgggtgttaaacctgattacttcattgaagctaatccgtgggaaaccatgtatatgaaggatgttaattcttctacatggcctgctttaatgactgcttttgaatcgtctaacaaagcaatgcttgcatggatgagaaccaactggggcaaccctaatctggagatttggttccagggggctactactgtttggtttggtgttgctccacctaatgaccttaactctgaagctactgttactgtacgtgataaacagattcagatggctacagctaatataggctttaaactgggttcctttgttcctggttctaacctgtacactgcgtaccgtaatgtggaatccagttggatttactacacggtagaagcattccatgccacagccattgagctaggtgaagcactggctcttaatgttaaccgtgctactaatccacctgattggtcttacttgcgcccaccagcaaatctgcaaggtcgtaagttagctactcgtgatattaagatgacatgggataaccgtgctgggattacccactggaagtatgctaaccgtcatgtcaccacaggggcagaaatctcttctggtatcctcaccagtcccgagtatgtgtttaccctgaatgaccagcaaaatgcttataacggggacactcttaatatgagtttctctgtttctgagtatgctgctgattctggtgcagtaggtgcatcttcttcctttgtaggggtagtccagaatggttcctatatgcagactcctactcaactgaaagctgctaaacagcttaatggtgacattatcttcacttgggtaggacgtccttcatggcaacacttctgggtagtgaataccagtgttaatgattctaagactgttatcttctctaaagaatggtctagtgaatctctaacatggactgttgcagaacagaacgagttctacggcctggaagaaggtggtgctactcatgtcatcttcatggtatctgagtatgacccaagtaacggattagtatctattggtgctcaagttactggtcaaacagagcagccatctaatccaatgaatcctgttgctggattgtatgcagtgttcaccggtgacccaggtaactctaatattaagattatgtgggataaaccttctgttggtggacgtgatgttcgtattcgaaatatgcatgtaacgtccagtgcaactattagtgaccagtttgtatctgataacaatcttgtgttcacacgagaagaacaggtagctgcttatggctttactgcttcaagcgtatctgttcgtgctcaagaacatgatattgaatcaggtgcattgggtcttactactgagtatgttgctgtaccggaaacagcaggaacagttggacagggctttgctaagaaagactctgtaggtaactgtactatgtcatgggaagtaggtgatgctgtccaatggcaggttgagattatcaatgctgagaactctactgttgttaaaacagagattgttgtagcacctacaatcacttggacggctgaagaaattacagccgagtatggttacctgactgaccatatggtttggcgagtaagaccttatcgtgcagatggggcatctaac

SEQ ID NO: 132878 - DNA, 6448 bp, Homo sapiens
ctttcagtttagctttcttcgcagcagtatctttagttaccagattttgctgaaagtcaggctggctcatatgacccaagtagctgacgttcaggaatacaatatcccgtacatctaccacttgaccaaaacggtcattcagattctgaaacagagcagactgagcacgtcccagaatggttctttggatgtgactgaagaatccagtgcacaggaaatgcagaacgtagcattagctgctgaagtagctcctgaaaagctcaatccagaatctgtaaatgttgttcttaaacatgctgctgatggtcgtattaaactgaataatcgccaaattgctgcccttcagaatgctgctgcaatcctgaagggggcacgggaatatgatgcagaagctgcccgtcttggattacgtcctcaagacattgtgagtaaacagattaaaacggatgagagcagaactcaggaaggacaatactctgcgttgcaacatgcgaataggattcggtctgcgtataactctggtaatttcgagttggcctccgcttacctgaacgactttatgcagttcgcccagcacatgcagaataaggttggagcgttgaatgagcatcttgttacggggaatgcggataagaataagtctgtccactaccaagctcttactgctgacagagaatgggttcgtagccgtaccggattgggggtcaatccctatgacactaagtcggttaaatttgcccagcaagttgctcttgaagcgaaaacggtagcggatattgctaatgccctcgcttcggcttacccggaactgaaggtcagtcatataaaagttactccattggattcacgtcttaacgcccctgctgctgaggtggtcaaggcattccgtcaaggcaatcgagacgttgctttttctcaacagaaagctgactccgtgaatcaggttaaagaaactcctgttacaaaacaggaaccagttacatctactgtacagactaagactcctgttagtgaacctgttaaaacagaacctactactaaagagtctagaccacaggctataaaagaacctgtgagccagtctgaaaaacgggatgttaaccttactaatgaggacaccatcaagcaacctactgaatctgttaaagaaactgaaacttctgcaaaagaaagcacagttacagaagaattaagagaaggtatcgatgctgtttacccctcattggtaggtactgctgattctaaagcagagggtattaagaactatttcaaattgtcctttaccttaccggaagaacagaaatcccgtactgttggttcagaagcacctctaaaagaggtagctcaagctctgtcttctcgtgctcgttatgaactctttactgagaaagaagttgctaatcctgcttttaatggggaagttattaagcgatataaagaactcatggaacatggggaaggtattgctgatattcttcgttcccgtctggctaagttccttaacactaaggatgttggtaaacgttttgctcagggtacagaagccaaccgttgggtaggcggtaagttacttaacatcgttgaacaggatggggatacctttaagtacaatgagcaattgctacagactgctgtattagcgggtcttcagtggagacttactgctaccagcaatactgctatcaaagatgcaaaagatgttgctgctattactggtattgaccaagccctgctgccagaaggtttagtagagcaatttgatactggtatgacactcactgaagcagttagttccctggctcagaaaattgagtcttactggggattatctcgtaatccaaatgctccattgggttataccaaaggtatccctacagcaatggctgctgaaattctggctgcatttgtagagtctactgatgttgtagagaacatcgtggatatgtcagaaattgacccagataataagaagacgattggtctgtacaccattactgaactggattccttcgacccaattaatagcttccctactgctattgaagaagctgttttagtaaatcctacagagaagatgttctttggtgatgacattcctcctgtagctaatactcagcttcgtaaccctgctgttcgtaatactccagaacagaaggctgcattgaaagcagaacaggctacagagttctatgtacacactccaatggttcaattctatgagacgttaggaattactatggaacaaaacactgattctatggttccattgccagacccaagccaagctactaagttaactagctggaagaatgaaccttccttgcaagcacttaaagcagacttggatgcagcaaagccatctcatactgccatgatgattaaggtcaaagaatggaatgaccttatgcgtattgaaggcaaagccaagccacctaaagtcaaaggacgttcacaggtacagcctaaacttgtacgtcgtcaagctgaatggcgttattctgctttaactgaacctttccttggttctaataagttattcaaagttactcctgtaacttgggaagatgtacaaggtgcacgccagaatgaactggttcttaactaccaattccgtaccaaactaaatcgtgtaagtttcattgataactatgttcgttcagttgttgatgatggtactggtattgttcgtgttggttggaacagggaaattcgtaaagagaagcaagaagttcctgtatttagtttgttccctattcaaacacaagaacaagctgatgctttacaacaggctctacaacttcgtacagataaccctcgcggttatgaagagaatgtagatgaagctattaaggaatcagtacgtttctttgatgaaacgggacaagcaacgtatgcagtacaaactgggacaactacaactgaagttgaagttcctttagcaaaccatcctacggtggaaatgctaaacccagagaacattattatcgacccttcatgtcagggtgatattaataaggcaatgtttgccattgtctcttttgaaacttgtaaggcagacctgcttaaagagaaagaccgttatcacaatctaaataagattgattggcaaagctctgctcccgttaatgaaccagaccatgcaaccactactcctcaagaatttcagattagtgaccctatgcgtaagcgtgtagttgcttatgaatattggggattctgggatattgaagggaatggtgtattagagcctatcgttgctacttggattggttctacccttattcgtttagagaagaatccttatcctgacggcaaactcccatttgtattaattccgtatatgcctgttaaacgggatatgtatggcgaaccagatgcagagttattaggtgataaccaagcagtacttggtgctgtaatgcgtgggatgattgacttacttggacgtagtgccaatggtcaacgtggtatgcctaaaggtatgcttgatgccctgaatagtcgtcgttacagggaaggtgaggattatgaatacaatcctacacaaaaccctgctcaaatgattattgagcataagttccgtgaattgccacaatcagcactgactatggctacccttcagaaccaggaagcagaatctcttactggtgttaaagcatttgctggtggggtaactggtgagtcttatggtgatgtagctgctggtattcgtggtgtattagatgctgcttctaaacgtgagatggctatccttcgtcgtttagctaaaggcatgtctgaaattggtaataagattattgctatgaatgctgtgttcttggcagagcatgaagtagtacgtattaccaatgaagaatttgtcactattaaacgtgaagacctgaaaggtaactttgaccttgaagtagatatttctactgctgaagtagacaaccaaaagtcccaagacttaggctttatgcttcagactattggtccaaacgtagaccagcaaatcactttgaatattcttgcagagattgctgacttgaaacctcaaaatctccttaagctgataaggaacttcagcatagtctcaggatacaaaatcagtgtgcaaaaatcacaagcattcctatacaccaataacagacaaacagagagccaaatcatgagtgaactcccattcacaattgcttcaaagagaatcaaatacctaggaatccaacttacaagggatgtgaaggacctcttcaaggagaactacaaaccactgctcaatgaaataatagaggatacaaacaaatggaagaacattccctgctcatgtgtaggaagaaccaatatcgtgaaaatggccatactgcccaagataatttgtaggaagactatgagcacactactgactaagacagacattgattctgcattggcttcccagtttaaaagcagtgttactgaccaactggtaaacatgattaacaatgtgacccaagaccagacagcagcagagcaaattagaaataactttgtgacttatgctggggtgatgaaggatggaaagtttaagacccaggattatcttaatgctgttcaatatgttacttacaaacacatggggtatagcaacaaagatgcttacttcaaaacattccccaacagacaagctgaattagtagcaaggggaaccagtgagaaggacatctctgcttatgtatctgcttaccataggggtaagttagtaaacctcattatggaacaatcactgattccagtatggattgttaatcaggatttgtttcaggaagcattgaaccatcaggcatggctcatgaagaatgctaccagtgagaaggtacagtgtgatgctgccaactctatccttactcacctccagaaaccgaaggatgctgttactaatatcaatctggatttgagagaaaactctggattgactgaactcaagaacacactaacccagttggctgaagctcagaaagcagctattgaagctggtacagtaactacggcaacttctttacgtcaccagcaacgcttagaacaattaaagctggttcgagtacgtattcagaaccttgaccctaagaagaaagacctgcctggtgatgatcttacgcttcctgacatcgacatgtctggcagtgagtatgatattcctggagtcattactcgccctatctatgcagagatagagaagctaaccacagaacaactaactactcaccaggcttattggaatgctgttactgctcaggtagctgcaattactgctcgtgctaatcttggtattatcaaagctaactttgttacagctaagattcaggctctggctactaaagctgaatatgcccttactaagctgaagctgtctaatgagtcagtaacttactgtactgctcaatacaatctatcctctatgcttcctcaacaattactgatgttgaagaaccagaccactcaggttgctgaacagactaagttaactactgaacaaatcaatatgacgaaagagcagaaggaagcacaacgtgctcagacttctgatactcgtactgatggtactcgtgtagctggttctgtaggtaaacagaaagaactctatgaccaacagattacgtcttataaacgtgatgctgaagttaaagctgccaaactgtttactgatgcatgggtcactcagaaaaccattgatgagggtctgtctcctcctaatggcttcactaacaccagtctggatagcattcttactgcattgaagaataacaacgcattgggattccctggttgggctgcaactaactatgacccttcaattggtattgcttatgggaacttgtcaatactgtctcagatagaccctgaagtagttaaatggcaagttcctcaaaaagcaggttatgaggtacaggttcagagcagtaggattggatttggtgattttgaggaatgggctgataaattcctctatgagaattatccagaccgtattactgaagagtttgaaatagacatcatggatgatgacaggattgtactcactgctactgatggtagtgagttatccttttatccagagaattacagtcaggatgcaatgtatctgtatgtgaactattactacatacagcctactagtgttgcagacccagtggttcatcctgctgtatctgtaccatctgctgatgacttaccttctacttctgaatggactcaggtatctcagaaccatactcctaagtcagctaccctgaagacagttactcatattaagagtgtattctctgatggcagacctgatgaggaaagtaccaatactgaagaagaacaggttagttggactaacttctcagatgtttacgagaaagaatttcgtgaaccaagtgaagtaggcttaatcattattcgtacagactggtactgtatctactggttccactacaaacactga

SEQ ID NO: 132879 - DNA, 32313 bp, Homo sapiens
atgagcacactactgactaagaaagacattgtttctgcattgcctccccagtttaaaagcagtgttactgaccaactggtaaacatgattaacaatgtgacccaagaccagacagcagcagagcaaattagaaataactttgtgacttatgctggggtgatgaaggatggaaagtttaagacccaggattatcttaatgctgttcaatatgttacttacaaacacatggggtatagcaacaaagatgcttacttcaaaacattccccaacagacaagctgaattagtagcaaggggaaccagtgagaaggacatctctgcttatgtatctgcttaccataggggtaagttagtaaacctcattatggaacaatcactgattccagtatggattgttaatcaggatttgtttcaggaagcattgaaccatcaggcatggctcatgaagaatgctaccagtgagaaggtacagtgtgatgctgccaactctatccttactcacctccagaaaccgaaggatgctgttactaatatcaatctggatttgagagaaaactctggattgactgaactcaagaacacactaacccagttggctgaagctcagaaagcagctattgaagctggtacacctactaaagagttggatgaatggctagaccaagtggactattccgttctgaatacccctacgtatataccaaccgaatttgcactgacctttgctaactttattaagctggttaatggtaaggagggggaatcaaacaaaacccctcctgttcacttaaagatgctggataagataaccagtaagaatcagtacattgctaacttatgtttccgtggtgcagcaaagacaactctgttcatggaatactttactttgttcttagcagtgtttgggcatctacctagcttgggtaaagtagaaggaatgatttatgtatctgactctatggataacggtgttaagtctgcccgtaagaacattgagtttcgatacaacaattcaccattcctgcaacaatggattcctaaagctaccttcacagataactaccttgagtttgtaaatgctgaaggtcaccgtcttggtgtgaagatgtttggtgctaagacaggtcttcgtggtactaagatttttggtaaacgtcctgttctttgtgtactggatgacttagttagtgatgatgatgctcgctcacgtacatcaatggaagccattaaagacacggtatataagggtgtgaaccatgctcttgacccaacaagacgtaaggtaatctttaatggtactccctttaataaggaagatattcttattgaagcagttgaatctggtgcttgggatgtcaacgtatggcctgtatgtgagaaattcccatgtacgcgagaagaatttcaaggtgcttgggaagaccgtttctcctatgactacatcaatgaccaataccagatggcattgaagacaggtaagctggcatccttttatcaggaattgatgttacgtatcagctctgaagatgaacgtctgattcaagattcagagattaaatggtattcccgtacgcagctattacgtctacgttcttgttataacttctatatcaccactgactttgctaccagcgagaagcaggtatctgactactctgtaatatcagtatgggcatatggttctaacggtgactggttctgggtagatggtattgcttgccgtcaaactatggataagaactttgatgacttattccgtctggttcaggaataccaaccacaacaagttggtgtagaaactactggacagcaaggtggttttatttctcttcttcagaaggaaatgcttaaccgtaatgtgttctttaactttgcatccagtcgtggaggccaaccgggtattcatcctgtaaccagtaagctatcaaggtttaacctcgtggttccctggttcaaagctggtaagatgtattttcctgctgaaatgaaagatagcccaatcatgacactctttatggggcaaattcgtttagccactatcaatggtcttaaaggtaaggatgactgtattgataccatttcaatgcttggctacctgaacccgtggaaaccacaagcaggtatcgttacagatgacaaaggtgacattgaagatgatagtaagcctttcattatcgtagctgctaatgaggcactgactcgtctgcatggtcgcttcaacatgcgtaacaacaacgtggttgttgagatgcaagaaggtagaaccaactacccattactagctaagtatgctgttcagtcttatgacccaaatgaagtgaagtgtcccttcattatggacttagcaggtgagaagtttgctgaggatgttattcgtattctggaagtgtatgacgataagggtcgtagacgtccgttgaatgaccgaaataatcctcacagtttgttcaccccaaggccaaacgttctacagaacaatgctccaaaagcatgggaagtattgaacgtaatgtatcaggctaaacatcctaaactgtctacagcagaggatggctataatgagatagacattcctgatacccttgacccagctttggatgcctacattgcttaccgttattacacttctctgaataccccagagagttcagcaaaggcagcagagtatctgtccttttatgacagcatctgttattgctgcgaaacacttaatgacccaatcgttgataagatgattggtaatgcttactacgttgttaagttcgtagcattacgaatgacctttattaaaaatgtcagtgataatatgactcagctacttgctatccataacaagttaactgagctatctgctatctacactaagctagatgaactacaacttattcataataatctggataagttacaggaactctacaatcaattatctaaactgactggtctatatgacaatcttcaggcattgctgagggtctatgacaacctgactccaatcaatactgtagcttctaacattgacgcagttaatacagtagcaactgatattgctaaagtaattattgtttctgctcaaattgataaagtaattactgttgctaatagcattaccaacgtgaataccgttgctggttccattgatgctgttaatacagtaagtactaatatcaatgcgattaagaatgtgaataccaatatggcagcactgcttgatttggataatcacatgactgaactattagctgtacatgccagattaggtgacttagttaccattgcagagcagctagacacaatcattgctgaccatgaaaagtatgctactgctgaaggtgcaggtctgattggctttaatcaggcacagacttatgcagctaatacagtaggtgcaatgctccgtcaggttattactatggataatgacaaaggtggttatgctgtagcaggtaaactgacctctactggtggagtatggtcgttagctactggttccatcaacatgaatgcccctactgctggtgcagtagctaacctggttcttaattataaagccggtaaagttagtggtttgttggtagcacctagtcaacaaatggcattggatggcctgattatgggtgcatctactactgacaatacagctactgtatctgttactgccccactccgttttaaagcagacctaactgctaaagcaatctccggtgtgaatacccgtatcatgccttccagtgcagtgactctgaatgtagatgcatatggtggcatcactcttggatatccacctagccttcagactgtagaaccagtgatgactttcattacccctacaggcaaggctccactgaccccacgattctccagtgttacggcaggggctgctgtactggttatggttggtgaagcagaagcacaactgaaatattcaggtggtggttgggctgctgtatctgattgggattcgggtacttattgtgcattcgatacagtatctggtgagttaacggtatatcacagtactcttatcaaagattctactgttacatttagcttactgttacctaccgatggtactcagcttacggcacaactgaagagtcatactgatagttccttcgtattgaagattgctaaaccagatggttctttacttgatgccccattggaaggtatgggtatcatgtactctcgtggtatgcacggaatctataaagtaccttatggttctctaatcgtagatgtcggtcgtgttcaggttaaattcagtgaatttaacaccacggaaggccgggaaaccggccttattactggagcagttatgtccattgaagattacctcaaaggcaagaattgcctagcttctcctaattatgacccggatgaccagcactcttcttggagagaagacctccctcaatttaagaaagacagggaacatctgacgttggtcaacactcgtcgtaatcggacttataacactaaactaaatcgtttcgaccctgagtattgggtagttgattacaatgccttaatggtagccaccatcattccgtatggttctaagtcttttaaagttccttgtcagtggcgtactaacaaagacttcttaggtgtccgttggatgacggaggatacctttgaccatcatctgtatcgttatgaaacagaccctaattacttaggtctgattctggcttttcgtcataaccctgatgaaccagataaattcacagttactattcagactcctgaaaaagcatatacgtatcgtctggctccatatggattcaataataaaacccgtcgatgggagtgtttggatacaaagtatggaaccaagagaacgtatcaggctgacatctttgtagctactgatgaagatattcctgaatctgaaatgacagaagtctatggcactaaggactatatcttcattctggactttgctgatttacgtacaggtgtggcatttaatggggtaactattaaccctcgtaatatcacaatgatttctttcgactgtactgaagcacatcatggtctagggaaagatgcttacattgccgccatgtataacaatgacgatggtgctactttccagatggaaattgggggtattcatactaatgctgctttagctgctggggataaactccaatgcatctggagatacttggatgttaatggtaatgctccagcagcagagaatgagttcgaagtagtaagctatgaaggctttggtacttctaacttctctgttaaatgcaaaggtatgctcccaggtaagttcataggatgtgatgcattctatggtaaatacttacagacagatggtcctattaaacaagtagactctgttaaatggtttactaaccttactgtatctggttccggtcgtaagcaactgggtcaacgtaaatatccacaagtagtgatgggtatgggcatgacttcaggctttgatgatggctataaccttactcctgagcgtcaggtaaagatggcctatggcttaggataccgtgactggtggactacttatattggcatgtcccactactggaagggtcttactgcatttcaggataaagaaacgggtgagttaatcacagaacagactgtattagattacccaattctatttgctggtgaatctcaggttgctattcacttcatgtctggtgcataccctgaccgtggctatgatgtattccagaagtacatgactgaaacttggggcattaactatgcaggtgtacgccctattaatgggacaactggttctactgctgtagaccgtgcatgtgcagttaatcctgattctgaagtatttgaccctacccaatcatccgatgcaggtggtctttggtggtgggatttagaagcagataaacccggtcctgcattactatattgtgtagagcaagtaggtaagctcaagcctaaagctattatttgggggcaaggtgaccaagatgccactgctttggcatatccaggtgaccgtgacccagcaccatcattaaccagaaccaagcaagctactaagaaggtatttgagtatcttcgtagtttgtatggacagattcctatcttcattcaggaactgagctatgcatggggcatcactaacactgatgaacctaatgtacctattcgtacaggattaccttctttcctggcagcccgtcgtaatacatggggagatattgagttccgttggaagtcttacggattagaccctgcattagctcaatatcgtattgaaatctataacccttctaatttgaaccagatacttcactcatttgtagtatcaggtactcaagaagcaaatggttatgtatatgctgacttcactgtagaagactggattcctgtaatgatggaagcggttggttctcctaatccgtgggagttcatgaagtggcgagtagtttgtctgtatcaggaaagagaaattccttcagcaccttggtcagataacattcctttggataatgcagggcttgttaagaagaccattctggtaggtattaaccagtttggtggtggacactttactgatatgtctgacccaactgctaccacagctaatggtgcaattggtcgtaaagacaaggtatctgcttctacgttacgtctgacttttgcagagaaagctggattacgtcctattcaggtaatgcctattaacgtagctgctgatagtgcaggtatgacggtaggtactcacaaatggtggaatacttccagtaattccccaggtgatgcactactggctattaacgatatggttaaaggtttgggtgttaaacctgattacttcattgaagctaatccgtgggaaaccatgtatatgaaggatgttaattcttctacatggcctgctttaatgactgcttttgaatcgtctaacaaagcaatgcttgcatggatgagaaccaactggggcaaccctaatctggagatttggttccagggggctactactgtttggtttggtgttgctccacctaatgaccttaactctgaagctactgttactgtacgtgataaacagattcagatggctacagctaatataggctttaaactgggttcctttgttcctggttctaacctgtacactgcgtaccgtaatgtggaatccagttggatttactacacggtagaagcattccatgccacagccattgagctaggtgaagcactggctcttaatgttaaccgtgctactaatccacctgattggtcttacttgcgcccaccagcaaatctgcaaggtcgtaagttagctactcgtgatattaagatgacatgggataaccgtgctgggattacccactggaagtatgctaaccgtcatgtcaccacaggggcagaaatctcttctggtatcctcaccagtcccgagtatgtgtttaccctgaatgaccagcaaaatgcttataacggggacactcttaatatgagtttctctgtttctgagtatgctgctgattctggtgcagtaggtgcatcttcttcctttgtaggggtagtccagaatggttcctatatgcagactcctactcaactgaaagctgctaaacaggttaatggtgacattatcttcacttgggtaggacgtccttcatggcaacacttctgggtagtgaataccagtgttaatgattctaagactgttatcttctctaaagaatggtctagtgaatctctaacatggactgttgcagaacagaacgagttctacggcctggaagaaggtggtgctactcatgtcatcttcatggtatctgagtatgacccaagtaacggattagtatctattggtgctcaagttactggtcaaacagagcagccatctaatccaatgaatcctgttgctggattgtatgcagtgttcaccggtgacccaggtaactctaatattaagattatgtgggataaaccttctgttggtggacgtgatgttcgtattcgaaatatgcatgtaacgtccagtgcaactattagtgaccagtttgtatctgataacaatcttgtgttcacacgagaagaacaggtagctgcttatggctttactgcttcaagcgtatctgttcgtgctcaagaacatgatattgaatcaggtgcattgggtcttactactgagtatgttgctgtaccggaaacagcaggaacagttggacagggctttgctaagaaagactctgtaggtaactgtactatgtcatgggaagtaggtgatgctgtccaatggcaggttgagattatcaatgctgagaactctactgttgttaaaacagagattgttgtagcacctacaatcacttggacggctgaagaaattacagccgagtatggttacctgactgaccatatggtttggcgagtaagaccttatcgtgcagatggggcatctaacattagggagattcaattacagcttattaatgagatgactgatgttcatatgggggcattgacggcacagtacatgccggatgactttaccttcgaaccaggaataggacagattcatttcaatgttgagacttccagaaaggtttgtttagaccttgctaagtctgttcttagactggttcctgtttatccattagtaagtcctgttaagaaacagcatgatgattattggtttgttggccgtttaggattagaccctgtgtctgaaccagagcctattaacatgcctactatggagttttataaacgattcctgtctttattacatgaacgggatatgaagtttgttaactctgttgcttatgaaattcttaacttctttatgcctgacgaatggaaacagcttaactggaagggtgacccagcactttccggttggtatccaccatctagttttattcagcctactaacaaagatgctctggattttgtaagtaaagcccaatgtcagattttgaaagaatgccagaacttgggaatggagctgtacttccagattggtgagccttggtggtgggatggttcatacaatacaggtgagggtaagaatgccccttgtatttatgaccctaagactatggctttatacaaagaagagacaggtaatgatgtacctactccatggattaaagacatctttgctccagtagaagaacatcagtggccttatgtagattggctatgcaccaaactgggtcaatccactaactacatacgtgactatgtaaaaggtaagttccctgatgcacaggcaacccttctgttctttacaccacagattatgtcccctgcatctgaactaacaggtcgattaaacttccctgagtcagagtgggtattccctaactatgactttgttcagattgaagactatgattggattattgatggaagacttgacctggttccactgacatttgatgctgccgtgaatagactagggtatccattgaatgtagttcactacttcataggattcgtactgttacctgaagatgctaagaaaatctgggctgatgttgataaggcgtggggattggcactagaggcaggatttagcatgagtcatgaatccgtagaggtgctcctagctcgaatggaggaacgtatgaagacactcttcgaaaataatgcccgtgatgctaaatctcggcaagatttagatgatgctgtacgtaaccttcaactgtctattaataagatggacactcgactggagaatgtagaaaagtctctggctgagtctgtccctactattgaagagttcattaccatcaaacacaaagttgttggtgctggattgtttggtaaatgggtatgggctggatcaggtatcattattggtatactggctgctgccagacgggagatttttgcatggaggattggtgtggcaataagtaagaagaaggttggcggtgttggaggggttattgcagcaatcattgctgctgtatttgctgttgagggtggatacgttaatgaccccaaagacccaggaggtgaaactaatcatggtgtaactattcaggttgctcaaaagcataagcaagaactagagtcgatgtataactgggatggttcaatgaagaacttaactcaggaaatggcatcaagtatttattacaacgattacatcttgaagcctggctttgttaagtttgcagatgtatcaccagcggtaacagaaaaactagtagatgctggtgttaatactggacctgcaagaccatctcgttggttacaagaatctcttaatgctttctccagaaatggcaaagactaccctaaaatacaagttgatggtaaagtcggttctggaactctaagtgcatataaaagccttcagaataaacgaggcaaagtagaagcctgtaagctcattttgaagtctctagatggtaaacagttaaactactatttatctcttaatatgcctgagtacactacaggatggattgctaatcgtattggtaatgtccctctggagaggggtagctctgggagctaccctttttcttcttggttcacaacatggtgaaaagaaagttcaagcactatgggatgaagataagaaggagtactcaaaagaacttgatagagtaaaactggcttatgaccaaaagaatcgggaacacagttatgaagtcgggcaacttacccttcgacttgataaagccaaagagtcttatgaagtcgttattgattctattactaaccagtacaatagtcggttgctccagtcagaaaaacgagccgagagttataaacgtcaagcctcaaccggaaccactcaatgcctcaatcttgcaagccatgcagccagactcgactcaagtcttgaagaaggcagacgtttggttgaagaactcagggcaactgttagactccgtgataaccaactgattgaactggggaaccagattcgttctgaccgaattactatggaacaaaacactgattctatggttccattgccagacccaagccaagctactaagttaactagctggaagaatgaaccttccttgcaagcacttaaagcagacttggatgcagcaaagccatctcatactgccatgatgattaaggtcaaagaatggaatgaccttatgcgtattgaaggcaaagccaagccacctaaagtcaaaggacgttcacaggtacagcctaaacttgtacgtcgtcaagctgaatggcgttattctgctttaactgaacctttccttggttctaataagttattcaaagttactcctgtaacttgggaagatgtacaaggtgcacgccagaatgaactggttcttaactaccaattccgtaccaaactaaatcgtgtaagtttcattgataactatgttcgttcagttgttgatgatggtactggtattgttcgtgttggttggaacagggaaattcgtaaagagaagcaagaagttcctgtatttagtttgttccctattcaaacacaagaacaagctgatgctttacaacaggctctacaacttcgtacagataaccctcgcggttatgaagagaatgtagatgaagctattaaggaatcagtacgtttctttgatgaaacggtacaagcaacgtatgcagtacaaactgggacaactacaactgaagttgaagttcctttagcaaaccatcctacggtggaaatgctaaacccagagaacattattatcgacccttcatgtcagggtgatattaataaggcaatgtttgccattgtctcttttgaaacttgtaaggcagacctgcttaaagagaaagaccgttatcacaatctaaataagattgattggcaaagctctgctcccgttaatgaaccagaccatgcaaccactactcctcaagaatttcagattagtgaccctatgcgtaagcgtgtagttgcttatgaatattggggattctgggatattgaagggaatggtgtattagagcctatcgttgctacttggattggttctacccttattcgtttagagaagaatccttatcctgacggcaaactcccatttgtattaattccgtatatgcctgttaaacgggatatgtatggcgaaccagatgcagagttattaggtgataaccaagcagtacttggtgctgtaatgcgtgggatgattgacttacttggacgtagtgccaatggtcaacgtggtatgcctaaaggtatgcttgatgccctgaatagtcgtcgttacagggaaggtgaggattatgaatacaatcctacacaaaaccctgctcaaatgattattgagcataagttccctgaattgccacaatcagcactgactatggctacccttcagaaccaggaagcagaatctcttactggtgttaaagcatttgctggtggggtaactggtgagtcttatggtgatgtagctgctggtattcgtggtgtattagatgctgcttctaaacgtgagatggctatccttcgtcgtttagctaaaggcatgtctgaaattggtaataagattattgctatgaatgctgtgttcttggcagagcatgaagtagtacgtattaccaatgaagaatttgtcactattaaacgtgaagacctgaaaggtaactttgaccttgaagtagatatttctactgctgaagtagacaaccaaaagtcccaagacttaggctttatgcttcagactattggtccaaacgtagaccagcaaatcactttgaatattcttgcagagattgctgacttgaaacgtatgcctaaactggctcatgatttacgtacatggcaacctcaaccagacccagtacaggaacaactcaaacaattggctgttgagaaagcacagcttgagaatgaagagttacgttctaaaattcgtcttaatgatgcacaagctcaaaaagctatggcagaacgagacaataagaatctggattatctggaacaagaatctggcactaaacatgctcgtgaccttgagaagatgaaagctcaatcacaaggtaatcagcaattagaaattactaaagcattaaccaagccacgtaaggaaggagaacttccccctaacttatctgctgcaattgggtataatgcattgactaatggggaggatacaggtattcaatctgtatctgaacgggatatagctgctgaagccaaccctgcttattcacttggttccagtcagtttgacccaacccgtgacccagctcttaacccaggaattagattagactgtgctcgttatgtacaagaatcctgtgacccattgcttgaagaccgtcaacgtgctgatgctcttgctatggctcaagctgctggttgtttaaaacgttatctggaaattactcttcagaaagcagaaacactggtaggtgtccaatcagatattgagaatgcattggatgttgctcgtgatacccccatgactacggaagctgcaaaaacagcttccgacatttttaaaatgtcggatgaagagattctgaacatgcctggtccatcaagcattcagaacaacccggaaccggtagaaaataatactcctgcacaaccagacccaattgttgaagttgaacaaactgatgaaccagaagtaactactgaaccaactgaagtagaaaatacttctgaatcagaaagcaattcagatgcattcacaactggtaatgatagtgctacagttgacccaaataaggttgacagcaacagtaagcctgctactgataatgcaccttctactactgagcaaggccaagcaaaagtagtagaagacaagcaggtatcagaccagaaaactgacttcgactataaggctggttatgaacggataatggctccgtttaaagctaacggcaaaatgattactcctcagagtcctgaagaggtcattagcttgatgcaaatgggagctaactatacccgtaaaatgcaggagattcagccgtatcgtaagtatctcctgatgttagaaaacaacggattattagatgaagggcaactctcttatgctatcgatttagttaaagggaatcctgatgctattaagaagttggttaaagaatctggtattgatgttctggatattaatccagaagaggaagttaaataccaagctggtaatcaccgtgtgtcagatgctgaagcagcatttgcaaccgaactggaagatgctaaatccactccagaaggacaagctactcttcagttaatttcgactacgtgggatgaccacagcaaacaggcattgctggaaaatcgtggtctggttaataccatcgttgaacagaaagctaacggtatttacgaccgtattgtttctgaaattgaacgactcaaaatcttaggccaaatcccaatcggtacagcattcctggatgcttataatcaagtcggtaactaccttgctgctaatggtggttttaatgatttgattaagcagaaacctgttgaacaacctgaaccagtggttcagccagtagcaactcgtgttgcaacacctaagtctgaaatcactaatactcaacaggcagcagcggcatccccatcacgggttacaccgcgtaagacagaaaaatctagtattgatggtgctaactctgaccagatgcaaaccttcttctggctgaagaaagcaatcatcactgcccgtaaagagcagtacttcatgccactggcctctgtaactaacatgccgaagcattacggtaagaccatcaaggtatatgaatatgttcctctgctggatgaccgtaacatcaatgaccagggtattgatgcaagtggtgctactattgttaacggtaacctgtatggttccagcaaagacatcggtaacattacttccaaactgcctctactgactgaaaacggtggtcgagttaaccgtgttggttttactcgtattgctcgtgaaggttctattcacaagtttggcttcttctatgagttcactcaggaatctattgacttcgattctgatgatggcctgatggaacacctgtcccgtgaactgatgaatggtgctactcagattactgaagctgtactgcaaaaagacctgctggctgctgctggtactgttctgtatgctggtgctgctacttctgatgccaccatcactggtgaaggttctactccgtctatcgtttcttataagaacctgatgcgtcttgaccagattctgacagagaaccgtactcctactcagactaccattatcactggttcccgtatgattgatactaaagtcatcggtgctactcgtgttatgtatgtaggttctgaactggttccagaactgaaagcaatgaaagacctgttcggtaataaagcctttatcgaaactcagcactatgctgatgcaggtactatcatgaatggtgaagtcggttctattgataagttccgtatcattcaggttccagaaatgctgcactggggcaggtgctggtgcacaggctactgtagctaaccctggttaccgtacctctatggtatctggccaagagcactatgacgtttacccaatgctggtagtaggtgatgattcctttacctccattggcttccagactgacggatatatacacatgagcattaacgataaaccgaccgctgatttaactcagggcaacgatgacaccgttgatgaagttaaggttgatgaactttctctgctgaaacaacgagctaatatgatgggtatttcatactcaaataatattagtgctgaaactcttcgtaagaagattgaagcagctcaggaaccagtagaacctcagcctaatcctctggctctgtctacaggtacagtaactacggcaacttctttacgtcaccagcaacgcttagaacaattaaagctggttcgagtacgtattcagaaccttgaccctaagaagaaagacctgcctggtgagattattacagtagctaacgaatatattggtactgttcgtaaattcgttccatttggtgaagctactgatgagggctatcacatcccttactgtatttataacttcctcaaagaacgtaagttcctgaacattcgagttaccaaaggtaagaatggtcagcctaatattacgtctgcatgggtacgtgagtttgccattgaagttctgtctccactgactaaggaagaattacaaactctggctgctgctcagattgctgctggtgaggattttacgcttcctgacatcgacatgtctggcagtgagtatgatattcctggtggcattaatagccctatctatgcagagatagagaagataaccacagaacaactaactactcgtgaggttgggggttctggtgtatttgacgctttaatgcaatcagcaagcaatcatctactggcagaatttaagaataaccgaattactggtggtgattacgttaaggcatacattgctactatggaagcatgtatggctaatgctgtgcaattcctcaccactaaagaccaggcttattggaatgctgttactgctcaggtagctgcaattactgctcgtgctaatcttggtattatcaaagctaactttgttacagctaagattcaggctctggctactaaagctgaatatgcccttactaagctgaagctgtctaatgagtcagtaacttactgtactgctcaatacaatctatcctctatgcttcctcaacaattactgatgttgaagaaccagaccactcaggttgctgaacagactaagttaactactgaacaaatcaatatgacgaaagagcagaaggaagcacaacgtgctcagacttctgatactcgtactgatggtactcgtgtagctggttctgtaggtaaacagaaagaactctatgaccaacagattacgtcttataaacgtgatgctgaagttaaagctgccaaactgtttactgatgcatgggtcactcagaaaaccattgatgagggtctgtctcctcctaatggcttcactaacaccagtctggatagcattcttactgcattgaagaataacaacgcattgggtaagactaaaatctacgtagcatcctctgtctacaatttggcaggggatatacataaacgtccaaattatttaaagactacggtgattggtaacatcgtcagtaaatctgactttagtatgggtgataccatcactaactcttatttaaatggacctggtattcgtttacgtagattccctggttgggctgcaactaactatgacccttcaattggtattgcttatgggaacttgtcaatactgtctcagatagaccctgaagtagttaaatggcaagttcctcaaaaagcaggttatgaggtacaggttcagagcagtaggattggatttggtgattttgaggaatgggctgataaattcctctatgagaattatccagaccgtattactgaagagtttgaaatagacatcatggatgatgacaggattgtactcactgctactgatggtagtgagttatccttttatccagagaattacagtcaggatgcaatgtatctgtatgtgaactattactacatacagcctactagtgttgcagacccagtggttcatcctgctgtatctgtaccatctgctgatgacttaccttctacttctgaatggactcaggtatctcagaaccatactcctaagtcagctaccctgaagacagttactcatattaagagtgtattctctgatggcagacctgatgaggaaagtaccaatactgaagaagaacaggttagttggactaacttctcagatgtttacgagaaagaatttcgtgaaccaagtgaagtaggcttaatcattattcgtaagactacaatgacccaggtacagactggtactgtatctactggttccactacaaacactgaagttattgatttaggtggtggggttactgaaaccagaactactacagtaactacagatactttaggttatacatggtcttatcagaatacagatgtagttactactatgtctgctggtggtatgcctcaattgtttatttataaacagaacagtggtaatgccatccttgatgctctgtttattaataagacgaccaataacagattctattcattcatccctatccgtagtgataagaactggatttctggttctacatatactctttgtaagaaagcctttaagaaggctacagggggtaagatttctgacattatggatgacctgaagaagaacaaagatattggtgatattcagtatatctatgctgtatttggttgttctcttaatagtcctgaaaatacagctaaagagtacatatacagattcttccagttagtgaatcagtcaatgcctgctgacccaaactacccaactatggatgctttggtagaaggctttgctcaggctaacagagactttgatgcttatcaggaatggtgggaatctcgcagtggtaatagggatattcccatagggaagcctcctaaaagacccgtatatccaacaataccttctaaatccattaatattcgttctaacggtggataccgttacaacatgactattagttggaacttcattgaagaatcagttggttcaggtaaagcattctctggagccaagaaagggcagctcaagtttgcttatgaaggtactgtagtccttatgcagaaagccgttatgtactctgaaaagggtaatgacaaagttgggtttactatctacaggctagataagataacaatgtattggcagaatggggataattcatggaggaagatttctgtctatggcctgaaccataacaataatgtttacaagaataaatctgtaagcatttctggtgtagatgcactaaatgatgatgaagagtccggatttatcatccctcttcataacaacatttatcgtagtatgtctttggtaaatggtactcagttatctactgcatgttgttatctggttcttaactcatataagaaagttaagaagaaatggtatcagtctggcatttttaaagtagtagtggttgttgttgcagtagtagtgtctgtgttctttactcctgctgctggtgctggggtaatgggtactgctgcttctattggtgctgcattaggttttgcagggttagctgctattatcgttggggctgtggctaatgccattgcagctatgattctgatgtccattattcaaacagtctctgttagtctgcttggggataagattggaatcattgttgctactattgcctctatggtagccatgaatgtcggcacagctttatccactggttcatccatgtctacgatgctgggtgaaatgatgaaagcagacaacatcattaaactcacttcatctgtaggaaatggcataagtgattacatcaatgcttctgctatggaaactgtcaaaaagacagagaaacttatggcagagtaccgtgaccagataaaaaccattcaggaaaagtacgaggaaatgtttggcactgagggcatgggttacattgacccaatgaacctaactaatgtaggccaacaatttgaaccactggattcattccttagccgtactcttatgactggtcatgatatagctgatatgtctaacaacatgattaccaactttgcagatataacgttgcagcttgatttagataccaattttggctatgggtatggttcctttaataccccaaccatgaactataaccctatgcaatctggcatccttagtaatgactggcttcagaatattactggtggtgctacagggaataccggtgggcagactcaagggcttactgaccaactgggtctgaacattcctacattccagttggggttaggtggtcttaatgcactgggtaatatctatggtgcattacaggctaacaagttagctaagaatcagttctcttttgctaaagatgttactaacactaatctgaataaccagattaagtcctataacactgctctggaagaccgtgctcgtagtcgtgctgttgcagaaaatcgtgaccaatctacggctgatgcttacattgcagctaatcgcttaactcgtgattttcgaaactctgcaagacagcaagctggtgatgcaattatggctgaagccatgcgttaccaagaccctaatgagtatcgtaatgccttagcttctggagcattatttgctggctatgacccttctctaatttcttctcgtactatggagaacttagataatcgtgctggcaatctgttagaccaagcatctaaacaacaaaatctggatttcactcgatacagtaatgacagaaccatgaaggtaaatgcagctactgatgctgctgcccctgcattacaggaattagctctggcttatcaatctggtgacccaagaaaggttcaggcagcacaggctcagtatggggatgtattaaaaacccttcctgctggtgttgttatggactacatgaacaaccttcaaggacagggtactgctggtattggtcaacgtcgcagcttattcaacttaggtgttgatatacgtaacgatgcggatactcaggctgctatgcagttactgaataatattcgtcgtggtgcatacagtgctgacgatgctcgtatgcttgcagagggtacgttcgaccaaatgtcaccaggagcagtaagtcgtgcactatctcagttagatagagcatatccaggtgcatatactccgggaactggttctgcatccctatctcctcctggtactcagggtactcggaatggttctgcatatgacactacctataagttcacaccaactgatgtacctattactcagatgaacttaggtgaggtggttcagcatcaagacactatgaagaagacactaggtgcttctcctgttggtgcataccagattaaccaagatactcttaaagactttgctccaaaggtatttggtgaagattggcagaacattcctatgtctccggagaaccaagacaaactgggtgaagctatttttaatgcccgtaagaatggcaatctgaagagtacatgggctgctttaccggatgatactcctggtgcttataagaacttgtcatgggatgaaatgaaggattacattgctcaagcagaaacaggtaattctattaatccattacaggaacaagcattcacttctgttgctggtaatactgttggtactcgtaatatgcagaatattggtaatactctgctgccagaataccaagctgctactgttgacccttctacgactggtcaggtggctaaacgtattattgatagcaatgaactgaaaggcattaaccaaggtgcactggttcgacaaatcaatgaggtagcaaaacagaatgctatttctcccgctatggcaggagcaatcattcaacgtagtatcaccggtaaaccagagggatggtttagtggtattcgaaatgcctttgatactgatgttattgatttgggtggtgattaccaactggataaagcagccgtagaagcaaatgcaaaacttgcaactactggtactgctattgaacagaatgctcgtaatcagcttactgcacaaattcaatcaaacatctatgcagcacagaatacgttagatactgcacttgctgatttacgtgaagtacagcgtcgtattcagaccggtcaggaaaaccttagaagtgtactacctcgctatcaggagcgagttaacactgctaaacgtcttcttgatggtgctcgtagtgctgtagctgctgaccctcagaatttggatattaagagcctacaaaatattaaacaggaagagagcgaggcaaaccggagaagtttaggcagagatgccggacgtcgattggacagcgtaaccaatgcaaagcaagttgacgtctctactgcaaccgcccagaagaaagctgaacaaggtgtcactactcctcttgtttctcctgatgctgcttatcaaatgcaagctgcccgtactggtaatgttggggctaatgcatttgaaccagggacagtgcaatcagatttcatgaatctgactccaatgcaaatcatgaataagtatggggttgagcaaggcttacaacttatcaacgctcgtgctgatgcagggaaccaggtattcaatgattcagttactacaagaactcctggggaagaactgggggatattgctactggtgttggtcttggttttgttaatacccttgggggcattggtgctcttggggcaggcttactcaacgatgatgcaggtgctgttgttgctcaacaattgagtaagtttaatgatgctgtccatgctacccaaagccaagcattacaagataaacgtaagctctttgctgctcgtaacttaatgagtgaagtagagagtgaacgtcagtatcaaacagataagaaagaaggcactaatgacatagtagcttccttatctaaatttggacgtgattttgtaggttcaattgagaacgctgcccaaactgactccattatttctgatgggttagcagaaggggtaggttctctattaggtgctggtcctgtattaaggggtgcatctttactgggtaaagcagttgttccagcaaatactcttcgtagtgctgcattggctggtgctattgatgcaggtactggtactcagtccctggctcgtattgcttctactgtaggcagagctgcaccaggtatagttggtgttggtgcaatggaagctggtggtgcataccaacaaactgctgatgaaattatgaagatgagtcttaaagacttagagaagtctcctgtttatcaacaacatattaaagatggtatgtctccagaacaggctcgtcgtcagactgcatctgaaactggtcttactgctgctgctattcaattacctattgctgctgcaactggtcctctggtatctcgttttgagatggctcctttccgtgctggttctttaggtgctgtaggtatgaaccttgcccgtgaaacagtggaagaaggtgttcagggtgctacaggccaactggctcagaatattgcacagcaacaaaacattgataagaaccaagacctgcttaaaggtgtcggtacacaagctggtttaggtgctctttatggctttggttctgctggtgttgtacaggctccggctggtgctgctcgtttagcaggtgctgcaactgctcctgtattgcgtaccacaatggctggtgttaaagctgctggtagtgtagcaggtaaggttgtttcccctattaagaacactttggtagctcgtggtgagcgggttatgaagcagaatgaagaagcatctcctgttgctgatgactatgttgcacaggcagcacaagaagctatggctcaagcaccagaagcagaagttactattcgtgatgctgttgaagcaactgatgctactccggaacagaaagttgcagcacaccagtatgtttctgacttaatgaatgctactcgttttaatcctgaaaattatcaggaagcaccagagcatattcgtaatgctgtagctggttctactgaccaagtacaggttattcaaaagttagcagacctagttaacacattagatgaatctaatcctcaagcactgatggaagctgcatcttatatgtatgatgctgtttcagagtttgagcaattcattaaccgtgaccctgctgcactggatagtattcctaaagattctccggctattgagttactcaatcgttatacaaatctgacagctaatattcagaacacaccaaaagtaattggtgcactgaatgttattaatcgaatgattaatgaatctgcccagaatggttctttggatgtgactgaagaatccagtccacaggaaatgcagaacgtagcattagctgctgaagtagctcctgaaaagctcaatccagaatctgtaaatgttgttcttaaacatgctgctgatggtcgtattaaactgaataatcgccaaattgctgcccttcagaatgctgctgcaatcctgaagggggcacgggaatatgatgcagaagctgcccgtcttggattacgtcctcaagacattgtgagtaaacagattaaaacggatgagagcagaactcaggaaggacaatactctgcgttgcaacatgcgaataggattcggtctgcgtataactctggtaatttcgagttggcctccgcttacctgaacgactttatgcagttcgcccagcacatgcagaataaggttggagcgttgaatgagcatcttgttacggggaatgcggataagaataagtctgtccactaccaagctcttactgctgacagagaatgggttcgtagccgtaccggattgggggtcaatccctatgacactaagtcggttaaatttgcccagcaagttgctcttgaagcgaaaacggtagcggatattgctaatgccctcgcttcggcttacccggaactgaaggtcagtcatataaaagttactccattggattcacgtcttaacgcccctgctgctgaggtggtcaaggcattccgtcaaggcaatcgagacgttgctttttctcaacagaaagctgactccgtgaatcaggttaaagaaactcctgttacaaaacaggaaccagttacatctactgtacagactaagactcctgttagtgaacctgttaaaacagaacctactactaaagagtctagaccacaggctataaaagaacctgtgagccagtctgaaaaacgggatgttaaccttactaatgaggacaccatcaagcaacctactgaatctgttaaagaaactgaaacttctgcaaaagaaagcacagttacagaagaattaagagaaggtatcgatgctgtttacccctcattggtaggtactgctgattctaaagcagagggtattaagaactatttcaaattgtcctttaccttaccggaagaacagaaatcccgtactgttggttcagaagcacctctaaaagaggtagctcaagctctgtcttctcgtgctcgttatgaactctttactgagaaagaagttgctaatcctgcttttaatggggaagttattaagcgatataaagaactcatggaacatggggaaggtattgctgatattcttcgttcccgtctggctaagttccttaacactaaggatgttggtaaacgttttgctcagggtacagaagccaaccgttgggtaggcggtaagttacttaacatcgttgaacaggatggggatacctttaagtacaatgagcaattgctacagactgctgtattagcgggtcttcagtggagacttactgctacccggcaatactgctatcaaagatgcaaaagatgttgctgctattactggtattgaccaagccctgctgccagaaggtttagtagagcaatttgatactggtatgacactcactgaagcagttagttccctggctcagaaaattgagtcttactggggattatctcgtaatccaaatgctccattgggttataccaaaggtatccctacagcaatggctgctgaaattctggctgcatttgtagagtctactgatgttgtagagaacatcgtggatatgtcagaaattgacccagataataagaagacgattggtctgtacaccattactgaactggattccttcgacccaattaatagcttccctactgctattgaagaagctgttttagtaaatcctacagagaagatgttctttggtgatgacattcctcctgtagctaatactcagcttcgtaaccctgctgttcgtaatactccagaacagaaggctgcattgaaagcagaacaggctacagagttctatgtacacactccaatggttcaattctatgagacgttaggtaaagaccgtattctcgaactgatgggtgctggtactctgaataaagagttacttaatgataatcatgctaaatctctggaaggtaagaaccgttcagtagaggactcttacaaccaactgttctccgtcattgagcaggtaagagcacagagtgaagacatctctactgtgcctattcactatgcatacaatatgacccgtgttggtcgtatgcagatgttaggtaaatacaatcctcaatcagccaaactggttcgtgaggctatcctacctactaaagctactttggatttatcgaaccagaacaatgaagacttctctgcattccagttaggtctggctcaggcattggacattaaagtccatactatgactcgtgaggttatgtctgacgagttgactaaattactggaaggtaatctgaaaccagccattgatatgatggttgagtttaataccactggttccttaccagaaaatgcagttgatgttctgaatacagcattaggagataggaagtcattcgtagcattgatggctcttatggagtattcccgttacttagtagcagaggataaatctgcatttgtaaccccactgtatgtagaagcagatggtgttactaatggtccaatcaatgccatgatgctaatgacaggtggcctgtttactcctgactggattcgtaatattgccaaagggggcttgttcattggttctccaaataagaccatgaatgagcatcgttctactgctgacaataatgatttatatcaagcatccactaatgctttgatggaatcgttgggtaagttacgtagtaactatgcttctaatatgcctattcagtcccagatagacagtcttctttctctgatggatttgttcctaccggatattaatcttggtgagaatggtgctttagaacttaaacgtggtattgctaagaacccgctgactattaccatctatggttctggtgctcgtggtattgcaggtaagctggttagttctgttactgatgccatctatgagcgtatgtctgatgtgctgaaagctcgtgctaaagacccaaacatctctgctgctatggcaatgtttggtaagcaagctgcttcagaagcacatgctgaagaacttcttgctcgtttcctgaaagatatggaaacactgacttctactgttcctgttaaacgtaaaggtgtactggaactacaatccacaggtgcaggagccaaagggaaaatcaatcctaagacctataccattaagggtgagcaactgaaggcacttcaggaaaatatgctgcacttctttgtagaaccactacgtaatggtattactcagactgtaggtgaaagtctggtgtactccactgaacaattacagaaagctactcagattcaatctgtagtgctggaagatatgttcaaacagcgagtacaggagaagctgacagagaaggctaaagacccgacatggaagaaaggcgatttccttactcagaaagaactgaatgatattcaggcttctctgaataacttagctcctatgattgagacaggttctcagactttctacattgctggctcagaaaatgcagaagtagcaaatcaggtattagctactaaccttgatgaccgtatgcgtgtaccaatgagtatctatgccccagcacaggctggtgtagcaggtattccatttatgactattggtactggtgatggcatgatgatgcaaactctttccactatgaaaggtgcaccaaagaataccctcaaaatctttgatggtatgaacattggtttgaatgacatcactgatgctagtcgtaaggctaatgaagctgtttacacttcttggcagggtaaccctattaagaatgtttacgaatcatatgctaagttcatgaagaatgtagatttcagcaagttgtcccctgaagcattggaagcaattggtaaatctgctctggaatatgaccaacgtgagaatgctactgtagatgatattgctaatgctgcatctttgattgaacgtaacttacgtaatattgcactgggtgtagatattcgccataaggtactggataaggtaaatctgtccattgaccagatggctgctgtaggtgctccttatcagaacaacggtaagattgaccttagcaatatgactcctgaacaacaggctgatgaactgaataaacttttccgtgaagagttagaagcccgtaaacaaaaagtcgctaaggctaaggctgaagtcaaagaagaaattgtttctgaaaaagaaccagtgaatccagactttggtatggtaggccgtgagcataaggcatccggtgttcgtatcctgtctgctactgctattcgtaacctggctaagattagtaatctgccatctactcaggcagctactcttgcagagattcagaaatcactggcagctaaagactataagattatctacggtacacctactcaggttgcagaatatgctcgtcagaagaatgttactgaattgacttctcaggaaatggaagaagctcaggcaggtaatatttatggctggactaacttcgacgataagaccatttatctggttagcccatctatggaaaccctcattcatgaactggttcatgcttctaccttcgaggaagtttattccttctatcagggtaatgaagtaagccctacttctaagcaggctattgagaaccttgaaggtctgatggaacagttccgttctctggatatttccaaagattctccagaaatgagagaagcatatgctgatgctattgcaactattgaaggtcatttgagtaatggctttgttgacccagctatttctaaagctgctgctcttaatgagtttatggcttgggggttagctaaccgtgctctggctgctaaacagaagagaacatcttcactggttcaaatggtgaaagatgtttatcaggccattaagaaattgatttggggacgtaaacaagctcctgcattgggagaagatatgttctctaatctgctgtttaattctgcaattctgatgcgtagccaacctacaactcaggcagtagctaaagatggcacactgttccatagcaaagcatatggtaacaatgaacgtctgtctcagttgaatcagaccttcgataaactggtaactgattaccttcgtactgacccagttacagaagtagaacgtcgtggcaatgtggctaatgcattaatgagtgctactcgactagttcgtgatgttcagtctcgtggcttcaatatgactgctcaggaacaatctgtattccagatggttactgctgcattagcaactgaagctgcaattgacccacacgctatggctcgtgctcaggaactttatacccatgtaatgaaacaccttacggtagaacatttcatggctgaccctgatagtactaaccctgctgaccgttactacgctcaacagaaatatgacactatctctggtgctaatctggttgaagtagatgccaaaggcagaaccagtctgttacctacattcctgggtctggctatggttaatgaagaactacgttcaatcattaaagaaatgcctgtacctaaagcagataagaaattagggaatgatgtagatactctgcttaccaatgcaggcactcaggtaatggaatctctgaaccgtcgtatggctggtgaccagaaagctactaatgttcaggacagtattgatgctctgtcagaaacaatcatggctgctgctctgaaacgagagtccttctatgatgctgtagcaacccctaccggtaatttcattgaccgtgctaatcagtacgtaacagatagcattgaacggttatctgaaactgttattgagaaggcagataaggtaattgctaatccttctaatgtagctgctaaaggtgttgctcatctggctaaactgactgctgctattgcatctgaaaaacaaggtgaaatagtggctcagggtgttatgactgctatgaaccagggtaaagtatggcaacctttccatgacttagttaatgacattgttggccgtactaagactaatgccaatgtctatgacttaatcaaattggttaagagccagatttctcaagaccgtcaacaattccgtgagcatttacctacagtcattgctggtaagttttcccgtaaactgactgataccgagtggtctgcaatgcatactggtttaggtaaaacagatttagctgttctacgtgaaactatgagcatggctgaaattagagatttactctcttcacctaagaaagtgaaagatgaaatctctactctggaaaaagagattcagaaccaagcaggtagaaactggaatctggttcagaagaaatctaagcaactggctcaatacatgattacaggggaggtaggtaataacctccttcgtaatgcccatgctattagtcgtttattaggtgaacgtattactaatggtcctgtggcagatgtagctgctattgataagctcattactttgtactctctggaattgatgaataagtctgaccgtggccttttgtcagaattggctcaatcagaagtggagggtatggagttctccattgcttatatggtgggtcaacgtactgaagagatgcgtaaagctaaaggtgataaccgtactttgctgaatcactttaagggctatatccctgtagagaaccagcaaggtgtgaatttgattattgctgacgataaagagtttgctaagttaaatagccaatcttttactcgtattggtacttatcagggaagcactggtttacgtactggttctaaaggttattacttcagcccagtagctgcccgtgccccatactctcaaggtattcttcagaacgttcgtaatactgctggtggtgtggatattggtacaggctttacgttaggtactatggttgctggtcgtattactgacaaaccaaccgtagagcgtattaccaaagctctggctaaaggtgaacgtggacgtgaaccgctgatgccaatttataacagcaaaggtcaggtagttgcttatgagcaatccgtcgaccctaatatgttgaagcatctaaaccaagacaatcactttgctaagatggtgggtgtatggcgtggtcgtcaggtggaagaggctaaagcacaacgttttaatgacattctcattgagcaattacatgctatgtatgagaaagacattaaagactccagtgctaataaatctcaatatgtaaacctgttaggtaaaattgatgacccagtactggctgatgcaattaacctgatgaacattgagactcgccataaggccgaagaactctttggtaaagatgagttatgggttcgtagggatatgctgaatgatgcacttggctatcgtgctgcatctattggtgatgtatggactggtaactctcgttggtcacctagcacccttgatactgttaagaagatgttcctcggtgcatttggtaataaggcatatcatgtagtaatgaatgctgaaaataccattcagaacttggtgaaggatgctaagacagtaattgttgttaaatctgttgtagtaccggcagttaacttccttgctaacatctaccagatgattggacgtggtgttcctgttaaggatattgctgtgaatattcctcgtaagacgtcagagattaatcagtacattaaatctcgcttacgtcagattgatgcagaagcagaattacgtgctgctgaaggcaatcctaatctggttcgtaaacttaaaaccgagattcaatctattactgatagccatcgtcgtatgagcatctggcctttgattgaagcaggtgagttctcttctattgctgatgctggtattagtcgtgatgacctgttagtagctgaaggtaagattcatgagtacatggaaaaacttgctaataaacttccagaaaaagtacgtaatgctggccgttatgctcttattgctaaggacactgctctgttccagggtatccagaaaacagtagagtattcggacttcattgctaaagccatcatctatgatgatttagtgaaacgtaagaagaaatcctcttctgaagcattaggtcaagtaactgaagagtttgttaactatgacagattgcctggtcgtttccgtggttatatggaaagcatgggtctgatgtggttctacaactttaagattcgttccattaaagttgctatgagcatgattagaaacaacccagtacattctctgattgctacagtagtacctgctcctgccatgtttggtaatgtaggtctgccaattcaggacaacatgttaaccatgctggctgaaggaagactggattattcattaggcttcggacaaggactaagagcaccaaccctcaatccttggttcaaccttacccactaa

SEQ ID NO: 132880 - DNA, 479 bp, Homo sapiens
  misc_feature (1)...(479): n = a,t,c or g
nttgagacttcgtagaccctagtccagngtggtggaattcggaagtgggaagagagaaaggttgtgatggcggctatagctgcatccgaggtgctggtggacagcgcggaggaggggtccctcgctgcggcggcggagctggccgctcagaagcgcgaacagagactgcgcaaattccgggagctgcacctgatgcgggaatgtgcggcaagaggagaagactatgagaaagtgaagttgctggagatcagtgcagaagatgcagaaagatgggagaggaaaaagaagaggaaaaaccctgatctgggattttcagattatgctgctgcccagttacgccagtatcatcggttgaccaagcagatcaaacctgacatggaaacatatgagagactgagagaaaaacatggagaagagtttttcccaacatccaatagtcttcttcatggaacacatgtgccttccacagaggaaattgg

SEQ ID NO: 132881 - DNA, 1624 bp, Homo sapiens
tttcgtgagaaaggttgtgatggcggctatagctgcattcgaggtgagttccacccaccgtacaccgggggttttgttggtgagggttccggggagcggcctggagagaggaggaggccaagtctagtttcgcttcagggaggctcagacactgtggggtcaagtcggcggtggaggccctaggcccaacctgtggggaccggcggggactcggcctgggcagtcctgggagaagctgagccggctctgcctgaagccagttctccttgtcgcaggtgctggtggacagcgcggaggaggggtccctcgctgcggcggcggagctggccgctcagaagcgcgaacagagactgcgcaaattccgggagctgcacctgatgcggaatgaagctcgtaaattacatcaccaggaagttgtggaagaagataaaagactaaaattacctgcaaattgggaagccaaaaaagctcgtttggagtgggaactaaaggaagaggaaaagaaaaaggaatgtgcggcaagaggagaagactatgagaaagtgaagttgctggagatcagtgcagaagatgcagaaagatgggagaggaaaaagaagaggaaaaaccctgatctgggatttttcagattatgctgctgcccagttacgccagtatcatccggtttgacccaagcagatcaaacctggacatggaaacatatcgagagactgagagaaaaacatgggagaagagtttttcccaacatccaatagtcttcttcatgggaacacatgttgccttccacagagggaaatttgacagggtggttcttagatctgggaaaaaccagtttgaaaaacgagacaattttaggcccggagacgtccttataatgatgatgcagatatcgacctacattaatgaaaggaatgcccaattcaacaagaaagctgaaagattctattgggaaatacacagctgaaattaaacagaatttggaaagaggaacagctgtctaatcccttcaagaactgtttatagaagcttgagaatggggtaaaaatttctgctagcaaaatcaaggttcttttttgaaattttatcagtaatccagaatttagtagtccatgccttctcactcagcatttagaacataaaaatgcggtttcttaaaccgtatatccctttccatgtatatttcccacattttttgtgcttggatattaagatgtatttcttgtaagtgaaagttgttttgtaaatcttactttgtaatacattcctaattatattatttttctatgtattttaaatgtatatggctgtttaatcctttgaagcattttgggcttaagattgccagcagcaccacatcagatgcaagtcattgttgcctatcagtgtggaaatttgatagagtctagactcgggccacttggagttgtgtactccaaaagctaaggacgagtgatgaggaagatggcagtggccaccggagacctggaacaagtccctcctcatggcggccctgtgaccaaggtcggggaaggagtggagctatccttcccatgatctgatcatgtacagttccctttttaaaaagcaataaatgcctggggattagaatttctaaaaaaaaaaa

SEQ ID NO: 132882 - DNA, 415 bp, Homo sapiens
  misc_feature (1)...(415): n = a,t,c or g
cccacgcgtacgcttttacttacctcttgnnnnnnnnnnnnnnnnnnnnnnnnctcatttattcattctgtttctatatagcaaaactgaatgtcaaaagtaccttctgtccacacacacaaaatctgcatgtattggttggtggtcctgtcccctaaagatcaagctacacatcagttttacaatataaatacttggactaccttaatgataaggactccttaaagttccatttgctaatgattaatacactgtttgggctggccagattttcatgcatgcagcttgacgattgagcacagtcaggcctttgtattaaaaatgaaaaatgaataaacaaattcaaaacctattcaaatgggttctagttcaatttgtttagtataaattgtcatagctggtttactgaaaacaa

SEQ ID NO: 132883 - DNA, 423 bp, Homo sapiens
  misc_feature (1)...(423): n = a,t,c or g
cagatagtgaagaagaaatccgtgaggcattccgagtctttgacaaggatggcaatggttatatcagtgcagcagaactacgtcacgtcatgacaaacttaggagaaaaactaacagatgaagaagtagatgaaatgatcagagaagcagatattgatggagacggacaagtcaactatgaagaattcgtacagatgatgactgcaaaatgaagacctactttcaactcctttttcccccctctagaagaatcaaattgaatcttttacttacnnnnnnnnnnnnnnnnnnnnnnnnnnnnnnnttcatttattcattctgtttctatatagcaaaactgaatgtcaaaagtaccttctgtccacacacacaaaatctgcatgtattggttggtggncctgtcccctaaagatcaagctaccg

SEQ ID NO: 132884 - DNA, 239 bp, Homo sapiens
gggctgcaggaattcggcacgaggatgactgcaaaatgaagacctactttcaactcctttttcccccctctagaagaatcaaattgaatcttttacttacctcttgcaaaaaaaagaaaaaagaaaaaagttcatttattcattctgtttctatatagcaaaactgaatgtcaaaagtaccttctgtccacacacacaaaatctgcatgtattgggtgggggggccgtgtcccccaaag

SEQ ID NO: 132885 - DNA, 3839 bp, Homo sapiens
  misc_feature (1)...(3839): n = a,t,c or g
gacctgggaaaaacaaaacgacccgccgtagaggaaaaggaaaccccaaacaaaactcgggcgcagagcctatttctactggccaaagagcgccgccaagaccccttccgtccggggctgtccgcgctgccactagtaaagatggcggccataggcggagccgctcactccgaaggccgcaggctaccctgccggccacgaccattcacgcggagccctccacgcccttcgcggcttgacgcattgcaggtgcagcgcgaccaatcagacggcgcggctcttttcggccaaccactgcagggtcgcgccggcctatcagagcgtccttgtcaaactgaacgaggaaagaagcctcagcagcgccaactaagcaaccggctacagaccgcgttccggaggggcccgctgggctcgggttttcagctgcgttggagctgcagaggctgcggagtgaacgcggccaggagcccgcctgggagcgcgcagcgctctaggagccgagagccgctgcttggccctcgctggccgggaagcagaggatggatccagttatgtgaaagtctgaagaaaattgccaaaggatgggtcagccaagacccctctcctcggcagctgaaggagtgtggccaatctgcctccacctccccgcggaccccctactctcaggacctcctgcagcaccccaaactggaagtggccgctgcagacccaaggacgaggggcacgcgggagccggcagccctagtggagcggttggagatgttgagtggtgctgggagtgtcgtggacgccgtgccgttacttcgtagtcagggcgggcggcgcaggcgggcggcggcggcattagcgcacaacgcacattagcagcagcagcagcagcagcagcatcggaggtacccccgccgtcgcagcccccgcgcatggtgcagccaccctcgctcccctctgctcttcctcccttcgctcgcaccatggcctgatcagctgaccgaagaacagattgctgaattcaaggaagccttctccctatttgataaagatgggcgatggcaccatcacaacaaaggaactttggaactgtcatgaaggtcactgggtcaagaacccaacaagaagcttgaattgccaggatatgatcaatgaaagtgggatgctgatgggtaaatggcacccatttgactttcccccgaattttttgactaatgatggcaagaaaaatgaaagacacagacagtgaagaaggaaatcccgtgaggcattccgagttctttgcaaaggatggcaatggttatatcagtgcagcagaactacggtcacgtcatgacaaacttaggagaaaaaactaccagatttagaaagtagatgaaatgatcagagaagccagatattgatggagacggacaagtcaactatgaggaattcgtacagatgatgactggcaaaatggaggaccttactttccaactccctttttccccccctctagaggaatcaaattggaatcttttacttaccttcttgcaaaaaaaagaaaaaaagaaaaaagttcatttattccattcctgtttcctatatagcaaaactgaatgtcaaaagtaccttctggtccacacacaccaaaatctgcatgtattggttggtgggccctgccccctaaaagatcaagctacacatcagttttacaatataaatacttgtactaaccttaatgataacggactccttaaacgttccattttgctaatgattaatacactgtttgggctggccagttttttccatgcatgcagctttgacgattggagcacaagtcagggcctttggtacttaaaattggaaaatggaaaaaaccaaatttcaaaacctattccaaatggggttctagttcactttgtctagtctaaattgtcataggctggtttacctgaaaaccaaacaccattttaaaattgggtttacctccagggatggacgtgcaggaaaaatggggtgaagggataaacccnttgaagacgtggccccactggtagggatggtcctcttggtacttcggtgtgctcccgacccgatgggtgaccgatgacacaccctgggtggcatgcccgtgttatgttgggtttaggcgttgtcttgcattggttccaagagtggaaacagggtgttcagggctgttcacttgtttcacacaaatttttaattaaggaaacatttacccaaggggagcatcctttggactctctggttttttaaaacctttctggaaccatggactttgggagcccgggcagagtagggctgtgggctgtgggactttcagcacaacccttcaacattggctgtttcaaaggaatttacagttttacgtccatttccaagttgtaaatgctagtctttaaatttttctttttttccaataaaaaagaccgattaacttaaagtggtgttaaatgctttgtaaagctgagatctaaatggggacaaggcaggtgggaggggaggccagtgtacatgtaagatgcccacagcccagcattggggtttccctccccaaggccccagcaccaacctctgagcccaagaccttgcctgaaaacaagcagataccgattgcttcatcctatttatggacatgtaggtctagttgcattttcactggggggaggggggaaggtgaattatggtaacttttaatgatctattcaggcagtagagctcttaagaaaaaaaaaaacccactttctctcaagcatgtatttaggggttgttctcaattgtgcctgctgattacctgtcttatgtaactacttgagaccatctgcaagagacatgatttagtgtgtctgtaattcaatcttcgctgtgtgtggtagaagcagtagtcacttttgtaagccagtctcttcatgcctaaaagacactaccagtcacctttgattcgcgacttttaatttatgattatacttagcctcctcctccttttttttttttttccgaagttgacttgactttgcttttttccccccaagtagaactaatgctagcttccagcttgaaagtaaaactccagtgtggagtgaattttgtgtctaattataaacctgtaaccaaaactcagacatctggtactggtctttgcattgagattggtccctgtaaaaccccctttaaaagcatattgcatttagtacagagctcttttttgaaatgaaggctggagatgtgcattttttcacgggtgttaactgggtgtattcttatttagcaaaggagattgggggttttgagtgtttgcgtgggtgggtttcaaatttgccaggggaaccagtgggcaggctgctagcaaggcagtgaggaagctctttggcagccaaatggggtgcattcagggctgaatttaaagagacccttggcttctccttctcctactccctgtctttctgggcattttgtagcttgttagattttctgccaaagggggtgggtcagagcagtggaggggagacatcgcccatgtgcttctgctactggtccttgggctgggtggttggtagaggagatgttgacactatgagctaagggttggcttttgtaattacctgaatctgaaaggaatgcctaaggttaccttggggtttctcttctggtgagatagggttcctgggtttgagtaagttaaatgtcctgggatatttctttttgccaggggggttgtcaaagagcctgattgctggacccagtcttcaggcctgtgggtcggatgacctcttcggttagttttcaaaggggggctggagggggatattttgacttgtttttttcgaaatgtagccttctaaacc

SEQ ID NO: 132886 - DNA, 555 bp, Homo sapiens
  misc_feature (1)...(555): n = a,t,c or g
tgggttgtactcaagaattgtgtaggcgttggtcttctgatagcaacttaaatgtggttcatctctaacaagtatttagtgnaacgacagagcagagactatgatgtggaatggggctatgcttttgatgtgcatctcaatgctttttatccactcctggtcattttgcattttatccagctttttttcatcaacccattgccatttttgaaaaatacagtaattcttctgtatccatttgcacctctgattctgctctacgggctttccctggcactgggatggaacttcacccatactctctgttctttctataagtacagagtgaaataaaaagtgagaagaagattcaatcgtaactgtgtcaacagtattgtgaagtgatcatttcttgtaaaacttgtaaataaactatcatctttgtagatatcttaaaggtgtaaagtttgcaaatttgaagaaatatatattaacactgtggtcaggtacattccttaaaactaattaaatgtacatttctataataaatattttttaaactaaaaaaaaaaaaaa

SEQ ID NO: 132887 - DNA, 635 bp, Homo sapiens
gttccgagtaactcagtgaattctttagtgcaggggaacggagtcttgaattccagggatgcggcaagacaccagccggagcgaaacgctacaaatatctgagaaggcttttccgctttcggcaaatggactttgaatttgctgcctggcagatgctctacctgttcacatccccacagagagtttacagaaattttcattatcgaaaacagacgaaggaccagtgggccagagatgaccctgctttcttggtcctgttaagtatctggctctgtgtgtccactataggatttggctttgtgctggacatgggattctttgagacaataaagcttctcctttgggttgtactcatagattgtgtaggcgttggtcttctgatagcaactttaatgtgcattgccatttttggaaaaaacaagtaattcttctgtatccatttgcacctctgattctgctctacgggctttccctggcactgggatggaacttcacccatactctctgttctttctataagtacagagtgaaataaaaagtgagaagaagattcaatcgtaactgtgtcaacagtattgtgaagtgatcatttcttgtaaaacttgtaaataaactatcatctttgtagataaaaa

SEQ ID NO: 132888 - DNA, 570 bp, Homo sapiens
  misc_feature (1)...(570): n = a,t,c or g
ctctatcactatcctcggagtcatggggcagtcacatcatccctgtctctgtaatggtagctgcccctggataagtgttattaggtgattcagaagggtgggctgttgcctntgcttgaggttgcagtctgcggttcccaagccccaagacccgcctcagaactaactgcatttgcttttgactcctggcctttctctagggttgggaagaacatggaaagtgacctccctgccaaataactcagaagaggagtgtcggtagccaaaagtttcttcagaatacgtgtaaaagaaatgtttttcttccatctaggaagatgttaccgagtactttcagtgaattccttagttgcaggggaacggagtcttgaattccaggggatggcggcaagacacacagccggagcgataacgttacaaatatctggaggaaggctttttccgcttttcgggcaaatggactttgaatttgctgcctggcagatgctctacctgttcacatccccacagagagtttacagacattttcattatctganacagacgaaagaccagtgggccagagatgat

SEQ ID NO: 132889 - DNA, 1794 bp, Homo sapiens
  misc_feature (1)...(1794): n = a,t,c or g
ccggtactaatggggtaatccaatggaagagtcaagtttggcaaataacagtcttnccccatttccggtgctttaagaacaattcctcaaaaacacatttaattatggctcccccaaccccataccctgttccaattaggtttttccttcctaaaaataacttgggatcaagagaatcatttactttaatacatattccgaaaacaactcatcccactttccttccagtgttcccacggaggggaaatcgggtcccaaccaaaacagatgtaagtaaaaagtatggttccctgttttgggcttcctttgtgttaaatgacccagggaaaaaaattgttgttttcccatgttggcttcaacataatgcatcaaatatccttttcttcctctgaatcttgccctgttatccacacctgatcttttacactcaaaaattgcgtacttcaaagagtttccagtatccttccttcaaacactgccgaggtggattttccttcctggaccacacagtccgactggcagcagacacgcgcccaggtcctccttcaggcccgcgcacgcgccgccctgcggcttgtcctcataatacttaggcatgacggcgcttcccctccgatgcggacgcgactttctcccaccgcaacacttgcaaccgggtcgggagcgagcgaggccccagtctcaggggaccggaagccagcggcaacaacttccggcgggccgcggcggaagatgttaccgagtacttcagtgaattccttagtgcaggggaacggagtcttgaattccagggatgcggcaagacacacagccggagcgaaacgctacaaatatctgaggaaggcttttccgctttcggcaaatggactttgaatttgctgcctggcagattgctctacctgttncacatccccatagagagtttacagaaattttcatttatcgaaaacagacgaaggaccagtgggccaggagatgaccctgcttttcttgggttcccgtttaagtattctggcttctgtgtgtccactataggatttgggctttgtgctggacatggggattctttgagacaataaagcttctcctttgggttggactcatagatttgtgtaggcgttggtcttctggatagcaactttaaatgtgggttcatctctaacaagtatttagtgaaacgacagagccagagactatgatgtggaatggggctatgcttttggatgtgcatctcaatgctttttatccactcctggtcattttgcattttatccagctttttttcatcaaccatgttaatctgacagacacatttaattggatatttagttggaaatacccttatggttgggttgcagttggctattatatcctaaggtaactttccctgggatacagtgttggactccttttcttttccagcattgcccatttttgaaaaaatacaagtaattcttctgtatccatttgcaccctctgattcctgcctcctacgggctttcccctggcactgggatggaacttcacccatactctctgttctttctataagtacagagtgaaataaaaagtgagaagaagattcaatcgtaactgttgcaacagtattgtgaagtgatcaatttcttgtaaaacttggtaaataaactatcatctttgtagatatcttaaaggtgtaaagtttgcaaatttgaagaaatatatatcaacattgtggtcaggtacattccttaaaactaattaaatgtacatttctgtaataaatattttttaaactaaaaaaaaaaaaaaaaa

SEQ ID NO: 132890 - DNA, 891 bp, Homo sapiens
atgcctggcctgctactcttaaggggatctcagaacctcaagcagcaagcagaaatactctgtggcctgggactggcacttgttatttctgctgtcaaacctttgtccaaaaagttcatgttgccaaacccaacttcaatgaagccagaaagtgatggcatctacagcataaatctgaagaggacctgggagaagcttctgctggcaggtcatgccattgttgtcattgaaaactctgctgatgtcagtgtcatatcctccaggaatactggccagaaggctatgctgaagtttgctgctgccactggagccactccaattgctggccacttcactcctggaaccttcctaaccagatccaggcagcctactgggagccacggcttcttgtggtttctgaccccagggctgaccaccagtctctcacagaggcatcttgtgttaacccacctgccattgctttatgcaacacagattctcctctgtgccattggacattgccatcacatgcaacaacaagggagctccctcagtgggtcagatgtggtagatgctggcctgggaagttctgcacatgcgtggcaccatttcctgcaacacccatgggaggtaatgtctaatctctacttctacagagatcctgaagagactgaaaaagaagagcaggctgctgctgaaaaggctgtgaccaagaaggaatttcagggtaaatggactgtttcagctcctgagttcactgttactcagcctgaagttgcagactggtctgaaggcatgcagatctgcaatttgggcaaggctcagcagggacagctcagctcagatgctgaggatgacttctggagcctagagtcattggatggttactcacacacagtaaccttcagatga

SEQ ID NO: 132891 - DNA, 848 bp, Homo sapiens
gtccagtgcggtggaattcggcacgagcacaagggcccatacgggggggctgtggattaccgtcgtaacttaaagggaaatttttatcaatgtccggagtctcttgatggcctgctttgtgaaggaggaggatgtccttaagttccttgcagcgaggaacccactgtaggtggcaccaatcttgacttccagatggaacagtacatctatattaggaaaagtgatggcatctatatcataaggctcaagaggacctgggagaagcttctgctggcagctcgtgcaattgttgccattgaaaaccctgctgatgtcagtgttatatcctccaggaatactggccagagggctgtgctgaagtttgctgctgccactggagccactccaattgctggccgcttcactcctggaaccttcactaaccagatccaggcagccttccgggagctcacggcttcttgtggttacttgaccccagggctgaccaccagcctctcacggaggcatcttatgttaacctacctaccattgcgctgtgtaacacagattctcctctgcgctatgtggacattgccatcccatgcaacaacaagggagctcactcagtgggtttaatgtggtggatgctggctcgggaagttctgcgcatgcgtggcaccatttcccgtgaacacccatgggaggtcatgcctgatctgtacttctacagagatcctgaagagattgaaaaagaagagcaggctgctgctgagaaggcagtgaccaaggaggaatttcagggtgaatggactgctcccgctcctgagttcactgctactcagcctgaggttgcagactggtctgaaggg

SEQ ID NO: 132892 - DNA, 623 bp, Homo sapiens
aagtactcacagcggacggtggtttttgggcccgtttctgagcagcgcttcctttttgtccgacatcttgagacgaggcttgcggtgtctgctgctattctcccggagcttcgccaatgccgccttaaggacggaccaggaaggaaggaaggaccgctggaaaagtccggcccaaggaaaggccaaagaccccagtgaaccaaatccggggggcaagggccaaaaaggaagaattggtccaaaaggcaaaagttccgggacaagcttcaataactttagtcttgtttgacaaagcttacctatgataaactctgtaaggaagttcccaacttataaacttataaccccaagcctgtggtctcctgagagacttgaagattcgaggctccctggccaagggcaagccctttcaggaagctccttaagtaaaaggacttattcaaacttggtttcaaagcacagagctccaagtaattttacaccaggaaattaccaagggtgggaggatgctcccagcttgctgggttgaagattgcatgaataggtccaaccaggctgtacattttggaaaaataaaactttattaaatcaaaaaaaaaaaaaaaaaaaaaaaaaatttcatt

SEQ ID NO: 132893 - DNA, 365 bp, Homo sapiens
  misc_feature (1)...(365): n = a,t,c or g
agggcatggcgggtcagttccgcatctacttgtgggacccgctgctgatcctgtcgcaaatcgtcctcatgcagaccgtgtattacggctcgctgggcctgtggctggcgctggtggacgggctagtgcgaagcagcccctcgctggaccaaatgttcgacgccgagatcctgggcttttccacccctccaggccggctctccatgatgtccttcatcctcaacgccctcaccnnnnnnnnnnnnnnnnnnnnnnnnnnnnnnnnnnnnnnnnnnnnnnnnnnnnnnnnnnnnnnnnnnnnnnnnnnnnnnnnnnnnnnnnnnnnnnnnnnnnnnnnnnnnnnnnnnnnnnnnnnnnnnnnnngg

SEQ ID NO: 132894 - DNA, 452 bp, Homo sapiens
gtaaaatgagaataatccctttccacctgctgtgagaaacaaatgaaatcccataatggatgtctatgaaagcacctattggaaataggctgccgtacagatgtagggaggtattatcttctgtgctctgggaagaatgcttgttccttaggaggcttgctgagatcctggggctctgccaagtcacttctccagtatatttccatttgtgattccccctcagatcctgggcttttccacccctccaggccggctctccatgatgtccttcatcctcaacgccctcacctggtgagtatcaccagttttgctatccagcttttgggctcttagtgctgggactaacttcctaagtttgaacatgagacaggctggcacttgtttatggggagtggtggagtaaagtgggtgacagaggccagttccgggaccctcgtgccaagctgagcgta

SEQ ID NO: 132895 - DNA, 1484 bp, Homo sapiens
  misc_feature (1)...(1484): n = a,t,c or g
cggaaacgtttctttcctacgcagccgctcctgccgtcgtggtcgctggagctttgcctctctaggccggcagcgcctctcctacatggtcctgtctgtcagcgctgttttgggagcccgccggtagaggccgggccacgctcagacacttggatcgccgagtctggcactgggcatggcgggtcagttccgcagctacgtgtgggacccgctgctgatcctgtcgcagatcgtcctcatgcagaccgtgtattacggctcgctgggcctgtggctggctgctggtggacgggctattgcgaatcagcccctcgctggaccagatgttcgacgccgagatcctgggcttttccaacccttccaaggccggctctccatgatgtccttcatcctcaacgccctcacctgtgccctgggctttgctgtaatttcatccggcgaggaaaagcagtgtctggatttcactgtcactgtccatttctttcacctccttgggctgctgggttctaacagctccccgttttccccttcgggcggctgaaccttggtgggcttgggtccaaagcccgttgttgcattgcactcattggctgtcatcggggagtacctgtgcatgcggacggagctcaaggagatacccctcaactcagcccctaaatccaatgtctagaatcaggccctttggacatcctgctgacacttgggccccttaacaccttgggctgctcagaccctccagattgaggtccagcccagatctgagaggaaccctggaaatgtgaagtctctgttggtgtgggagagatagtgagggcctgtcaaagaaggcaggtagcagtcagcatgacagctgcaagaatgacctctgtctgttgaagccttggtatctgagaggtcaggaaggggacctctttgagggtaataacataattggaaccatgccactcttgagccccaaatacctgtcaccagcctgttgttttaaaaaaaaaaaaaaatccagggatatttgatgggagcaaaccacttctttagtcatctgtcttacctccctgggaccgcttgtaacttttgcagtgttgccgaatcacagcagttacctttgcagtgttgccgaatcacagcagttctgttggagaaacgcttggtttccggatccagagccacagaaagaaatgtaggtgtgaagtattagggctgctgtcaggggagagggatgggcagatgggagggcatcaaggcacaagggaaaatggcacaacctgtgcccctgtttattacacacgtttcatgttgcaccccaaggaacctatgactttctttccagtttcctttttaccagggtccccatactgctgccagctctcaacattgccaggccattagggcccagagaagaatccccagtgttggtccaaagccttaaccatcattaagacactggctgtntttttagggatggcccaggganccaggtcccactg

SEQ ID NO: 132896 - DNA, 1066 bp, Homo sapiens
atggccgaactgacagtaatgagatttcacacggaaccacaaggcagtgaaggtctgagacttcccagaatatcaggttccaagcccaaacaaatgcatgtaacctggttagaacccctggaaaatggcatttgtaatggaaacactggtaacgcacagctgctgatcccgcccggagtgatcttccataaatacccatctcattatgtcactgccatgcttaaaagcctcaagtggccaccattacaaacagaattaacttccagctccggccaggctctctggggactggttggaggtggcagcccccacaggcaggctagcacagaaaagctgttttcagagaaggttccaaagacagcagaaaattttccgtgctctgaactttcatgctttcatggagagaacggatttgggttataaggggttccctgctttcacagattatttcccagggtttatgctgtcaggggtggtgactttcacaccgccataaatggcacctggtggcaagtcccatcctatggggaagaaatttgaaggatgagaaacttcatccctaaagcataccgggtcctggcgatcttgtcccatggcaaaatgctggaccccaacacaaatggttccccagtttttttaacatcttgcactgcccaagaactgagtgggttggatggcaagccttgtggtgttttggcaaaagtgaaagaaaggcatgaatattgtggaggccatggagcggctttgggtccagggaatggcaagaccagcaagaagatcaccattgcttgactgtgggacaactccgaataaagtttgaccttgtgttttattctttaaccaccagattcattcccttctgtgctctcctctcagggagagcaccccctccaccccatttggctcggagtaatcctagaatctatgtggctctgcgctgcaagttcccttttggtttccatgttttccttgttccctcccatgcctaggtggattaaaaagttcccctttatgattattgaaataaaaacctaattaccatttgtcaaaaaaaaaaaaaaaaaaa

SEQ ID NO: 132897 - DNA, 454 bp, Homo sapiens
tgagagagttggttggtgttgggccggaggaaagcgggaagactcatcggagcgtgtggatttgagccgccgcattttttaaccctagatctcgaaatgcatcgtgattcctgtccattggactgtaaggtttatgtaggcaatcttggaaacaatggcaacaagacggaattggaacgggcttttggctactatggaccactccgaagtgtgtgggttgctagaaacccacccggctttgcttttgttgaatttgaagatccccgagatgcagctgatgcagtccgagagctagatggaagaacactatgtggctgccgtgtaagagtggaactgtcgaatggtgaaaaaagaagtagaaatcgtggcccacctccctcttggggtcgtcgccctcgagatgattatcgtaggaggagtcctccacctcgtcgcagatctccaagaaggagaa

SEQ ID NO: 132898 - DNA, 981 bp, Homo sapiens
atgcgttgggcctgtgacttcacgaagctgctttcttccacctggaccctgatacagtacccagagaatgccatgattatagcccggtgggctcttcttgccgactgccctgagaaaaccaaggcactgagaacaacagaagatggaatcgtagatgctgccaattttgagcagtttttgcaagaaaggatcaaagtgaacggaaaagttgggaaccttggtggaggggtggtgaccatcgagaagagcaagagcaagatcaccgtgacatccaagggtcactttcaattctatgtaaatttgaggatcagcttcctcatttgtggaaaagaaaaggctgttggaattttagaagagattgtgttgaatttgctgatcattttcagtagtattgacatcttaacagtgaaagggacctgctccggctgcgagagaggcttcttcttggagatctacgacgaggtggaagactcctcctatgataatcatctcaaggacgatgaccccaagagggagggacctggtgctgagcaagctttatcaacaccgccctgctgtccgttagagaaaaggcccattaatgatcagacgctgattatttcttggtcaggaagtacgaatgtgatagaagaagctggaaggcattctgtggttcaggaaggctggggggcactgggtgtgctcagaactacactgcccagcttgccgcagataacaggaggcgcagggttcgtgggctcccatctaactgacaaactcatgatggacggccacgaggtgaccgtggtggacaatttcttcacgggcaggaagagaaacgtggagcactggatcggacatgagaacttcgagttgattaaccacgacgtggtggagcccctctacatcgagggcagagctgagaaccagctgagccatactgtgcccggtcctgtagacctgtcagatcggatcgtgaatggatattttttgagcctctaa

SEQ ID NO: 132899 - DNA, 1443 bp, Homo sapiens
atgacaaacccccacagccaatgtcataccgaagagcaaaaagctgaaaacctctcctctaagaactggaacaagacaaggatgcccacttttaccactcttactcaggtagcacccaatcccatcactggatatacatccaaaggaaagaaaatcagtacgttaaagagatatctggctttctgcctccgctgctgccatggtgcccgtgagaaagcttgtggagaaggcgggcaaaaaacaaagcaggttctgaggttcactcttggttgcacccaccccatagaagatggaatcatagatgctgccaattttgagcagtttttgcaagaaaggatcaaagtgaacggaaaagttgggaaccttggtggaggggtggtgaccatcgaaaagagcaagagcaagatcaccgtgacatccaagggtcactttcaattctatgtaaatttgaggatcagcttcctcatttgtggaaaagaaaaggctgttggaattttagaagagattgtgttgaatttgctgatcattttcagtagtattgacatcttaacagtgaaagggacctgctccagctgcgagagaggcttcttcttggaaatctgcgacgaggtggaagactcctcctatgataatcatctcaaggacgaggaccccaagagggaggaatgcaggaaacgtgatgcctatgcccctctaaaagatcaagggaacgcagagaagagacgacacaatgtcaggaaatcgtggcccctgctttctgccaagctcctcaagataaggacaaatcttacaggaacagaagaagctgaactacatgccaatcacattcaacaagttcctatcaaatgtctgagctacaagttgacagaaaggaaaaatggaacacaaaagcacttgcattatgcactcatattacatgtgaagtgtgaccggagagagaccagcaaattcacaaaattctatgggacccaccctctgacagcactgtttgttcccagagcatgggatgggcctccttctgctctccctgagtctgagcttgcggtcttcttggtggcttatgaagggaacacgctgctccacctgtttctaagtggggctgagcaaaggggaaacagttctttaaaagagagggctggccgggcgcgcttcagccatcagagaaagttgaatgaacaaacgatacccccagacaaccttaccaagtcatctgtagacttacagtcaagttttagtgcagttcaccctaattcacaaccaacagtttgggttgatatgcctgcccatccactctcacagtaccttgtacctgcccgaaagacagtcctcccaatttggtatggaaattcttgccctgatgtgatatttggctctctatcagacagcaagctcagtgaaggcaaggagtttgcccttccactcaagttcctcaattttttttaa

SEQ ID NO: 132900 - DNA, 831 bp, Homo sapiens
tagaaagatgtcgcgttttcttttaatgaatgagagaagcccatttgtatccctgaatcattgagaaaagcaacagatacaactgacagtcacactttttaaaatcaaacagtcactaccttcagcccacacctccacacccgcatctgcctccccaatggctgtcagttcggtaaagtcaccctctccttctactctggtattaccacgagaattgaaatttttaagcagaaaaaaaaagaagtcaagttacaaataaatgagtggcgaaccaagggaagccctttgactatgatttccaattttctgttcaatccacactgcagagatacaaggataaaccaccattttggttcccaagtttaattcaagaactcatacaaaattttcccggataaatgaaatttaatcttcgtcatcctcctcttctttctgttctggttaatctggaagtaacggaaattcggtaacttctcctttggctggttaggcaaactacgcggcaaaccaggtcaccgtagattattcttcttcaaatatttttttggttgagatattttcaaatacccttttggagaaaggcacctcggatgtcacggtgatcttgcctcttgctcctttcgatggtctaccacccctccaccaaggttcccagcttttccgttcactttgatcctttcttgcaaaaactgctcaaaattgggcagcatccatgattcccatcttctacagggtgggtgcaatcaagagtgaacttcagaacttgcttctttttttttgccccccttcaccacaagctttttcacaggagccatggcggcagcggagtta

SEQ ID NO: 132901 - DNA, 303 bp, Homo sapiens; identical to SEQ ID NO: 121768

SEQ ID NO: 132902 - DNA, 473 bp, Homo sapiens; identical to SEQ ID NO: 121769

SEQ ID NO: 132903 - DNA, 649 bp, Homo sapiens; identical to SEQ ID NO: 121770

SEQ ID NO: 132904 - DNA, 1188 bp, Homo sapiens; identical to SEQ ID NO: 121771

SEQ ID NO: 132905 - DNA, 486 bp, Homo sapiens
atatgtaccaaggcctggagacaggaaaatgaatgctgagggactgactcagtggttctaccatttcccactctcgaatgtgtcagtatgtagcacttcataggcaagcaggttaacctgcatccacttttcagccagttggctttccgagaataggtgcttagggttacttgaatgagaaggtagaaggagggacagagggctggataagccttgctgctgcctaataaatagccatgggagggcccaggctcatattactcatcctggggtttccctgcaagctgcatggagcagcctatggcaaaggcatctacctgagccccatctccagtatttcctttggatactcaggtaagaaatattctgtggccaccttgactctatttacattgcctccatttgtgaatacatgatttgtgctgtctgttcctccctcattatggatacttggtctgtgtcaactctcttcccgatcatggatac

SEQ ID NO: 132906 - DNA, 652 bp, Homo sapiens
ttgaaaaagatcctgggtatgtttacatcccaattttggaaacatctgagcaatgatttcttgaagacccagcaggagaagaggcacagttggttcaaggcaagtggtaccatcaagaagttccgagctggcctcagcatcttttcacccatccccaagtctcccagtttccctatcatacaggactccatgctgaaaggcaaactaggtgtaccagagcttcgggttgggcgcctcatgaaccgttccatctcctgtaccatgaagaaccccaaagtggaagtgtttggctaccctcccagcccccaggtcagtggtcactgcaagaacattcccactctggagtatggattcctcgttcagatcatgaagtatgcagaacagaggattccaacattgaatgagtactgtgtggtgtgtgatgagcagcatgtcttccaaaatggatctatgctgaagccagctgtctgtactcgtgaactatgcgttttctccttctacacactgggcgtcatgtctggagctgcaaaggaggtggccactggagcaaaggtggtggatctgctggtggccatgtgtagggcagctttatagtcccctagaaagagcatcatctttgagccctaatcctttgggggggaaccccactgat

SEQ ID NO: 132907 - DNA, 2625 bp, Homo sapiens
  misc_feature (1)...(2625): n = a,t,c or g
atgcatgtacagcatagagttcaggctggagtggagagtctgtacaagagcaccaacgaccacacgggacagtcgacacaacacaaacaagaaaaaagtcttctcctggcaaagggaacagggatgcctgcagggcagctgaagttcatgcacacctcacaccagttcctcctgctgagcagccctcctgccaaggaggctcggttccggaccgccaagaagctctatggcagcacctttgccttnccagtgtacctgtccatcttcatgtcctgtgtgggtgagaatggtgggtcccacattgagaactggcattcgatcctgcgcaatgggctggtcaatgcatcctacaccaaactgcaggacatcaaaggccagttctggaatgatgacgactcggagggagataatgaatcagaggaatttctctatggcgttcaggggagctgtgcagctgacctgtatcgacacccacagcttgatgcagacattgaagccgtgaaggagatctacagtgagaactctgtatccatcagagaatatggaactatcgatgacgtggacattgccctccacatcaacaatcagtttcctggaatgaagaagtctctacagcctgggaaggtcctccggacagaaccttattgtgttgaggctgcgatttttttctctcccagtacctagatggaccagacccatcccattgaggttttccagccatcaaataaggaaggatttgggctgggtcttcagttgaaaaagatcctgggtatgtttacatcccaacaatggaaacatctgaggcaatgatttcttgaagacccagcaggagaagaggcacagttggttcaagggcaagtgggtaccatcaagaagttccgagctgggccttcagcattctttttcacccatccccaagtcttcccagttttccctattcataacagggactccatggctggaaagggcaaactaggtgtaaccagagcttcgggttgggcgcctcatgaaccgctccatctcctgtaccatgaagaaccccaaagtggaagtgtttggctaccctcccagcccccaggcaggtctcctgtgccctcagcacgtgggcctccctcccccagcacggacctctcctttggtcagtggtcactgcaagaacattcccactctggagtatggattcctcgttcagatcatgaagtatgcagaacagagtgattccaacattgaatgagtactgtgtggtgtgtgatgagcagcatgtcttccaaaatggatctatgctgaagccagctgtctgtactcgtgaactatgcgttttctccttctacacacttgggcgtcatgtctggagctgcagaggaggtggccactggagcagaggtggtggatctgctggtggccatgtgtagggcagctttagagtcccctagaaagagcatcatctttgagccttatccctctgtggtggaccccactgatcccaagactctggcctttaacccctaagaagaagaattatgaagcggcttcagaaagctctgggatagtgtgatgtctattccgggagatgacccagggctcataatttggaaatcaagaaacagatggacaaagtttggatccccctgggcccatcctctcctgcagtggatcatctctagcaacatggtcacacattgtcaaactacctctcagcaggcagctgaagttcatgcacacctcacaccagttcctcctgctgagcagccctcctgccaaggaggctcggttccggaccgccaagaagctctatggcagcacctttgccttccatgggtcccacattgaggaactgggcattcgatcctggcggcaatgggctggttcaatggcattcctacaccaaactgcagctgcatggagcagcctatggcaaaggcatctacctgagccccatctccagtatttcctttggatactcaggaatgggaaaaggacagcacaggatgccctccaaggatgagctggtccagagatacaacaggatgaataccatcccccagacccgatccattcagtcaccggttcctgcagagtcggaatctaaactgtataggcactttgttgaagtgattacatctaaggacctccagaaggcatggggaacatctggggtgttgccctgtgttccgacccatgtcctgcacaagattccttcctttgtaatatgaggatggtccaggtgggcgatgcccaacattatatacctcacggaccccagagagtacacgagagggaaatcagtgcgtgttgatcgggagactcacggtttacacaaagctcgagggggccccaggccctcggtacccacccctgttacccccaggatccatctgcccctcataaaagtgttcaggtaacacggctgaggctgccctgaggaatcaaggggccattaccaaggggcaaggaaaaggatatgtaagaggtggccttcatggtagagcttgacccaagaactactccacattcggatggcccagactgactccatcccctgactttcccttttgacttcaccctgtttgtaaataaaacaataaaatggaaggtgctgtggattggaaaaaaaaaaaaaaaaaa

SEQ ID NO: 132908 - DNA, 486 bp, Homo sapiens
  misc_feature (1)...(486): n = a,t,c or g
ggggcggccnnnnncatctgagatattgatanctcgtgccgaaagnccatgaagctaccggccagggttttctttactctggggtcccggctgccctgtggcctcgctcctcggagggaagatggatgttttgaaagctaccgcagaacaaatttcttctcaaactggaaataaggttcatgcaattcagtgtgatgtgagggatcctgatatggttcaaaacactgtgtcagaactgatcaaagttgcaggacatcctaatattgtgataaacaatgcagcagggaattttatttctcctactgaaagactttctcctaatgcttggaaaaccataactgacatagttctaaatggcacagccttcgtgacactagaaattggaaaacaactaattaaagcacagaaaggagcagcatttctttctattactactatctatgctgagactggntcaggttttgtagtaccaagtgcttctgccaa

SEQ ID NO: 132909 - DNA, 638 bp, Homo sapiens
aaaaatgcagcagggaattttatttctcctactgaagactttctcctaatgcttggaaaaccataactgacatagttctaaatggcacagctttcgtgacatttctttctattactactatctatgctgagactggttcaggttttgtagtaccaagtgcttctgccaaagcaggtgtggaagccatgagcaagtctcttgcagctgaatggggtaaatatggaatgcgattcaatgtgattcaaccagggcctataaaaaccaaaggtgcctttagccgtctggacccaactggaacatttgagaaagaaatgattggcagaattccctgtggtcgcctggggactgtagaagaactcgcaaatcttgctgctttcctttgtagtgattatgcttcttggattaatggagcagtcattaaatttgacggtggagaggaagtacttatttcaggggaattcaacgacctgagaaaggtcaccaaggagcagtgggacaccatagaagaactcatcaggaagacaaaaggttcctaagaccactttggccttcatcttggttacagaaaagggaatagaaatgaaacaaattatctctcatcttttgactatttcaagtctaataaattcttaattaac

SEQ ID NO: 132910 - DNA, 411 bp, Homo sapiens
tttcgtacatgaagctaccggccagggttttctttattttttggtcccggctgccctgtggcctcgctcctcggagggtaaggcggccgggggcgcggggagcgaggacagggcgtctcgacgcgcaaagagagaggacagggcgtcacgggggcttggggagcgaggacaaggcatcctggggcgcaaagagagaggacagggcgtcccgggggttcggggagcgaggacagggcatcccgaggcgcagagagagagaggacagggcgtcccggggcctcggggagcgaggacagggtgtcccggggctcaaagagagaggacagggcgttctggagcgcttagagagcacataagcaaccccgcgagcgagagagaggacaggacgtctcggggcgcaagaaaaagggg

SEQ ID NO: 132911 - DNA, 1584 bp, Homo sapiens; identical to SEQ ID NO: 120694

SEQ ID NO: 132912 - DNA, 1328 bp, Homo sapiens
acgccgcctgggtcccagtccccgtcccatcccccggcggcctaggcagcgtttccagccccgagaactttgttctttttgtcccgccccctgcggcccaaccgcctgcggcggcttccggcccgagttctggaggattaacatgaagctaccggccaaggttttctttactcttgggtcccggctgccctgtggcctcgctcctcggaggtttttcagttatgggacaaaaatattatatcaaaacactgaagctttgcaatctaaattcttttcacctcttcaaaaagcgatgctaccacctaatagttttcaaggaaaagtggcattcattactgggggaggtactggccttggtaaaaggaatgacaactcttctgtccagcctaggtgctcagtgcgtgatagccagccggaagaatggatgttttgaaggctaccgcagaacaaatttctttttcaaactgggaaataaaggttcatgcaattcagtgtgatgtgagggatcctgatatggttcaaaacactgtgtcagaactgatcaaagttgcaggacatcctaatattgtgataaacaatgcagcagggaattttatttctcctactgaaagactttctccctaatgctggaaaaaccaaaaacgaacatagtctaaaatggcacagccttcgtgacactagaaatgggaaaacacctaataaaagcacagaaaggagcagcatttcttttctattactacctatctatgcctgagactgggtcaggtttttgtaggtacccaagtgcttctgcccaaagcagggtgtgggaagcccatggagcaagtctcttgcagctggaatgggggtaaaatatgggattgcggattccaattgtggattccaaccaggggcctataaaaaccaaaaggtgccctttacccgtctggacccccaacgggaacatttggagaaaagaaaatgattgggcagaaattcccctgtggttcgccctggggacttgtagaagaactccgcaaatccttgcctgctttccctttgtagtgattatgccttcttgggattaatggagcagtcattaaatttgaccggtggagaggaagtacttattttcaggggatttcacacgacctgagaaaggtcacccaaggagcagtgggacaccatagaagaactcatcaggaagacgaaaaggttcctaagaccactttggccttcatcttggttacagaaaagggaatagaaatgaaacaaattattctcttcatctttttgactattttcaagtctaataacttcttaattaacaaacaaaaaaaaaaaaaaaa

SEQ ID NO: 132913 - DNA, 432 bp, Homo sapiens; identical to SEQ ID NO: 117470

SEQ ID NO: 132914 - DNA, 211 bp, Homo sapiens
gaaatccctttggaccaggtggacatagacaaagagaatgagatgcttgtcacagtggcgcatttccacaaagaggtcttcggaacgttcggaatcccgtttttgctgaggatacaccagtttaaaattgcaattgtaatgatggaccgacaccagtacataaatgaagacgagtatgaagtaaatttgaaagactttgagccacagcccg

SEQ ID NO: 132915 - DNA, 242 bp, Homo sapiens
atggtgtcctatatccagcgtaaagaagtagactatcggtctgatagaagagaagattattatgatatccagctaagtatcgaaggaaataaaaatatatttgaatcatttgtgaattatatggcagaagaacagctcatcctggttcatagtagagataatcatggtagacattatgtggtttatctaaaccccaaaggggatggcaaatggtgtaaatttgatgatgatgtggtgtcaag

SEQ ID NO: 132916 - DNA, 734 bp, Homo sapiens
tcctggttcatagtagagataatcatggtagacattatgtggtttatctaaaccccaaaggggatggcaaatggtgtaaatttgatgatgatgtggtgtcaagttggtggaacgactctaagaagagaaaaggatcaacgctcagaaggtggacagaatggcaggaagtccatctctatatgcaagcgcaggtagcctcagaggaccagttttgtggccaccagggaaatgacatgtacgatgaagaaaaagtgaaatatactgtattcaaagtattgaagaactcctcacttgctgagtttgttcagaacctctctcagatcatggaatttccacaagatcaaattcaactgtggcccatgcaagcaaggagtaatggaacaaaacggccagcaatgttagataatgaagctgatggcaataaagcaatgattgaggtcagtgataatgaaaactcttggacaatattcctggaaacagtcgatctcgagctggctgctagtggagtgaccttacccaagtttgataaagctcatgatgtaatgttttttttgaagatgtatgatcccaaaatgcggagcttgaattactgtgggcatatctacacaccaatatcctgtgaaatacgtgacttgctcccagttatgtgtaacagagcaggatttattcaagatactagccttatcctctatgaggaagttaaactgaatttaacagagagaattcaggactaa

SEQ ID NO: 132917 - DNA, 659 bp, Homo sapiens
tcgggaccatttcctgagaaggtgttctgtaaatgacaggcttcttgcatcaaggccacttttgttaacctcccgtcagtatttggttggtcctagattagggccagtgtcctcactgtgagtgaaattccacagatgaagggagttggggtgggaatgaaaagccaagaacatgggggcccagctggggacagttgagaacaatgatgcaactttctcctctcttcctttgtggtagcagaccttttatgctttcttgaaagcacttattttatcttttcattacttaggaaataacactatatccagacaagcatgggtgtgtccgggacctgttagaagaatgtaaaaaggccgtggagcttggggagaaagcatcagggaaacttaggctgctagaaattgtaagctacaaaatcattggtgttcatcaagaagatgaactattagaatgtttatctcctgcaacgagccggacgtttcgaatagaggaaatccctttggacctgttagaagaatgtaaaaaggccgtggagcttggggagaaagcatcagggaaacttaggctgctagaaattgtaagctacaaaatcattggtgttcatcaagaagatgaactattagaatgtttatctcctgcaacgagccggacgtttcga

SEQ ID NO: 132918 - DNA, 591 bp, Homo sapiens
tcaaactgttaggttttagcagttaaatcaggatgtatagaacagtttactccatgtcgattaatgctagtgcttttggtcaatgcacaggctctgtgactgatgatgtgttttttttgcagacaccagttggcgctccgaggcaacctttcagttcactgtggagcgcttcagcagactgagtgagtcggtccttagccctccgtgttttgtgcgaaatctgccatggaagattatggtgatgccacgcttttatccagacagaccacaccaaaaaaagcgtaggattctttctccagcgcaatgctgaatctgattccacggaagacagtttaaatgatgcaactacaaacccccacatcgtggcatttcattactggaagccaaatttgaacagcctagtgtagttttatcttaagatatttgctgtctctacatagccttttgattctgaattagattaaatacgggtttctctttaaaacccacgtggatatgtataatatccaagctagaaaaggatatttttatcttgtaagtgaaaaaactaaaaatagtttgttagaatctccagcatcccccctcaaacct

SEQ ID NO: 132919 - DNA, 5546 bp, Homo sapiens
  misc_feature (1)...(5546): n = a,t,c or g
gtacgtgcgcgtctccctgccgccgccgccgcccgccgcgggccgccccggggccgccgtcgccgacgacgcgcgggaggaggaggaggaggccgccccgccgccgccgccgccgccgccgccccggctcgccgccgcccgcccgccgggctcgcagccccggcccccggccgcaggcgaggcccaggccgcggccgacatgaaccaccagcagcagcagcagcagcagaaagcgggcgagcagcagttgagcgagcccgaggacatggagatggaagcgggagatacagatgacccaccaagaattactcagaaccctgtgatcaatgggaatgtggccctgagtgatggacacaacaccgcggaggaggacatggaggatgacaccagttggcgctccgaggcaacctttcagttcactgtggagcgcttcagcagactgagtgagtcggtccttagccctccgtgttttgtgcgaaatctgccatggaagattatggtgatgccacgcttttatccagacagaccacaccaaaaaaagcgtaggattctttctccaagtgcaatgctgaatctgattccacgtcatggtcttgccatgcacaagcagtgctgaagataataaattacagagatgatgaaaagtcgttcagtcgtcgtattagtcatttgttcttccataaagaaaatgattggggattttccaattttatggcctggagtgaagtgaccgatcctgagaaaggatttatagatgatgacaaagttacctttgaagtctttgtacaggcggatgctccccatggagttgcgtgggattcaaagaagcacacaggctaccgtcggcttaaagaatcagggagcgacttgttacatgaacagcctgctacagacgttatttttcacgaatcagctacggaaaggctgtgtacatgatgccaaccgagggggatggattcgtcttaaaagcgttccctttagcattacaaagaagtgttctatgaattacagcatagtgataaacctgtaggaacaaaaaagtttaaccaaagtccatttggggtgggaaactttagatagcctcatgccacatgatgttcaggagccttgtcgagtgttgctcgataatgtggaaaataagatgaaaggcacctgtgtagagggcaccatacccaaattattccgcggcaaaatggtgtcctatatccagtgtaaagaagtagactatcggtatgatagaagagacgattattatgatatccagctaagtatcaaaggaaagaaaaatatatttgaatcatttgtggattatgtggcagtagaacagctcgatggggacaataaatacgacgctggggaacatggcttacaggaagcagagaaaggtgtgaaattcctaacattgccaccagtgttacatctacaactgatgagatttatgtatgacccctcagacggaccaaaatatcaagatcaatgataggtttgaattcccagagcagttaccacttgatgaatttttgcaaaaaacagatcctaaggaccctgcaaattatattcttcatgcagtcctggttcatagtggagataatcatggtggacattatgtggtttatctaaaccccaaaggggatggcaaatggtgtaaatttgatgacgacgtggtgtcaaggtgtactaaagaggaagcaattgagcacaattatgggggtcacgatgacgacctgtctgttcgacactgcactaatgcttacatgttagtctacatcagggaatcaaaactgagtgaagttttacaggcggtcaccgaccatgatattcctcagcagttggtggagcgattacaagaagagaaaaggatcgaggctcagaagcggaaggagcggcaggaagcccatctctatatgcaagtgcagatagtcgcagaggaccagttttgtggccaccaagggaatgacatgtacgatgaagaaaaagtgaaatacactgtgttcaaagtattgaagaactcctcgcttgctgagtttgttcagagcctctctcagaccatgggatttccacaagatcaaattcgattgtggcccatgcaagcaaggagtaatggaacaaaacgaccagcaatgttagataatgaaggccgacggcaataaaacaatgattgagctcagtgataatgaaaacccttggacaatattcctggaaacagttgatcccgagctggctgctagtggagcgaccttacccaagtttgataaagatcatgatgtaatgttattttttgaagatgtatgatcccaaaacgcggagcttgaattactgtgggcatatctacacaccaatatcctgtaaaatacgtgacttgctcccagttatgtgtgacagagcaggatttattcaagatactagcctttatcctctatggaggaagttaaaccgaatttaacagagagaattccaggactatgacgtgtctccttgataaagccccttgatgaactaatggatggtgacatcatagtatttcagaaggatgaccctgaaaatgataacagtgaattacccaccgcaaaggagtatttccgagatctctaccaccgcgttgatgtcattttctgtgataaaacaatccctaatgatcctggatttgtgggtacgttatcaaatagaatgaattattttcaggttgcaaagacagttgcacagaggctcaacacagatccaatgttgctgcagtttttcaagtctcaaggttatagggatggcccagggtaatcctcttagacataattatgaaggtactttaagagatcttctacagttcttcaagcctagacaacctaagaaactttactatcagcagcttaagatgaaaatcacagactttgagaacaggcgaagttttaaatgtatatggttaaacagccaatttagggaagaggaaataacactatatccagacaagcatgggtgtgtccgggacctgttagaagaatgtaaaaaggccgtggagcttggggagaaagcatcaaggaaaacttaggctggctagaaattgtaagctacaaaatcattggtgttcattcaaggaaggtggaactattaggaatgttttattctcctgccaacgagccggacgttttcgattagggggaatttcttttgggaccaggtgggacataggacaaagagattgagatgcttgtcacagtggcgcatttccacaaagaggtcttcggaacgttcggaatccccgtttttgctgaggatacaccaggggcgagcatttttcgagaagttgatgaaggcgaatccagagcctgctgggacatccagggagaagggatttttaggaagttttaaattttgcaattgtaaatgatggggccgacaccagtacataaaatgaagaccgagtatgaaagtaaatttgaaagacttttgagccacagccccgntaatatgtctcatcctcggccttggcttagggctcgaccacttcaacaaagccccaaagaggaagcgcgttcccttatctttgaaaaggccattaaaatccataacttgatttccaagctggtgtgttcaaggccgaggacgggtgtgtggggtgggccccttaaacagcctaggaactttgggtgcacgtgccctctaggccgaagtctttcagcaagagggatttcgctgctgggtgtttaatttttatttttatttgagggctgtttcagttttggcttctctgtaatctatttgaacttgccctttttttgaggcaaaattgaaggatgtttttaataaaagcttgggatgcccaatgaaaagttattttatgggtaacccacagtgtcaaggcaactgttcagcgcaatggggggagaagaggttagtgggatcggggggtcccctggnctcaaggtctctggggctgtcccctagtggggcacgagtggctccggctgcccttcctggggggtcccgtgcaaccagccctgcagctaagcaagtcttgtgttttaggctcctcttgacctatttcctatcagttatacttttatattgaccttttgtgcatcttgttaaggccaaaacgggggaaactccacaaccctaaataaatagcgctccttccccttccaatgtgtgccattgtcggcccttccctcggggttctccctccctcccagctgcctgggggctttttaataaacttgtcctcaccctcgtcagcccactacttgtctgcagcccctttgcaaagtggatgcactgaaatacagtccggacagaacattgtaaggggtctttttattaaatcaagaacattgttaaattcaattaaggtttactctgctgccttggcagacttacgatctcaacaggttcatacgagcaggtgaaaggattataaatagaatttcgttaaagtggaacaggacgacaagaaagcccttttagcaagagggccatgctccacgagtggttagttaagcctgtcgactttgtaaaaaagttaaaaaagaaaaaaaaaaggaaaaaggaattgtaatatttaatgaatgaacatgtaccaatttgcccactgggaggaggttcctttttgttgggtgagtctgcaagtgaatttcactgatgttgatattcattgtgtgtagttttatttcggtcccagcccccgtttccttttattttggagctaatgccagctgcgtgtctagttttgagtgcacgtaaaatagaatcagcaaatcactattatttttcatccttatccggtattttatgggatgtttctgtcagagcagtgtacaacaactcttcctgtatattgcccttcagttgaaaaatgttgaatgatgaatagaattttctataaaaattataattcagtgagttacgtggaaggggaggaagatttctactctccctggaaacaggcctgggaaaccttggcatttgtaacaaggtttcactgagatgtacttttccttctaattccggtttgcgggggcagggtctcttgtttcttttttttttttagcctctaactagtcacatttactcttaagaaatgaaaggttttccaggagagaactgtgtacaaataaggtgactggagatgtgacctgatgtgtcacgaggcccttcggggcggcaggcgctatcgtgggcgtggtccttgcaccgtcccatcggccttgccttccagctccgtggcacggtttcctggtctttgggccagtgtgtaccttggagcgacttcctttctcaacttccactgcagtgtgtgtgccttctgctctgagagctgccttgtgacccgtgtgatagaaagcagggagtgagggtccccgcggacctggcccttccctccttcctcccccagaaagaggagttagagcaggggtgcgagagccgttcgctgtgggtttgtctttgaacaaacattaaggctgctctcgtctttgttctgggctgggggctggctgtagtcttaggtacctgaaagttcctactctccctcaaggtcttaactgactcttttctcc

SEQ ID NO: 132920 - DNA, 450 bp, Homo sapiens; identical to SEQ ID NO: 132743
  misc_feature (1)...(450): n = a,t,c or g

SEQ ID NO: 132921 - DNA, 1046 bp, Homo sapiens
cccagtcaggacacagcatggacatgagggtccccgctcagctcctggggctcctgctacttcggctccgaggtgccagatgtgacatccagatgacccagtctccatcctccctgtctgcgtctgtaggagacagagtcaccatcacttgtcgggcgagtctggatattagcaggtggttagcctggtttcagctgaaaccaggggacagtccctaagctcctgatctatgctgcatccactttgcaaagtggggtcccatcaaggttcagcggcagtggatctgggacagatttcactctaaccatcagcagcctgcagtctgaagatattgcgatgtactattgtcagcaatataataattggcctcagctccgtacactttcggcccctgggaccaaggtggaaatcaaaacgaaactgtgggctgcacgcatctgttcttcatcttcccggcccatctgatgaagcagttgaaaatctgggaactgccttctgcttgtgtgccctgcttgaaaaaacttctaatccccagagtaggccaaaaagtaccagtggaagggtggattaacgcccttccaaatgggggtaaactcccccagggagagtgttcacagaagcaggactagacaaggaacagcaccctaccagccctcaagcagcacccctgacggtttagcaaagcaggacttacgagaaactaccaaagtcttacgccttgcgaagttcacccattcaggggcctgaagcttcgcccgttcacaaaagagctttcaaacagggggagagtttttaggaggggagaagttgcccccacctggttccttcagtttccagcctggacccccttcccattccttttgggccttttgaccttttttttccacagggggaccttacccctattgcgggtccttccagcttaatctttcacctcaccccccttcctcctccttggctttaaattatgctaaatgttgggaggagaattgaataaataatttgtgaatcttttgcacctgtgaaaaaaaaaaaaaaaagtcgac

SEQ ID NO: 132922 - DNA, 695 bp, Homo sapiens
atggtgcagcacttatttacacttcagtaaaagaaaacaaaaatatagacttagtatataaatacatcgttcagaaactatatggatttccctataagattcctgctgttgttgtggaaaaggatgcagtatttattccagcagggtgggataatgataagaaaataggaatattacatgaaaattttcaaacattaaaagcagaagataattttgaagacatcataactaaaccacctgttcgaaagtttgtacatgagaaggaaattatggcagaagatgatcaggtgtttcttatgaagctacaggatgcctcaccaagagtcccaggaggctccccacgaacaccaaatagatctgtatcatctaatgttgccagcgtgtcacccattcctgctgggtcaaaaaaaattgatccaaacatgaaagctggagctacaagtgaaggcgttctggcaaatttcttcaacagtttgttgagtaaaaagactggctctccaggaggccctggtgtgagtggtggtagccctgcaggtggggctggaggtggaagcagtggtttaccaccatccaccaaaaagtcaggccagaagcctgtcttagatgttcatgcagaactagacagaattacacgaaaaccagttacagtttctcccacaacacctacatctcctacggaaggagaagcttcttga

SEQ ID NO: 132923 - DNA, 2553 bp, Homo sapiens
  misc_feature (1)...(2553): n = a,t,c or g
ccgcctcagccgcctcgcacatttagtcttgccgggagtggtgtgattcccgaccaagatggcggccgtggggcgagtcggctccttcggttcttctccgccgggattatcctcgacttacactggcggccccttgggcaacgagatagcgtcgggcaacggtggcgccgcggcaggcgacgacgaggacgggcagaacctttggtcctgcatcctcagcgaggtctccacccgctcgcgcctccaagctccctgcgggatagaacgtgctactgctgggtgaagatggagctggaaaaacaagcttaataagaaaaattcagggaatagaggagtataagaaaggaagaggattggaatatttgtacttaaaatgtgcatgaatgaatgacagggaatgatcaaacaagatgtaatggtttggatcttagatggagacctatatcacaaaggcctccttaaattttcactggatgccgtatctctgaaggatactctagttatgctggttgttgacatgtcaaagccttggactgctttggattctttacagaaatgggcaagtgttgttagagaacatgttgacaaactgaaaatccctcctgaagaaatgaaacaaatggaacaaaagttgattagagagttccgaagaatatgtagagcgaggagaagacttcccggcttctccccagagaagaaatactgcgtcacaagaagacaaagatgacagtgtagttttacctctgggtgcggatacacttacacataacttgggcattccagtactagtagtttgcacaaagtgtgatgccattagtgtattggagaaagaacatgactacagagatgaacattttgatttttttcagtcacatatccggaagttttgtttacggtatggtgcagcacttatttacacttcagtaaaagaaaacaaaaatatagacttagtatataaatacatcgttcagaaactatatggatttccctataagattcctgctgttgttgtggaaaaggatgcagtatttattccagcagggtggggataatgataagaaaatagggaatattacatggaaaattttcaaacatttaaaaggcaggaggataatttttggaaggacatcataactaaaccacctgttcgaaagtttgtacatgagaaggaaattatggcagaagatgattcaggtgtttcttatgaaggttccagtcccttttaagcaaaagcaaaccacccaaactgaagctggaaggcctgtggatgccctcacccaaggagtcccagggaggctccccaccgaacaccaaaatagaatctgtatcatcttaatgttgccaagcgtgtcaccccattccctgctggggtcaaaaaaaaattgatccaaacatggaaagctgggagcttacaagtggaagggcgtttctgggcaaattttctttcaacagttttgtttgagtaaaaagactgggctctcccaggaggcccctggtggtgagtggtgggtagccctgcagggtggggctgggaggtgggaagcagtggttttaccaccaatccaccaaaaaggttcaggcccanaagcctgtctttagatgttcaatgcagaactagacagaatttacacgataaccagtttacagtttcttcccacaacacctacatcttcctacgggagggagaagcttccttgaaggttaccaattaaagcccttttattctgttttctgggataatgtaaacatgcctctgccttttccttcaaaagtgggaattagaaagctgggagtgcttcttcagatggactaaatttatgtcgtgtgtgtgtgtgtgtgtgtgstgtggttacccattttttagaaggagccgtacagaagaaaaattattctacattatgtaggattgctgtttgcattgccattttgcataagaaagtaatttttgattttgaaaatctcaaaacttttagatctgaaatacagccatgtgaktgcgtcatattctaaaggctatttaaaacatgtaaaaggatttggggaaccggcagaaaacatgccagttgggccatttgactgactgggaagtctaagcttattttagttataactattaaaatccatttttaaaaaatttgttagttttgccggacagagaaaaatccgtccagttgtccagattttggcacacccacaataaatgtacccacccacacacggaatatgcctaagaaaactatcagatagccgtttgatacacttagtcattgtctcaatcactgatcctgtaagttgtcatcaaaatatgatttagaaatattggcccaaggtgttgctttaactgaggagaaaagaaagcacactgcctaaatgtgtaaaagaaaaatgcagaggttattaaaatgtaaagaagtaacaatctttggatttgtctatacatatatatatatatatatatatgctttgccttaatatacccccttttttgtttgtgactttcaactgtaatcagttaataaagtatttattctctgcattcaggttcaaaaaaaa

SEQ ID NO: 132924 - DNA, 1078 bp, Homo sapiens
tgcttgtgtgcctggtgcgggagctactggggcccaggagattttttttaaaagtattttttctcccaacatttcccgggtgttccagcgccggttttgaccgccacattaccattttttcaccccgagggtcggctctaccaagtagaattatgcttttaaggcctatttaaccgggggggcccttaccttcattagctgtcagggggaaaggactgggcagttattgttcacacagaagaaaagtacttgaccaaattatttggattccagccacagtgacctcactttttccaagataactgaaaaacatttggtggtgtgatgaccggaatgacaagctgaccagcagattcccaggtaacagagggcacgcctatgaggcaagctaactggaaaatacaaagtatgggctatgagattcctgtggaccatgctgtgtaaaaagaattgcccgatatttctccaggtctaccacacagaaatgctgaaaatgaaggcctccttgcgttgttggtatgatttttaattgggtaatagatgaagagcaaggcccctccaggtatataaggtgtgaatcctgccaggttactactgtggggtttaaaagcccactgcaagcgggagttaaaccaaactgaggtcaaccggcttccttgaaaaaaaaaagtgtaagaagaaatttgatttggacattttgaacgagacagtgggaaactgcaattaacattgccctgtctaactgttcctattcaattggatttcaaaacctttcaagaaatagaagttggagtagtgacagttgaaaatcctaaattcaaggatccttacaagaagcagagattgatgctcaacttgttgctcctagcaagagaagagactaaacattgtcgttagtttaccgagatccgtgatgccacttacctgtgtgtttggtaacaacaaaccaacatcatggaggtcccctggattgaaaaaaggagccctctcccacctcctccataacaccgaaaggtggtttagggcttttatattaaataaaaaccaggcctttggaaaataaaaaaaaaaaaaaaaa

SEQ ID NO: 132925 - DNA, 471 bp, Homo sapiens
ccggcgggccgggggatggcgctgctggacctggccttggagggaatggccgtcttcgggttcgtcctcttcttggtgctgtggctgatgcatttcatggctatcatctacacccgattacacctcaacaagaaggcaactgacaaacagccttatagcaagctcccaggtgtctctcttctgaaaccactgaaaggggtagatcctaacttaatcaacaacctggaaacattctttgaattggattatcccaaatatgaagtgctcctttgtgtacaagatcatgatgatccagccattgatgtatgtaagaagcttcttggaaaatatccaagatactatatctctgccaatgtaactggtttcaaatgtgtgacaggaatgtcttgtttaatgagaaaagatgtgttgcatcaagcaggaggacttatagctcttgctcagtacattgccgaagattactttatggcc

SEQ ID NO: 132926 - DNA, 1527 bp, Homo sapiens
atgattgataagattgatgcataccacaagactgtgttcatgagaatggaaatagttcagacctttccttctgaagtttatcaggatctagtgcttgagttatttatttattcatttcaagttatagtttacgaccatatcaagttcatttcggtgaaaagaaagcaaaccgcaaaatgtgatatattttctacagtgagagacaaaggggtgggactttcaaagacagaaattgctcctgaccctgagagcacccatatgactctgatgccaaggaaacagtttaagaaaggcagctcccaggaagccagttcatcagagtggaagaagcagaagtcagatgctttaggtttggctgcgtgtgaaaaagacatgaaagcgatgggcacagatatttggaaactgcaacaacgatgcatttccacccaagtaattccagatacgcttactgacatggtgaatcaaatgacagaaaaagtaggcttggttcacgggctgccttacgtagcagacagacagggctttgctgccaccttagagcaggtatattttggaacttcacatccaagatactatatctctgccaatgtaactggtttcaaatgtgtgacaggaatgtcttgtttaatgagaaaagatgtgttggatcaagcaggaggacttatagcttttgctcagtacattgccgaagattactttatggccaaagcgatagctgaccgaggttggaggtttgcaatgtccactcaagttgcaatgcaaaactctggctcatattcaatttctcagtttcaatccagaatgatcagaaaaacaattacaagaatggtgacccagattaattgtgaatttgaggaagttgttccaagttcaaatccagactcccaaattgaagtagaggaggtcagtttatacacccacatggactacaatgaagtctttacccctgtcagttgtttagaaaaatgttcagcacttcaaaaccagaaccaagagaaagtgaagagtgttggtgaatcctacgaattaagtggaggtttgattaagaaagcatctatttcaagtagagatgaagttcgggtgttttctgccttcattgactctactggacaaatggtacttgtcagcgtaacaggtagagatgcagggtccagggggctacaagcagggcttgctgccaacttgattttgcgcttccagcctctggcagccaaaagatataaccatgacttcccagaacaagaaagtcccaatcctcttagcttaccgatcaagacagtggagcccagagagatctacagacttattcaagagcagtgggtttccactctgatttgtaaacttcctgaccttcccatcagagaattacaatcagagaacacaggtctgcttcctagaacaaacagtacctctgtggaaataagaaaaaggtctgcaattgtcagacaatgctttagtggacgtgcttggcacctgagagatacgaacacatcatttaataatatgctttccgtgcatgatgcttga

SEQ ID NO: 132927 - DNA, 721 bp, Homo sapiens
gcggccgcagcgggccgggccggtccggcgggccggggtgatggcgctgctggacctggccttggagggaatggccgtcttcgggttcgtcctcttcttggtgctgtggctgatgcatttcatggctatcatctacacccgattacacctcaacaagaaggcaactgacaaacagccttatagcaagctcccaggtgtctctcttctgaaaccactgaaaggggtagatcctaacttaatcaacaacctggaaacattctttgaattggattatcccaaacctttatttttctcggtagcaccaatgaaaagaatagagaagacacagatgtgatagccttaatgcagcacttattaatatgaagtgctcctttgtgtacaagatcatgatgatccagccattgatgtatgtaagaagcttcttggaaaatatccaaatgttgatgctagattgtttataggtggcaaaaaagttggcattaatcctaaaattaataatttaatgccaggatatgaagttgcaaagtatgatcttatatggatttgtgatagtggaataagaggaacaatggagatgccaatgagtcttgaacagtcttatgaccctaatgtcagagaccctatctataggaacaatggggatgcagatggtcagcatctagtgctgcatgacttttaccaacaaggaagtggaccaaagtgcagcctgattaatgcttaa

SEQ ID NO: 132928 - DNA, 981 bp, Homo sapiens
cggcacgagggttattttaatgcttcattaacaattagcattttcttgaacggtataacatggcagttaaattacataaggaagcagacttgattttacatagtatacttagaaaagtgaaatccaagaatttaattttttaaccttgtctttagtttgacagtgagtgaaattaaaaaatttttttttccattcctagggtggcacactgtgtttttcaaaacttgattatgcagtcgcctggttcatccgcgaatccatgacaatatacatttttttgtctgcattatgggacccaactataagctggagaactggtcgctacagattacgctgtgggggtacagcagaggaaatcctagatgtataactacagctttgtgactgtatataaaggaaaaaaagagaggtattataattatgttttatataaatgcttttaaaaatctaccttctgtagttttatcacatgtatgttttggtatctgttctttaatttatttttgcatggcacttgcatctgtgaaaaaaaaaaaaaatacacatctgtagtcttggccaaatgatacactttattttgtggaagtagagaatcaagagaattggttctaggaacctgggttcgttcatcattgttgtttatttttttaaaataaataaataaatatatatatagatgctctgcaacaaactctgtgacagtatccttcagtagagaaagtttcttacttgtgagtacactcttttagaacatttacgggtggcagcagctttgctttagagtttagaagataatagaaggaatgactattcatgtccaaagtgaatggttttgtgcagtgaacaacacatggcgaggtactaactgagaaactttttcatgctttatgcctacctcttgtagttgttgcagagcaaatacaaattgtaataagatagctaggccttgcagaaacaaacagaaaaacttaaaaaaaaaaa

SEQ ID NO: 132929 - DNA, 1737 bp, Homo sapiens
  misc_feature (1)...(1737): n = a,t,c or g
gaggcgaaccggagcgcggggccgcggtcgccccgaccagagccgggagaccgcagcacccgcagccgcccgcgagcgcgccgaagacagcgcgcaggcgagagcgcgcgggcgggggcgcgcaggccctgcccgccccttccgtccccacccccctccgccctttcctctccccaccttcctctcgcctcccgcgcccccgcaccgggcgcccaccctgtcctcctcctgcgggagcgttgtccgtgttggcggccgcagcgggccgggccggtccggcgggccggcgagatgtgtgctgctggacctggccttggagggaatggccgtcttcgggttcgtcctcttcttggtgctcgtggctgatgcatttcatggctatcatctacacccgattacacctcaacaagagggcaacggacagacagccactatagcaagctcccaggtgtctctcttctgaaaccactggaaaggggtagatcctaacttaatcaacaacctgggaaacattctttgaattggattatcccaaaaatttaatttacatacaatgctttttgactagtatgaagtgctcctttgtgtacaagatcatgatgatccagccattgatgtatgtaagaaggcttcttgggaaaatatccaaattgttgatgctaagattgtttataggtggcaaaaaagttgggcattaatcctaaaattaataatttaatggccaggatatgaagttgcaaagtatgatcctatatgggatttgtgatagtgggattagaaatatttccagatacgcttactgacatggtgaatcaaatgacagaaaaagtaggcttgggttcacgggctgccttacgtagcagacagacagggctttgctgccaccttagagcaggtatattttggaacttcacatccaagatactatatctctgccaatgtaactggtttcaaatgtgtgacaggaatgtcttgtttaatgagaaaaagatgtgttggatcaagcaggagactttatagcctttgcttcagtacattgcgaaagattactttatggccaaagcgatagctgaccgaggttggaggtttgcaatgtccactcaagttgcaatgcaaaactctggctcatattcaatttctcagttcaaatccagggatgatcaggtggaccaaactccgaattaacatgcttcctgctacgataatttgtgagccaatttccagaatgcctttgttgcccagtttaattaattgggatgggcaggcccacccatgtgttcagatgggatattatggtattttttcanggggccattgcctgggcatggtttatatttgactacattccaactccaggggtgtcccagggtggccacactgtgtttttcaaaacttggattaatgcagtcgccctggttcatccgcgaatccatgacaatatacatttttttgtctgcattatgggacccaactataagctggagaactggtcgctacagattacgctgtgggggtacagcagaggaaatcctagatgtataactacagctttgtgactgtatataaaggaaaaaagagaagtattataaattatgtttatataaatgcttttaaaaatctaccttctgtagttttatcacatgtatgttttggtatctgttctttaatttatttttgcatggcacttgcatctgtgaaaaaaaaaagaaacacatctgtagtcgaggccaatcaggg

SEQ ID NO: 132930 - DNA, 421 bp, Homo sapiens
tttcgtgggacctgggcccggggaccccccgcccagcgagacacacaagctggtggtcgtgggcggcggcggcgtgggcaagagcgcgctgaccatccagttcatccagtcctggacaccgcgggccaggaagagttcggggccatgagagagcagtacatgcgtgctggccacggcttcctgctggtgttcgccattaacgaccggcagagtttcaacgaggtgggcaagctcttcacgcagattctgcgggtcaaggaccgcgacgacttccccgttgtgttggtcgggaacaaggcagatctggagtcacagcgccaggtcccccgatcagaagcctctgccttcggcgcctcccaccacgtggcctactttgaggcctcggccaaactgcgtctcaacgtggacgaggcttttgagg

SEQ ID NO: 132931 - DNA, 514 bp, Homo sapiens
ttcgtgtctgactacgaccccactattgaggactcctacacgaagatctgcagtgtggatggcatcccagcccggctggacatctggaacaccggggcccaaactgcttctcaacgtggacgaggcttttgagcagctggtgcgggctgtccggaaataccaggaacaagagctcccaccgagccctcccagtgcccccaggaagaagggcgggggctgcccctgcgtcctcctgtagcccaggcaagagagaagcaaccaccacaagctctcgggactagctgccttcgcaccttgctgtgtgacctgaggccctcactgagcctcaatttcctcatctgggtctcccaggacacatcacatacccacccttacttcctggcctcttctgggctactgccactgtgtgccttctgccaacgcctcctgtccccacctaagcctggtgggggtgaggggctccgggtcactgctgtatataactcccctcccccagaaaaataaatgtcactgc

SEQ ID NO: 132932 - DNA, 1078 bp, Homo sapiens
atgacgccccacagtgccctgcgcgcgcgcggaaagggtggcggaacaggaggcggtagcgaaggcagcagcagcggtggcgacatgagcagcggggcggcgtccgggacagggcgggggcggccccggggcgggggacctgggcccggggaccccccgcccagcgagacacacaagctggtggtcgtgggcggcggcggcgtgggcaagagcgcgctgaccatccagttcatccagtcctacttcgtgtctgactacgaccccactattgaggactcctacacgaagatctgcagtgtggatggcatcccagcccggctggacatcctggaccccgcgggcccaggaagagttcggggccatgagagagcagtacatgcgtgctggcccacgggcttcctgctggtgttcgccattaacgaccggcaagagttttcaacgaggtggggcaagctctttcacgcagatttctgcgggttcaaggaccgcgacggacttccccggtggtgttggtcgggaacaaggcagattttggagtcacagcgccaggtcccccgatcagaagcctctgccttcggcgcctccccaccacgtggcctacttttgagccctcggccaaaatgcgttttcaacgtggacgaaggcttttgaagaagctggtgcggggttgtccgggaaatacccaggaacaaagagctcccaccgagccctcccaagtgccccccaggaagaatgggcgggggctgcccctgcgtcctcctgtagcccaggcaagagagaagcaaccaccacaagctctcgggactcagctgccttcgcacctttgctgtgtgacctgaggccctcactgagcctcaatttcctcatctgggtctcccaggacacatcacatacccacccttacttcctggcctcttctgggctactgccactgtgtgccttctgccaacggctcctgtccccaccttaagcctggtgggggtgaggggcgtccgaggtcactgctgtatataactcccctcccccagaaaaataaatgtcactgccaacgtcaaaaaaaaaaaaaaaaaaaaaaatt

SEQ ID NO: 132933 - DNA, 451 bp, Homo sapiens
caggtttctggccagaagaaccaactccacattcaaccaggttgtgttgaagaggttgtttatgagtcgcaccaaccggccgcctctgtccctttcccggatgatccggaagatgaagcttcctggccgggaaaacaagacggccgtggttgtggggaccataactgatgatgtgcgggttcaggaggtacccaaactgaaggtatgtgcactgcgcgtgaccagccgggcccgcagccgcatcctcagggcagggggcaagatcctcactttcgagaggtgtaccggcatttcggcaaggccccaggaaccccgcacagccacaccaaaccctacgtccgctccaagggccggaagttcgagcgtgccagaggccgacgggccagccgaggctacaaaaactaaccctggatcctactctcttattaaaaagatttttgctgacagtgaa

SEQ ID NO: 132934 - DNA, 1006 bp, Homo sapiens
cccaaacttcgttaacccgaaccatcccgaaaccaagttttgttaacgcgtttccaaattgccgttcacttcccttgtcccggcttttgcaattttttccaaggccagcccgttcccgggcgtttttatcccgtaaaccaaaacccggtcccggaaaaaagccaatggccctgattgtggaatttattggtgagttacctaccggcgtacatgcgcgtccgccaagccacgttgaaacgctgtgtaatactttttcatcacaaattgagtggcataacctgcgcactgaccgcaagggcaacgccaaaagcgcccttgcgctgattggcaccgatacgctggcgggcgataactgccagttactgatttccggggccgacgaacaggaagcgcaccagcgtttaagccaatggctgcgcgatgaattcccccactgcgatgcgccgctggcggaagttaaatctgacgaactggaaccactgccggtttcactgaccaatctgaatccgcaaattatccgcgcccgcaccgtgtacagcggtagagcaggcggcattcagacgccgatctcttctttagatctcaatgcgctgggtaatcttcccgcagccaaaggcgttgacgccgagcaatccgcactggaaaacggcctgacgctggtactgaaaaacattgagtttcgtctgctggatagcgacggtgctaccagcgcgattctggaagctcaccgatccctggctggcgatacttccctgcgcgaacatttactgccagtcggacaatgcgccaacgccgccagcagcacgaatcacccgttcgttactaaaaaacggcagcaatgttttgtcttccgccagcggctggcgaacggcaggaacgactccggatggcagattacgcatgctttttggttccggttccaccagcactcgaggattatgaaatatctgtatggattcacggcccggcttaaggagcaccagcccaagctcaggcaccagaacag

SEQ ID NO: 132935 - DNA, 763 bp, Homo sapiens
gtgtgctgtgaattctgccgagcagagaggcgccatcatggtgagtggaccatccgccataacaaaggaccgaaagggttcgggcgcaagggacccaaaagagcctggatttctcctctgacgctgttgtgtcaagttatacaggttttctggcccagaagaacccaactccaacattcaacccaggttgtggttgaagaggttgtttatgagtccgcaccaaaccggccgccttctgtccccttttcccgggatgaatccggaaagatgaaagcttccctggcccggggaaaacaagaccgccccgtggttgtggggggaccattaacttgattgatgttgcgggtttcagggagggtacccaaaactgaaaggtatgtggcactgcggcgtggacccagcccgggcccgcaagccgcattccttcaggggcaagggggcaagattccttcacttttcgaccaagcttggcccttgggacttcccctaaagggcttgttggcacttgttcctggctcttccggttccctcggcaaaggggcccgagaaggtggtacccggcaattttcggcaaaggccccaaaggaaaccccgcaaaagccacaccaaaacccttacgttcggctccaagggccggaagttcgagcgtgccagaggcccgacgggcccagcccgaggctacaaaaaactaaccctgggatcctactctcttatataaaaagatttttgcctgacaaaaaaaaaaaaaaaaaaaaaaagttac

SEQ ID NO: 132936 - DNA, 168 bp, Homo sapiens
agtcctgcgaacaaattgctgtccaagtgaataatggggatgctggaagggagatgccctgcccgttgccctgtgatgaagaaatcatcagcagtgaggactctgaaggatccactgacgttgatgagcccttagaagtcttcatctcagcaccgagaagtgagcctg

SEQ ID NO: 132937 - DNA, 2671 bp, Homo sapiens
ctgaggcccacgcagggcctagggtgggaagatggcaggtgggggcggcgacctgagcaccaggaggctgaatgaatgtatttcaccagtagcaaatgagatgaaccatcttcctgcacacagccacgatttgcaaaggatgttcacggaagaccagggtgtagatgacaggctgctctatgacattgtattcaagcacttcaaaagaaataaggtggagatttcaaatgcaataaaaaagacatttccattcctcgagggcctccgtgatcgtgatctcatcacaaataaaatgtttgaagattctcaagattcttgtagaaacctggtccctgtacagagagtggtgtacaatgttcttagtgaactggagaagacatttaacctgccagttctggaagcactgttcagcgatgtcaacatgcaggaataccccgatttaattcacatttataaaggctttgaaaatgtaatccatgacaaattgcctctccaagaaagtgaagaagaagagagggaggagaggtctggcctccaactaagtcttgaacaaggaactggtgaaaactcttttcgaagcctgacttggccaccttcgggttccccatctcatgctggtacaaccccacctgaaaatggactctcagagcacccctgtgaaacagaacagataaatgcaaagagaaaagatacaaccagtgacaaagatgattcgctaggaagccaacaaacaaatgaacaatgtgctcaaaaggctgagccaacagagtcctgcgaacaaattgctgtccaagtgaataatggggatgctggaagggagatgccctgcccgttgccctgtgatgaagaaagcccagaggcagagctacacaaccatggaatccaaattaattcctgttctgtgcgactggtggatataaaaaaggaaaagccattttctaattcaaaagttgagtgccaagcccaagcaagaactcatcataaccaggcatctgacataatagtcatcagcagtgaggactctgaaggatccactgacgttgatgagcccttagaagtcttcatctcagcaccgagaagtgagcctgtgatcaataatgacaaccctttagaatcaaatgatgaaaaggagggccaagaagccacttgctcacgaccccagattgtaccagagcccatggatttcagaaaattatctacattcagagaaagttttaagaaaagagtgataggacaagaccacgacttttcagaatccagtgaggaggaggcgcccgcagaagcctcaagcggggcactgagaagcaagcatggtgagaaggctcctatgacttctagaagtacatctacttggagaatacccagcaggaagagacgtttcagcagtagtgacttttcagacctgagtaatggagaagagcttcaggaaacctgcagctcatccctaagaagagggtcaggatcacagccacaagaacctgaaaataagaagtgctcctgtgtcatgtgttttccaaaaggtgtgccaagaagccaagaagcaaggactgaaagtagtcaagcatctgacatgatggataccatggatgttgaaaacaattctactttggaaaaacacagtgggaaaagaagaaaaaagagaaggcatagatctaaagtaaatggtctccaaagagggagaaagaaagacagacctagaaaacatttaactctgaataacaaagtccaaaagaaaagatggcaacaaagaggaagaaaagccaacactagacctttgaaaagaagaagaaaaagaggtccaagaattcccaaagatgaaaatattaattttaaacaatctgaacttcctgtgacctgtggtgaggtgaagggcactctatataaggagcgattcaaacaaggaacctcaaagaagtgtatacagagtgaggataaaaagtggttcactcccagggaatttgaaattgaaggagaccgcggagcatccaagaactggaagctaagtatacgctgcggtggatataccctgaaagtcctgatggagaacaaatttctgccagaaccaccaagcacaagaaaaaagagaatactggaatctcacaacaataccttagttgacccttgtgaggagcataagaagaagaacccagatgcttcagtcaagttctcagagtttttaaagaagtgctcagagacatggaagaccatttttgctaaagagaaaggaaaatttgaagatatggcaaaggcggacaaggcccattatgaaagagaaatgaaaacctatatccctcctaaaggggagaaaaaaaagaagttcaaggatcccaatgcacccaagaggcctcctttggcctttttcctgttctgctctgagtatcgcccaaaaatcaaaggagaacatcctggcctgtccattgatgatgttgtgaagaaactggcagggatgtggaataacaccgctgcagctgacaagcagttttatgaaaagaaggctgcaaagctgaaggaaaaatacaaaaaggatattgctgcatatcgagctaaaggaaagcctaattcagcaaaaaagagagttgtcaaggctgaaaaaagcaagaaaaagaaggaagaggaagaagatgaagaggatgaacaagaggaggaaaatgaagaagatgatgataaataa

SEQ ID NO: 132938 - DNA, 396 bp, Homo sapiens
atgaaaaatagaagcagaaacaaaggaaatgtggaatggcaagcagaagggataagaagtaaaagaagcgtgggaaagcaaaggccaagcaaggcaaagattccctctggggacaagaatggagtatcactaacccacaatgaaggttagttgaaaggcaagacaagcatggcctgtgtacaggcgaggacttgcacggattttcaaggttttccaggttttcttattagggaatttcctactgaactgattccttggtcacacactgagacctctaaagaatcccattcttttgtgcagtgatcaataatgacaaccctttagaatcaaatgatgaaaaggagggccaagaagccacttgctcacgaccccagattgtaccagagcccatggatt

SEQ ID NO: 132939 - DNA, 2066 bp, Homo sapiens
  misc_feature (1)...(2066): n = a,t,c or g
gagagtgtttgatctgaagtttttatttctgtctataatttacactagtaggaaacatgttgtctttttgaggcttttacacattcacaaatgacaattggatgtcaaccccatttatcactataaagaatctaagatctatagggttaataggcaatgagagcgaggtttaaaaaaaagaataccacaaatttgctatttatttcttctacaacaacaaaatataattacatacatttaggtcagtgaaactctttctgttaaacatgaggtttatccataatttcctgcctctttccattttctaaaatgcaaaaaggagttcccagattggactggatacaaggtagtgtaacgttgctcagaataaaaagcggtcgggaaacaggcagctttttaattccacattccctgaacattctggcaggcccaagttcttggcaatcctaatcttctttaaccgagcccccttcttaggggatgagctggcaggtttcctngaaagctctttctcccatttactcagggtctgaaaagtcacttactgctggaaacgtctccttccctgctggggtattcctcccaagtaagatgtacttcctagaagtcaataggagccttctcaccatgccttgcttcctcagtgcccccgctcgaggcttcctgcggggcgcctcctcctcactgggattctgaaaagtcgtgggtctttttcctatcactctttttctaaaactttctctgaatggtaaataattttctgaaaatcaatgagctctggtacaatctggggtcgtgagcaagtggcttcttgggccctccttttcatcatttgattcttaaagggttgtcattattgatcacaggctcacttctcggtgctgagatgaagacttctaagggctcatcaacgtcagtggatccttcagagtcctcactgctgatgactattatgtcagatgcctggttatgatgagttcttgcttgggcttggccactcaacttttgaattagaaaatggcttttccttttttatatccaccagttcgcacagaaccagggaattaaatttgggattccaatggttgtgtaagctcttgcctctggggctttccttcatcacagggcaaccgggcagggcatctcccttccagcatcccccaatattcacttggaccagcaatttgttcgcaggactctgttggctcagccttttgagcacattgttcatttgtttgttggcttcctagcgaatcatctttgtcactggttgtatcttttctctttgcatttatctgttctgtttcacaggggtgctctgagagtcccatttttcaggtggggttgtacccaggcatggaggatggggaaacccggaaggtggcccaaagtcaggctttcgaaaagagttttcaccagttcccttgttcaaagacttagttgggaggcccagacctctccttcccttctcttcttcttccactttccttggagagggcaatttgtcatgggattacatttttcaaagcctttataaatgtggaatttaaaatcggggtattcctgcatgttgacatcgctgaacagtgcttccagaactggcaggttaaatgtcttctccagttcactaagaacaattgtacaccactctctgtacagggaccaggtttctacaagaatcttgagaatcttcaaacattttatttgtgatgagatcacgatcacggaggccctcgaggaatggaaatgtcttttttattgcatttgaaatctccaccttatttcctttgaaagtgcttgaatacaatgtcatagagcagcctgtcatctacaccctggtcttccgtgaacatcctttgcaaatcgtggctgtgtgcaggaagatggttcatctcatttgctactggtgaaatacattcattcagcctcctggtgctcaggtcgccgcccccacctgccatcttcccaccctaggccctgcgtgggcctcagagcctggcctctgagcccctcagtcggcccagcctgcgtgcagtgtggctgcccaggccccaagcaggaagtcg

SEQ ID NO: 132940 - DNA, 1828 bp, Homo sapiens
  misc_feature (1)...(1828): n = a,t,c or g
tgatgagacggaagtcctgagagtttgaccgatttaaggtcacgtgcctaggaagtgctggaaccaagactcggagttttctctaatggatgtttccaaggattgtcttcagtcatggccttgggattaaagtgcttccgcatggtccaccctacctttcgcaattatcttgcagcctctatcagacccgtttcagaagttacactgaagacagtgcatgaaagacaacatggccataggcaatacatggcctattcagctgtaccagtccgccattttgctaccaagaaagccaaagccaaagggaaaggacagtcccaaaccagagtgaatattaatgctgccttggttgaggatataatcaacttggaagaggtgaatgaagaaatgaagtctgtgatagaagctcttcaaggataatttcaataaggactctcaatataaggacctcaccaggatcccattgacaagattgctgtggtaactgcctgacgggaagccttgctttaaaccagatttagccagatctccatgaagtcgccacagctgaattttgggtgaatatgggccagcttcccagagtgtacagctgcagctatcaaggctataagagaaagtggaatgaatctgaacccagaagtgggaagggacgctaattcgggtaccccattcccccaagtaaccagagagcacagagaaatgctgggtgaaactgggccaaacagaacaccaacaagggccaaagactcttttacgggaaggtttccgcacccaactcaatgaacaagctggaagaaatcccaaggatacagtcttcaggaggacaccattaggctaacagagaaacagatcagccaaatggccgatgacacagtggcagaactgtacaggcatctggcagtgaagaccaaagaactccttggatgaaagtccacctggggccagcaatactccagagcccagtttctgctggatccccatgggtggcacattggggactttctctccctcccccatctacacagaaagactggcaccccatgctggacaagaagcctggcccttggtaaaggccccagccttcccccagggggaacactcaagacatgtttcattcctccttccctgcttcctgcctctggggccggtgggtggctctcagaaaataccttgctgctgggcaaaaggcctgtactcagggcntttgcttttgatttgatgtttgccaagggacttaggcccattggcaggcttagtaccacctgctcctcattttaggagtctccttttcaaataattaggctctgttcccattttaaaactctgatattgggccttcacctgtgactggacactttactaggaggccccattttcactaaacaattaaaatctaaataaattggaaggaataacaaccacaaaggaaagaatagagttggtctggattgatgaatcactgaggatctgtatgtgagggcaccccataaacagtagttttgcctgtgagtcggtcttcacacatgctgttttctctgcctgggctctctcttcccctccttacctggggccagtcctgttttatcatcaggccttgtcttggatatcacgtcctctgggaagtcttcttttcccctctaacctaggaccctcattaccgggctctcataagcacaagtctactgctttggtacgaatttctaagtaattccttggttgcacttaaattaagcctggtatatcctcagaactttgtgtaatgcctggagcatagtaggcagtcatatgttgtatcgtgaataaattgcacatagtagctacccagcaa

SEQ ID NO: 132941 - DNA, 389 bp, Homo sapiens
cgattccggatctcattgccacgcgcccccgacgaccgcccgacgtgcattcccgattccttttggttccaagtccaatatggcaactctaaaggatcagctgatttataatcttctaaaggaagaacacaccccccagaataagattacagctgttcgcgttggtgctgatggcatggcctgtgccatcactatcttaatgaagactataatgtaactgcgaactccaagctggtcattatcacgggtggggcacgtcagcaacagggagaaagccgtcttaatttggtccagcgtaacgtgaacatctttaaattcatcattcctaatgttgcaaaatacagcccgaactgcaagttgcttattcgttcaaatccagtggatatctt

SEQ ID NO: 132942 - DNA, 512 bp, Homo sapiens
  misc_feature (1)...(512): n = a,t,c or g
cttaatggntgactcccagcttttcccccantaggtaacggaatcggctgaatccagattgcaaccgcttccaataacacggtttttgggaaaaccacttatcttccaagccacgtaggtcaagatatccactggattttgaaacaataagcaacttgcagttcgggctgtattttacaacattaggaatgagtctgttcccagctgagctcaaatatggatcacaccgtggtgctgcagctggcagagaagaatggctacgtgactgtcagtgagatcaaagccagtcttaaatgggagaccgagcgagcgcggcaagtgctggaacacctgctaaaggaagggttggcgtggctggacttacaggccccaggggaggcccactactggctgccagctctcttcactgacctctactcccaggtttatttgccacctccgcctcctccctgcctgctgctgtgtgcccttccacatgcagtcaggggagggcttctctggcctcctcagct

SEQ ID NO: 132943 - DNA, 2021 bp, Homo sapiens
  misc_feature (1)...(2021): n = a,t,c or g
attgatgccttcggaccgcccgttgagcccgtcgacccacgcgtccgccggatctcattgccacgcgcccccgacgaccggcccgacggtgcatttcccgatttccttttggttccaagtccaattattggcaacctctaaaggatcagctgatttataatcttctaaaggaagaacagacccccccagaataagattacagttgttggggttggtgctgttggcatggcctgtgccatcagtatcttaatgaaggacttggcagatgaaccttgctcttgttgatgtcatcgaagacaaattgaaggggagagatgatggatctccaacatggcaagcctttttcctttaggaacaccaaagtattgtcttctggcaaaagactataaatgtaacttgcaaactccaaagctgggtcatttatcaccggctgggggcaccgtcagcaagaagggaagaaagccgtcttaattttggtccaagcggtaaacgtgaacatctttaaattcatcattccctaatgttgtaaaatacagccccgaactgcaagttgcttattgtttcaaatccagtggatatcttgacctacgtggcttggaaagataagtggttttcccaaaaaccgtgttattgggaagtggttgcaatctgggattcagccccgattccggttacctgatggggggaaaggcttgggagttcaccccattaagcttgtcatgggtggggtccttggggggaacatgggagatttccagtgttgcctgttatgggagttggattgaatgttgctggtgtctctctggaagacttctggcacccagattttaggactgataaagattaggaaccagtggaaagaaggttcacaagccaggtggttgagagatgcttatgaggtgatcaaactcaaaaggctacacatccttggggctaattggactctcctgtaagccagattttggcagagatgtataatggaagaatcctttaggcgggtgcaccccagttttcccaccatggattaaagggtctttacgggaataaaaggatgaatgtctccctaagtgttccttgcattttgggacagaatggaatctcaagaccttgtgaaaggggactctgacttctgagggaagaggccccgttggaagcaagagtgcagataacaactcttggggatccacaaagaagctgccaatcttaaagtcttcctgatgtcaatatcatctccctgttctaggccaacaaccggattctaggtggaggttgtgcatgtgtgtcctttttatcctgatctgggattaaagccagtaatattttaaggatggactggggaaaaacatccaactccctgaagttaggaaaataagaaatggtttggtaaaaatcccaccagctatatccctggatgctgggatgggtattaatcttggtgtaagtcttcaaactgggtttagtgtgaaaatagtttctgcccacccttctgacggcaccaacttgcccaatgctgtacggtactgcattttgccccccttgagcccagggtggatgtttacccgttggggttatataacttccctgggctcccttcactggaacatgcctacgtccaacacttttttcccagtgagtcacaatcctggggatccaagtgtattaaatcccaatatcgtatgtcttgtggcataattcttcccaaagggatcttattttgtggaactatatgtatcagcagtgtacattaccatattaatggtaaaaagatctacatacaaacaaatgcaaccaacctatccaaagtgtttttaccaactaaaaacccccaataaaaccttgaacagtgaaaaatnnnnnnnnnngggggcggcctttttaaagaatccttgggggggcccaagcttaccctggcttgcaaagtaatatctttttccatttggggagccaattcataactaccttgggatttttggaaaggaacctttcttttggggggggacataattgaccaacctccctct

SEQ ID NO: 132944 - DNA, 531 bp, Homo sapiens
gaagaaggtggagaaactgaggcacaaaaagagggcagtgaagatgtgggcaacctccctgaagcccaggagaagaatgaagaagaaggagagacagccacagaagagaaaatggaagctatgaagcaacatttcaaatgtctctccacaaaccaaactcaacagaatactttgcttgaagccggcacacccagggttactgaggacttatgctgcctgacctggttagatgtacatggaggtatctcccgaatcatacaaaattaaatgtgaagaccgtttatgcataccttcatgtgcctgacagtcttggcttttgaagatttttttttcttttttgctctgcatagctagaccatcttattaataatactctgaaaaaaatgatttcaaggcatggaagttctctgtgatacaacaatagtatttcttcaaatgcgccttatgctacttatctcagaaacaggttttaaaatgaagtgctttccagagaaccatcatataaataaagattaatagaaaaaaaaaaaa

SEQ ID NO: 132945 - DNA, 1160 bp, Homo sapiens
cgggggaggagcccaagatgcctctgctgctccttggagagacagagcctcttaagttggagcgggactgccggagcccagtggacccctgggctgctgccagccccgacctggcacttgcttgcctgtgtcactgtcaggatttgtctagcggcgcattccctaacaggggtgtgttggggggagtcctctttccaactgtcgaaatggttatcaaagtgtttgttgctacatcttctgggtccatagcgattaggaagaaacagcaagaagtagtgggttttttggaagcgaataaaatcgactttaaggaattagatattgctggagatgaagacaacaggaggtggatgagagagaatgttcctggagagaaaaaacctcaaaatgggattcctttgcctccccagatcttcaatgaggagcagtactgtggggattttgactctttcttctctgcaaaagaagagaatattatttattccttccttggtttggctcctcctccagactcaaagggatcagagaaggctgaagaaggtggagaaactgaggcacaaaaagagggcagtgaagatgtgggcaacctccctgaagcccaggagaagaatgaagaagaaggagagacagccacagaagagacggaagaaatagccatggagggtgcggaaggggaagccgaggaggaggaagaaactgcagaaggagaagagcctggagaagacgaagattcctaggccttttcatgcttcatttcttccacttctccagaaaatggaagctatgaagcaacatttcaaatgtctctccacaaaccaaactcaacagaatactttggcttgaagccggcacacccagggttactgaggacttatgctgcctgacctggttagatgtacatggaggtatctcccgaatcaataccttcatgtgcctgacagtcttggcttttgaagatttttttttcttttttgctctgcgatagctagaccatcttattaataatactctgaaaaaaatgatttcaaggcatggaagttctctgtgatacaacaatacgtattcttcaaatgcgccttatgctacttatctcagaaacaggttttaaaatgaagtgctttccagagaaccatcatataaataaagattaatagaaaaat

SEQ ID NO: 132946 - DNA, 1371 bp, Homo sapiens
gcatctctgcacaggtctccgattggtgcacagcacagcctggccttttagggactgttgtcgcgcgtttaaagtgatagggaaagggtccagtggctgcttttatcgaccaatcaaatattttcctgacagatcccaaaatattcctgggccaatggagggaggagcccaagatgcctctgctgctccttggagagacagagcctcttaagttggagcgggactgccggagcccagtggacccctgggctgctgccagccccgacctggcacttgcttgcctgtgtcactgtcaggatttgtctagcggcgcattccctaacaggggtgtgttggggggagtcctctttcctactgtcgaaatggttatcaaagtgtttgttgctacatcttctgggtccatagcgattaggaagaaacagcaagaagtagtgggttttttggaagcgaataaaatcgactttaaggaattagatattgctggagatgaagacaacaggaggtggatgagagagaatgtttcctgaagagaaaaacctcaaaaatgggattcctttgccctcccagattcttcaatgaggagccagtactgtgggggattttgactccttcttctctgcaaagaaagagaatattatttattccttcccttggttgggctcctcttccagactcaaagggatcagagaaggctgaagaaggttggagaaactgaggcacaaaaagagggcagtgaagatgttggcaacctccctgaagcccaggagaagaatgaagaagaaggagagacagccacagaagagaccggaagaaatagccatggagggtgcggaaggggaagccgaggaggaggaagaaactgcagaaggagaagaagagcctggagaagacgaggatttcctaggccttttcatgcttcatttcttccacttctcccagaaaatggaagctatgaagcaacattcaaatgttctctccacaaaccaaacggagacagaatactttggcttgaagccggcacaccccagggttactgaggacattatgctgcctgacctgattagatgatacatggacggtatctcccgaatcatacaaaaattaaatgtgaagaccgtttatgcataccttcatggggcctgacagtcttggcttttgaagattttttttttcttttttgctctgcatagctagaccatcttattaataatactctgaaaaaaatgatttcaaggcatggaagttctctgtgatacaacaatagtatttcttcaaatgcgccttatgctacttatctcagaaacaggttttaaaatgaagtgctttccagagaaccatcatataaataaagattaatagaaaaataaaaaa

SEQ ID NO: 132947 - DNA, 445 bp, Homo sapiens
  misc_feature (1)...(445): n = a,t,c or g
actactttagtgcgngnnctttattttaggcgcaggaagttccagctctgcgccgatctatgcacgcagatgctggagaagtccccttatgaccaggcagcttggatcttaaaagcaagagcgctaacagaaatggtatacatagatgaaattgatgtagatcaggaaggaattgcagaaatgatgctggatgaaaatgctatagctcaagttccacgccctggaacgtctttgaaactccctggaactaatcagacaggagggcctagccaggccgttaggccaatcacacaagctggaagacccattacaggtttcctcaggcccagcacgcagagtggaaggccaggcactatggaacaggctatcagaacacccagaaccgcctacacagcccgccctatcaccagctcctccggaagatttgtcaggctgggaacggctt

SEQ ID NO: 132948 - DNA, 622 bp, Homo sapiens
caggcagcttggatcttaaaagcaagagcgctaacagaaatggtatacatagatgaaattgatgtagatcaggaaggaattgcagaaatgatgctggatgaaaatgctatagctcaagttccacgccctggaacgtctttgaaactccctggaactaatcagacaggagggcctagccaggccgttaggccaatcatcacattctgaaaaacccattacagggttcctcaggcccagcacgcagagtggaaggccaggcactatggaacaggctatcagaacacccagaaccgcctacacagcccgtcctatcaccagctcctccggaagattcgtcaggctgggaacggcttccatgcttacaagtcctgatggaccattcataaattaatctaggctgaatttaacaaagtattcccagaaacctaagatggcaaaggctttgcctgagtatatctttcatcatgaaaatgatgttaagactgctttggagctggctgccctctccacagaacattctcagtacaaggactggtggtggaaagtacagattgaaaaacgttactacaggttgggaatgtatcgtgaagcagaaaaacagcttatatcagccatgaagcag

SEQ ID NO: 132949 - DNA, 2297 bp, Homo sapiens
atgaaggcagagatttgcaagtcaaggactgtcaaggactggcacaaccaccagaagctaggagaagggaataaaactgattctcccccacaaccctcggaaggaactaacactgccaacactttgatcttggacttctggcctctagaaatgattgcatgctgttgggaaacttttcctcagcggctgactgcagagctgtttatgaaccccacacacagatggcatggttacaagaaccagagtgtaggcgcgctgcgggcacctctcggacaaggccccagccgtcgcgggttgccgggcagagtcggacgccgccagctcttcactccacgcccacctctctcctggagcgctgggccttcgctggccgcaccggcagccatgagctcggagatggagccgctgctcctggcctggagctattttaggcgcaggaagttccagctctgcgccgatctatgcacgcagatgctggagaagtccccttatgaccaggaaccagatcctgaattgccagtgcatcaggcagcttggatcttaaaagcaagagcgctaacagaaatggtatacatagatgaaattgatgtagatcaggaaggaattgcagaaatgatgctggatgaaaatgctatagctcaagttccacgccaatcacacaagctggaagacccattacaggtttcctcaggcccagcacgcagagtggaaggccaggcactatggaacaggctatcagaacacccagaaccgcctacacagcccgccctatcaccagctcctccggaagatttgtcaggctgggaacggttgggaatgtatcgtgaagcagaaaaacagtttaaatcagccctgaagcagcaggaaatggtagatacatttctgtacttggcaaaagtttatgtctcattggatcaacctgtgactgctttaaatcttttcaaacaaggcttagataagtttccaggagaagtaaccctgctctgtggaattgcaagaatctatgaggaaatgaacaatatgtcatcagcagcagaatattacaaagaagttttgaaacaagacaatactcatgtggaagccatcgcatgcattggaagcaaccacttctattctgatcagccagaaatagctctccggttttacaggcggctgctgcagatgggcatttataacggccagctttttaacaatctggggctgtgttgcttctatgcccagcagtatgatatgactctgacctcatttgaacgtgccctttctttggctgaaaatgaagaagaggcagctgatgtctggtacaacttgggacatgtagctgtgggaataggagatacaaatttggcccatcagtgcttgaggctggctgtggtcaacagcaacaaccacgccgaggcctacaacaacctggctgtgctgggagatgcggaaggggccacgttgaacaggcaagggcactattacaaactgcatcatccattagcaccccatatgtatgaaccgcatttttaattttgcaacaatctctgataagattcggagatctgcagagaagctatgttgctgcgcagaagtctgaagcagcatttccagaccatgtggacacacaacatttaattaaacaattaaggcagcattttgctatgctctgattgttccttagaccacatatgttcttatgaagcagcattatgcaaggggaaaaaagcactatgtctgtgtacgtattacactatatacatacatacacagacatagggtaatacgtatattttaacaaacctgtccttgatattagttaagggtgaccccataagggtgaccccagaatgtgtaatgcaaatttcataggtaaataagtaacctttataaaattaatattataaaatacaggatttaaacctttctaaatagatcctgaaactgtctctcacattatatagtagatgtttgtttaataaatgtttaccaaaacattttggtgaatttcctcaatgttttataaatgtacattttttaagtccttaagctgactcttagccatcatgtagcttaaggagtctgaaatctgccattaaaactgcacctttaagccaggtgtggtagcatgtgcctatagtcccgagctacttgggaggtggaggtgggaggattataaatagagactttccttaagactttaaaaatgtatttaaaactattttttattaaatactttgtgatttcctacttaagctttaaaataaatcattgtgtaaacaccaaaaaaaaaaaaaaaaaaaaaaagggcggccgct

SEQ ID NO: 132950 - DNA, 295 bp, Homo sapiens
gtctaagctctctgcactgactgctgtggttccggacatcccaggtttccgcaagatcctcccacgctcagattatatcatcatccccaagagcagcctgcaggaggaccggagctgccctcagctagagctatgtgtggctcagaaccagatgtccccgaaaggacctcctcttgtgtccaacactgccccggagacagtgcccagccatgcaggcatggcagagcagtgcctggctgtggaggccctggctgaggaggttggggagagtttatcagtggtaacagtcatgaag

SEQ ID NO: 132951 - DNA, 5612 bp, Homo sapiens
atgctagggctggggctgttgcgcttgcgccaggggtcgcatgcagtcacgcgctgccgaccgcttccggtgcgccgcgagggccgccgggacgggtctccctggcgatccgtggtgtgccgctactgccggtgcagccgccaaaccggtgcctcggtgacgaccgtgtccctgccgtcttcctcgagctccccggggcttgacccccggggccctcggcaggcatcggtgaagaagcctgcggaagcgaaccctgtgctcaggcccctcgtcaggcatgggaccccatatcgcgactccgaggaggggaagcgagaggggctgtcgcgactccgcgccgtgtgtcgccgggcggggccgcggggccggggctccttcagcccccgggatgcgcgcgcgagccctcgcctccacttccttgttgctgctgtcacgactggagccgcctctcgccgacagcggggagcgcgagtgcgccagccatccccctcgtccagccgccgggccaagcgcctccgggaatgtgagcggcgcagcttgcacgctcctccggccatggacgcatcatatgatggtactgaggtaactgtcgtgatggaggaaattgaggaagcctattgttacacctctcctgggccacccaagaagaagaaaaagtataaaatacatggagaaaagacaaagaaacccaggtctgcttaccttctgtactattacgacatctacctgaaagtgcagcaggagctcccccacctccctcagtctgagatcaataagaagattagtgagagttggaggcttctcagcgtggccgagaggagttactacttggagaaagccaaactagagaaggaaggtttggatcctaactctaagctctctgcactgactgctgtggttccggacatcccaggtttccgcaagatcctcccacgctcagattatatcatcatccccaagagcagcctgcaggaggaccggagctgccctcagctagagctatgtgtggctcagaaccagatgtccccgaaaggacctcctcttgtgtccaacactgccccggagacagtgcccagccatgcaggcatggcagagcagtgcctggctgtggaggccctggctgaggaggtgggagcccttacccagtcaggtgctgtacaggagattgccacctcagagatcctcagccaggatgtgctcctagaggacgcttccctagaagtaggggagagccaccaaccttaccagacaagcctggtaattgaagagaccttggtgaatggctcaccagacctccccactggaagcctggctgtgccccacccccaggttggggagagtgtatcagtggtaacagtcatgagggattccagtgagagtagctcctctgcaccagccacacagttcatcatgttgcctctgcctgcctactcggttgtggagaaccccacctccatcaaactgaccactacatatacccgccggggccatgggacatgcaccagcccagggtgctcctttacatatgtcaccaggcacaagccacctaagtgccctacctgtggtaacttcctaggagggaagtggatcccaaaggaaaagccagccaaagtaaaagtggaattggcttctggcgtctcttccaaaggctctgtggtgaaaagaaatcagcaacctgtcaccactgagcaaaattcctctaaggaaaatgcctccaaactgactctggagaattcggaagctgtaagccagctcctgaacgtagctcctcccagagaagtaggtgaggagagtgagtgggaggaagtgatcatctccgatgcccatgttttggttaaggaagctcccgggaattgtggtacagcagtcactaagacgccagtcgtcaaaagtggtgtgcagcctgaggtcactctggggacaactgacaatgacagtcctggagcagacgtaccaacaccatccgaggggacaagtacctccagtccactccctgctcctaaaaaacctacaggagttgacctgcttacccctgggtccagagctccagagcttaaaggcagagcacggggcaagccctcattactggctgcagcaagacccatgagagcaattttgccagccccagttaacgtggggcgaggcagcagcatgggactgcccagggccaggcaggccttttccctgagtgataagactccctctgtgaggacttgtggtctgaagccaagcacactgaagcagctgggccagcccattcaacagccatctggccctggtgaggtgaagctaccaagtggcccatccaacaggacttctcaggtgaaagttgtggaggtcaagcccgatatgtttcctccatataagtacagctgcactgtcacattggatttgggcctggctacatcaagaggccggggaaagtgcaagaatccctcttgtagctatgtctacaccaacaggcacaaacctcgaatttgtcccagctgtggtgttaaccttgccaaagaccggactgagaaaaccaccaaggctatcgaggtgagctcaccactcccagatgtactgaatgccacagagcccctgagcacagcccagagggagatccagcgccagtccacactgcagctgctgcgcaaagtcctgcagattcctgagaatgagtcagagctggctgaggtcttcgccttgattcatgaactcaacagctctcgacttatcttgtccaacgtgagtgaggagacagtcaccatcgagcaaacctcttggtcgaattattatgagtctccgtccacgcagtgccttctctgtagcagcccattattcaaagggggacaaaactccctggctgggccccaggagtgctggctgctgacagccagccgtctgcagacagtgactgcccaggtgaagatgtgtctgaacccccattgtctggccctgcacagcttcatagacatctacacaggtctctttaatgtggggaacaagctgctggtaagcctggacttgctttttgcaatcagaaatcagatcaagctcggagaggaccccagagtgtccatcaatgttgttctgaagtcggtgcaggagcagacagagaagactctgacctcggaggagctgagccagctgcaggagctgctgtgcaatggctattgggcctttgagtgcctcactgtccgagactacaatgacatgatctgtggcatctgtggtgtggcccccaaagtggaaatggctcagaggagtgaggagaatgtgctagcactgaagagcgtggagttcacctggcctgaattcctgggctctaatgaggtaaatgtggaggacttttgggccacgatggagacagaggtgattgagcaggtggcatttcctgccagcatccctatcaccaaatttgatgcgtctgttattgcccccttcttcccaccactcatgagaggagctgtggtcgtcaacactgagaaagacaaaaacctggatgtgcagccagtacctggcagtggcagtgccttggtgaggctgctccaggagggcacctgcaagcttgatgagattggctcctacagtgaagagaagctgcagcacctgctaaggcagtgtggaatcccctttggggcagaagactccaaggaccaagctctgcttctccttgttgggcctctacgaatctgtacagaatggaagctagaagctataccgggcccccacgtcacttcacaggtggtaaaatctacaaggtgtgcccccatcaggtgggtctgcggctccaagtatcttgtgcgaggtgagagtgcccgtgaccatgtggacctgcttgcctcttcccgccactggccgcctgtctatgtggtagatatggccacgtcagtggccctgtgtggctgacctctgctacccagagctggactaaccagatgtggggggaggaaccaggggctgttttctttagccccacagagccacctgttgagtgtgtcctggcccagagctcttgggaccagcattatactgtggacatgacagaaactgaggtactctatccagcacccagttcaccaagactgccacgcggcgcattcgtccatggcaggccttacagcccaatcctggggtgaccccagttgttggggaacaattcctttgggccctgttgccctgaaattgggcaccttacggcaaccatcctgggcctccatcgtgggacagcaaaccaaacggtgttccgccagcggcccattgccttcgacaatgccactcactattacctctacaaccgcctcatggacttcctcaccaagccgcgaaatttgtcaatcggtcaagatccatggacattgtacagagctgccagcctggtgaggtggtcattcttgacaccctctaccgccttggggttgctcagatcaagacagagacagaggaggagggtgaggaagaggaggtggccgcagtggcagaataagccaggctgttgtacagggactacaccatctctcaagccatagtaaggcccttgcctgaggcagagctatccaagggacccgcagaagtggtctcctgtggggagggcctctgactgctgggactgaccaaagagcttccattccctgagcatggtgggacccagggtcctcagttctcaaccctccaggggtcaggagtggtaccaggaaacctcttctggccccgagagagcacttgggggacacggtatgtttaatggaggggaggctgagggaaaggctgatagctggtgggttccgtggggcctgcggtgtgggtcagggtggaggtcctgggtgggctaaggcgtgcccccaagcactaggtgggaaggctgctgaggtctctcccacccctgaggagccctggtttcagcccccctcaagtctgatgaattgcttagcctgttagcctttgactaagggccttggtggcctcattaactctagggggtccctttggcgtcttgattctccctgaaggagggatgcatttctctcttgctccttcctgtaaccccacatttgggggaaagctgaaggagggaggaaaagtcaagcccacagctctccttcccagcactgtccctctcccaccccaagcttttgaggaagagcatcccccttccctccctttcccctggcccactgctgctgcagcccaatatccctctctgggccctgggaaccctctcccacagaggggatgtggtcccctggtcatgacataacctagcagcagtaggaaaaactcccttctatgaaggggaagcagactgggccataaggaaacagcaggactggctcaagtgcccaaggtttgtttagggcctgggaattggccatgtgttaatttattgagtggagtaggtggcttttttttccctccctcttcccccaacaagaataaagtttattaaattatctggttttggtgtagcaggagtcaattccgtgcacatcgtatggggcacagtgtggtcaagctccacagctgtgagctcgtcacttcatgtgaaggagggaaggaaagaaagacgttccagggaatttgcaggtactcatgtggcacaaagaaccagaggctgactgcatcaatgc

SEQ ID NO: 132952 - DNA, 1057 bp, Homo sapiens
  misc_feature (1)...(1057): n = a,t,c or g
tgaggtgcccannnaggnnnnntttactgagaccctaggctgtgtcggcgaattcgtaccagggcggcgcgtggtctacgccgagtgacagagacgctcaggctgtgttctcaggatgaccgagtgggagacagcagccaccagcgggtggccagagaaccccagacatcaaagctctttggggaagtggagcacccgatgatgttgcaagatcaatgaacatttccttgcaggaattacattgccagttgaaggagaaagttatgcccaagttacttgccttcacagttgccaaggcggttatgccgccaaaaacctttcccgcaaagctcaagtgtcccatttgtggagcgccctcactaactccccaatgatgatgcaccggccgcaacaaccggcaaggaagctcatgactgtgcgcatcgtccaagcaatgccttcgagatcattacaccttgctcacaggcggagaaccctcttgcaggtccttggtgaaccgccatcgatcaacagtggttccccgggaggactcccacacgcatttgggcgctgccgggactgtgagacgacaggctgtggatgtgttcccccctgcgccgtgttgaaccagggccattttgggttgcttgttgcacaaggcggctcgttaaaggcttggcctttccgggaacatttaagaccattggttgagttgcctgggcagatggagctcattcaatgcttgccaaggggctccttcgaactcctattgcctttaagaagaaggacgtgtggccttcttggagcatgtggccaagtccaaccgctgattttcccagctgctgcccaataaaccctgctctgccctttggggcagtcccagccnnnnnnnnnnnnnnnnntctnnnnnnnnnnccgggcccccaattccccttatgggggggcgtataaaaattccggggccgcggtttaaaaccggggggcgggggaacaaggggccgcggcttttgtctgtctgccctcttctttcgggtggccatgcgggaggaatacccgagttggggagtttgagacccct

SEQ ID NO: 132953 - DNA, 559 bp, Homo sapiens
gacacccatttcaaagatcccaccaccgcacatccactgctcaccttcttgtcactgtcgcagggtcccagccctcccaaccttccacttggggtgcccatctcaaggaatggggctgggaccccggggtgagggccgtgccaatcccatccccactgtcctcaagagagaccaggaaggactaggctacagatcagcaccccagccccgagtgacacatttcccagcttgggatacccgagctgtggctgggagggagagaccccctcgggtggccacattgagctggagggaggagagaaggagggaggagaaagacagggcttgggagcgggatctaaggacttacatgaacctcgagttctgactttggtaaagtctgaccctagtctgctgctgaagtctgaacttgggcctctgacctgggccctttgacttccccttcctgggatctgcccagatgcagatcctgaagtttttggtccataggctctgtcttcgtgagagacgggctgagagtcaaaaataaatcacccatttgtggtttattcccaaaaaa

SEQ ID NO: 132954 - DNA, 427 bp, Homo sapiens
aaaggagggagccaggctggatctctttccgcagctctcctcacgttcccctctagtcccggcgcggcgctgctgcccaggggactggcctatcctcggccaatccgctgggtccttattgcctgttgggcccctagtgcgaatcagtcccgccagagacccttgacgggcatactgtttcctccgggctcctgcctcatgaggggagaggaagaggaaactccgaaatgggatcgcggaagacttaaagggccaggctgatttttttttcctactgcaggtctctgaggctgtggttgctacagggtcaccacgagcttggcttacttgtctcatccttcccttgcctgggatcattttctcagttctcccaaaagccatgtcccggcccttgctcatcaccttcaccccagccactgaccccagc

SEQ ID NO: 132955 - DNA, 482 bp, Homo sapiens
aaaatttgccctcgagcccaagaattcggcacgaagggaacaaaatcggtattgtagggtcccatgtttttacgcaaagtctctctccccttaggccctgcaaagtcctaagttgtggggttactttagtggcaggaaagtgtttttgaactactttttctcatcccagcaggtctctgaggctgtggttgctacagggtcaccacgagcttggcttacttgtctcatccttcccttgcctggtatcattttctcagttctcccaaaagccatgtcccggcccttgctcatcaccttcaccccagccactgaccccagcgacctctggaaggatgggcagcagcagccacagcccgagaagccagagtccaccctggaatgggcttgcagcgaagcttttctatgaggccctgattggggatgagagcagcgctcctgactcccagagatctcagactgaacctgccagagaaagaaagaga

SEQ ID NO: 132956 - DNA, 1947 bp, Homo sapiens
  misc_feature (1)...(1947): n = a,t,c or g
ggcccgggagtctgggcaatacagttttgtgctcactgggtgaagaggctgacttagggctgggaaaggagggagccaggctggatctctttccgcagctctcctcacgttcccctctagtcccggcgcggcgctgctgcccaggggactggcctatcctcggccaatccgctgggtccttattgcctgttgggccccctagtgcgaatcagtcccgccagagacccttgacgggcatactgtttcctccgggctcctgcctcatnagggggagagaatggcgccattttgcggtacgtgaagctacacagcaacacgtataggagactctccccgagatcttctagggagtgacccatctatttttgtttgggaagaggaaactccgaaatgggatcgcgggaagaattaaagggccaggctggatttttttttcctactgcaggtctctgaggctgtggttgcttacagggtcaccactgagcttggctttaccttgtctcatccttcccttgcctggtatcatttttctcaagttctcccaaaaagccattgtccccggccccttgctcatcaccttcaccccagccactgaccccagcgacctctggaaggagtgggcagcagcagccacaagcccgagaagccagagtccacccttggatggggctgcagcccgagctttctatgaaggccctgatttggggatgagagcagcgctcctgactcccagagatctcagacttgaacctggccagaggaaagaaagagaaagaaaagaggattattgaaggcaccagcagcagaagcattggcagaagggagcttcaggaagacctgtacaagggagatcccttgaagctgacgatccgatgacttaccggatactgacgtcagcccaagagggggacactgccatagctgatgctgactgctggaaccgcatgaggcaggaggagctggggggaatatcaacgcccgggatgccttctggtggaccccactgatgtgtgctgctcgagcgggccagggggcagctgtgagctatctcctgggccctgggggctgcctgggtgggggtctgtgagctgagtggcagggatgcggctcaggctcgctgaagaagctggcttccctgaggtagcccgcatggtcagggagagccatggagagacaaggagcccggaaaaccggtctcctactccctccctccagtactgcgagaactgtgacacccacttccaagatttccaaccaccgcaacatcaactgttcacctgctgtcactgtcgcagggtcctcagcctccccaacttccacttggggtgcccatctccacaccgcggttttaaattctgctgctaggcggggttgggagcccaggaatggggctgggaccccggggtgagggccgtgccaatccccatccccaactgatcctcaaatagggacccaggaaaggactaggcttacaagatcagcacccccagccccgaagtgacacattttcccagctttgggataccccgagctgtggctgggagggagagacctccctcgggtggccaacactgaactggaaggaaagaggagaaggagggaggagaaagacagggcttgggagcgggatctaaggacttacatgaacctcgagttctgactttggtaaagtctgaccctagtctgctgctgaagtctgaacttgggcctctgacctggggccctttgacttccccttcctgggatctgctcagatgcagatcctgaagttttttggtcaataggctcttgtcttcgtgagagacgggctgagagtcagaaataaatcaacccatttgtgggtttaaaaaagtagtattgaaattctattatatgggtttttttattagcgggccgcgtgttgattcctcttgaggggggttttttatcctggccccccgccctttt

SEQ ID NO: 132957 - DNA, 542 bp, Homo sapiens
  misc_feature (1)...(542): n = a,t,c or g
ggcgatgactaatgcagactatgggattgagcactatcggatcgaccacgcgtccgattatggaaaaaaaacattgcaaaatataaaataaataaaaaaaggataggaaactttgaaccttatgtaccgagcaaatgccaggtctagcaaacataatgctagtcctagattacttattgattnnnnnnnnnnnnnnnnnnnnnnnnnnnnnnnnnnnnnnnnnnnnnttaatgttttatagaccctgggaaaaagaattttcagcaaagtacaaaaatttaaagcattcctttctttaattttgtaattctttactgtggaatagctcagaatgtcagttctgttttaagtaacagaattgataactgagcaaggaaacgtaatttggattataaaattcttgctttaataaaaattccttaaacagtgnnnnnnnnnnnnnntaatnnnnnnnnnnnnnnnnnnnnnnnntatatttatnnnnnnnnnnnnnnnnnnnnnnnnnnnnnnnnnnngagggggggcttcttctttattccccc

SEQ ID NO: 132958 - DNA, 2597 bp, Homo sapiens
  misc_feature (1)...(2597): n = a,t,c or g
cggaaaggtcgcggcctgtggccctgcgggcagccgtgccgagaatgaaccccagcacccccagctacccaacggcctcgctctacgtgggggacctccaccccgacgtgactgaggcgatgctctacgagaagttcagcccggcagggcccatcctctccatccggatctgcagggacttgatcaccagcggctcctccaactacgcgtatgtgaacttccagcatacgaaggacgcggagcatgctctggacaccatgaattttgatgttataaagggcaagccagtacgcatcatgtggtctcagcgtgatccatcacttcgaaaaagtggagtgggcaacatattcgttaaaaatctggataagtccattaataataaagcactgtatgatacagtttctgcttttggtaacaccctttcatgtaaggtggtttgtgatgaaaatggttccaagggctatggatttgtacactttgagacacaccgaagccagctgaaagagctattgaaaaaatgaatggaatgctccctaaatgatcgcaaagtatttgttggacgatttaagtctcgtaaagaacgagaagctgaacttggagctagggcaaaagaattcacccaatgtttacatcaagaattttggagaagacatggatgaatgggcgccttaagggatctctttggcaagttttgggcctgcacttaagtgtgagaagttaatgactgatgaaagtggaaaatccaaaggatttggatttgtaagcatttgaaaggcatgaagatgcacagaaagctgtggatgagatgaacggaaaggagctcaatggaaaacaaatttatgttggtcgagctcagaaaaaggtgcgaacggcagacggaacttaagcgcaaatttgaacagatgaaacaagataggatcaccagataccagggtgttaatctttaatgtgaaaaatcttgatgatggttattgatgatgaaccgtctccggaaagagttttctccatttggtacaatccagctagtgccaaaggttatggatggagggttggtcgcagcaaagggtttaggttttgtatgtttctcctccccagaaggaagccactaaagcagttacagaaatgaacttttagaattgtggccacggagncccttgtatgtagctttagcttcagcgcaaagaagagcgccaggctcacctcactaaccagtattatggcagaggaatgggcaagtgttacggaggctgttcccaaccctgttaattcaacccctaccaggccaggcacctcctttcaggtttactttcatgggcaggttttcccacagatttcggaaccgtgctggcatactatccttcctagccaaattgctcaaactaagaccaagttccttcggtggactggtcagggtgccaggacttcatccattcccaaaatatgccggggtgctatcccgcccagctggctcctagaccacccatttaaggtactatggagaccagcttcttcacaaggttcccagaggtcatgccaacacagcgtggttgctaacacatcaaacacagacaaatgggttccacgttcctgcagcctgcaagccgctgcagcgtacgtcctgctgtccggcaccgtttccacagtataaatatgctgcaggagttcgcaattcctcagcaacatctttaatgcacagccacaagttacaatgcaacagccctgctgttccatggtaccaagggtccagggaaccctttggacctgcctccccatggttgggcatctgccccctccctcaaggagcaaaagccaaatgttggggtggaacgggctgtttccctcttattccaagcccatgcacccctactccttgctggtaaaatcacttggcaatgttgttggagattgataattcagaacttccttcatatgctcggagtctccaggagtcactcccgttctaaagggttgatgaagctgtagctggtactacaagccccccccaagctaaaagagggctggcccagaaagcaggttaacaagtgcccaccggtgtccccaactgtttaaagtgagctttttccttttgattgatccagggacccatgaaaaggaaaccttggtgcctcacccgaagaaaaatattctaaacatcgagaaactatgggaaaaaaaattgcaaaatctaaaataaaaaatgcaaaatataaaataaataaaaaaaggaaaggaaactttgaacccttatgtaccgagcaaatgcaaggtctagcaaatataatgctagtcctagattacttattgatttaaaaacaaaaaaaagattacttaattttgatttaaaaacaaaaaatcgtaaaatacaaaaaccagttaatgttttatagaccctgggaaaaagaattttcagcaaagtacaaaaatttaaagcattcctttctttaattttgtaattctttactgtggaatagctcagaatgtcagttctgttttaagtaacagaattgataactgagcaaggaaaccgtaatttggattataaaattcttgctttaataaaaattccttaaacagtgaaaaaaaaaaaaaaaaagggc

SEQ ID NO: 132959 - DNA, 1529 bp, Homo sapiens
  misc_feature (1)...(1529): n = a,t,c or g
atggcggaggacggcgaggaggcggagttccacttcgcggcgctctatataagtgggcagtggccgcgactgcgcgcagacactgaccttcagcgcctcggatccagcgccatggcgccctccaggaagttcttcgttgggggaaacctggaagatgaacgggcggaacacgacgtctgggggagctcatcggcactctgaacgcggccaaggtgccggccgacaccgaggtggtttgtgctccccctactgcctatatcgacttcngcccggcagaaagctagatcccaagattgctgtggctgcgcagaactgctacaaaattgactaattggggcttttactggggagatcagccctggcattgatcaaagactgcggccaaccgtgggtggtcctggggcactcagagagaaggcatgtcttttggggagtcagatgagctgatttgggcagaaagtggccccatgctctggcagagggactccggagtaatccgcctgcatttggggagaagctaagatgaaaggggaagcctgggcatcacttgagaaggttgttttcgagccagacaaaggtcattcgcagataaacgtgaaaggactggaagcaagggtcgtccttggcctaatgagccctgtgtggggcctttggttattggcaagacttgcaacaccccaacaggccccaggaagttcaccgaagaagctcccgaggatggcttgaagtccaacgtctctggatgcggtggcttcagagccaccggtaaccatttatggaaggctctgtgaactggggcaaccttgcaaagaagcttggccaagccaagccctgatgtggatgggcttcccttgtggggtggtgcttcccttcaagcccgaaattcgtgggacatcattcaatgccacaacaatgagcccccatcccatctttccctaccccttcgctgccaagcccagggacttaagcagacccaaaagcccaagtaactgcccttttccctggcatatgcttctgaatggtgtcatctgctcctttcctgtgggcctcatcccaaactgtatcttcctttactggtttatatccttcacccctgtaaatggttgggaccaggccaatcccttctccacctaactataatggttggaactaaactgtcaccaagggtggcttctccttggctgagagatggaacggcgtggtgggatttgctcctgggttccctaaggccctagtgagggcagaagagaaaccatcctctcccttcttacaccgtgagcccaagatcccctgcagaaggcaggagtgctgcgctctcccatgggtgcccgtgcctctgtgctgtgtatgtgaaccagccatgtgaagggaataaacctgggcactaggtcttgtggtttgtctgccttcactggacttgcccagataatcttcctttttgaggcagctatataaatgatcatttgtgcaagaaaaaaaaaaaaaacaagaacaggtttctataacaacatctctaacatattttactt

SEQ ID NO: 132960 - DNA, 468 bp, Homo sapiens
  misc_feature (1)...(468): n = a,t,c or g
aggctcnaacttgggtgtcctgcacanaccnccngnnntggaannaccgggccgacccacgcgtccgccgccatcttggttccgcgttccctgcacaaaatgcccggcgaagccacagaaaccgtccctgctacagagcaggagttgccgcagccccaggctgagacagggtctggaacagaatctgacagtgcaagagccctgcttcagatacttacatagtttttggggaagccaagatcgaagatttatcccagcaagcacaactagcagctgctgagaaattcaaagttcaaggtgaagctgtctcaaacattcaagaaaacacacagactccaactgtacaagaggagagtgaagaggaagaggtcgatgaaacaggtgtagaagttaaggacatagaattggtcatgtcacaagcaaatgtgtcgagagcaaaggcagtccgagccctgaagaacaacagta

SEQ ID NO: 132961 - DNA, 1491 bp, Homo sapiens
  misc_feature (1)...(1491): n = a,t,c or g
atgcccggcgaagccacagaaaccgtccctgctacagagcatgagttgccgcagccccaggctgagacagggtctggaacagaatctgacagtgatgaatcagtaccagagcttgaagaacaggattccacccaggcaaccacacaacaagcccagctggcggcagcagctgaaatcgatgaagaaccactgcccaaccccgtcctgggcagcatcagcatcatcgacacccccgggatcctgtctggagagaagcagcggatcagcagaggctatgactttgcagccgtcctggagtggttcgcggagcgtgtggaccgcatcatcctgctcttcgacgcccacaagctggacatctcgnatgagttctcggaagtgatcaaggctctgaagaaccatgaggacaagatccgcgtggtgctgaacaaggcagaccagatcgagacgcagcagctgatgcgggtgtacggggccctcatgtggtccctgggcaagatcatcaacacccccgaggtggtcagggtctacatcggctccttctggtcccacccgctcctcatccccgacaaccgcaagctctttgaggccgaggagcaggacctcttcaaggacatccagtcactgccccgaaacgccgccctcaggaagctcaatgacctgatcaagcgggcacggctggccaaggttcacgcctacatcatcagctccctcaagaaagagatgcccaatgtctttggtaaagagagcaaaaagaaagagctggtgaacaacctgggagagatctaccagaagattgagcgcgagcaccagatctcccctggggacttcccgagcctccgcaagatgcaggaactcctgcagacccaggacttcagcaagttccaggcgctgaagcccaagctgctggacacggtggatgacatgctggccaacgacatcgcgcggctgatggtgatggtgcggcaggaggagtccctgatgccttcccaggtggtcaagggcggcgcctttgacggcaccatgaacgggccgttcgggcacggctacggcgagggggccggcgagggcatcgacgacgtggagtgggtggtgggcaaggacaagcccacctacgacgagatcttctacacgctgtcccctgtcaacggcaagaaacagggcgccaacgccaagaaggagatggtgaagtccaagctccccaacaccgtgctagggaagatctggaagctggccgacgtggacaaggacgggctgctggacgacgaggagttcgcgctggccaaccacctcatcaaggtcaagctggagggccacgagctgcccgccgacctgcccccgcacctggttccgccctctaagctggggctgaagcctcgggccttgccaacattcatggcaaagttcacccggaggtccacgtcctcagcccaggcctcctggactgggtccttgcacagcacagggaagatgccacggtacaggtgggcctga

SEQ ID NO: 132962 - DNA, 629 bp, Homo sapiens
gtccccagagtttgtggatgaagctctgtgtgcgtgctaggagtaccttagcaacttggcccacatggacatcgacaaggacctggaggccccgctgtacctcacccccgagggctggtccctcttcctccagcgctactaccaagtggtccacgaaggggcagaactcaggcacctcgacactcaggtccagcgctgtgaggacatcctgcttcagatacttacatagtttttggggaagccaagatcgaagatttatcccagcaagcacaactagcagctgctgagaaattcaaagttcaaggtgaagctgtctcaaacattcaagatatacacacagactccaactgtacaagaggagagtgaagaggaagaggtcgatgaaacaggtgtagaagttaaggacatagaattggtcatgtcacaagcaaatgtgtcgagagcaaaggcagtccgagccctgaagaacaacagtaatgatattgtaaatgcgattatggaattaacaatgtaaccatatggaagcaactttttttggtgtctcaaaggagtaactgcagcttgggttgaaatttggactggttctatcataaataaagttatggcttcttgttggaaaaaaaaaaaaa

SEQ ID NO: 132963 - DNA, 767 bp, Homo sapiens
agaagcctatgccaaactggtcttcggcaggtacaggagtaccaaagtcactatcggaaatctagaaaatctctttgtcatccaaaaccagatgtctacaagagccctgcttcagatacttacatagtttttggggaagccaagatcgaagatttatcccagcaagcacaactagcagctgctgagaaattcaaagttcaaggtgaagctgtctcaaacattcaagaaaacacacagactccaactgtacaagaggagagtgaagaggaagaggtcgatgaaacaggtgtagaagttaaggacatagaattggtcatgtcacaagcaaatgtgtcgagagcaaaggcagtccgagccctgaagaacaacagtaatgatattgtaaatgcgattatggtaagtgttcaagcctttgttccttgaactccctctgccctgaccaattatgagtgactttaatttgtccttgcctaaatatcagcccaattaaggaacctcattccagagcctcttttgagttgccgtataggttttagtggcctaaattctcctgatttgcctgtaagagttttagtgacctgaattctcctgatttgcctataagaaccgctaattatcttttctctgttacaggaattaacaatgtaaccatatggaagcaactttttttggtgtctcaaaggagtaactgcagcttggtttgaaatttgtactgtttctatcataaataaagttatggcttcttgttggatgaaaaaaaaaaaaaa

SEQ ID NO: 132964 - DNA, 1331 bp, Homo sapiens
  misc_feature (1)...(1331): n = a,t,c or g
ggcacagtaagtactttctgtgccgctactgtctatccycagccatccyccttttctttcgggctaagccgccccggggactgagagttaaggagagttggaggctttactgggccacagggttcctacacyccccttgggccttccggacaaaatggggtctgcggttggtgtcctggcaaaagcagggtagaagggctgcggggcgggcccagaatccgagcctgcagagatgggagcagttgcagtgttgagggcggaagaggagtgcgtcttgttttgggaactgcttcacaggatccagaaaaggaaatgcccggcgaagccacagtttctcgttctctgctacagagcaggagttgccgcagccccagggctgagacagttgtttctcatcttagggtctggaacagaatctgaccagtgatgaatcagtaccagagccttgaagaacaggattcccacccagggcaaccacacaacaaagcccaagctggccggcagcagtctgaaatcgatgaagaaccacgtcagtaaagcaaaacagagtcggagttgaaaagaaggccccggaagggctattgtcccaaacttgggtctttcggcaggttacaggagttaccaaggaattcactatcccggaaatctagagaatatcctcctttgtcatccaccaaaaccagatgtctaccaaggagcccctgctttcaggatacttacccatagtttttggggaagccccaaggatccgaagattttatcccccagccaagccacaacctagccagcctgcctgagaaaattcaaaagttccaaggtgaagcctgtcctcaaacatttcaagaaaacacaccagactcccaactgtaccaagaggagagttgaagaggaagaggtccgatgaaaccaggtgtaggaagttaaggaccatagaatttggtcatgtcacaagcaaatgtgtccgagaggcaaaggcagtcccgagccctgaagaacgaacgagtaatgatattggttaaattgccgattatgggaatttaacaatgttaaccatatgggaaggcaactttttttgggtgttctccaaagggagttaacttgcagcttgggtttgaaaatttgtatctgtttctattcattaaattaaagtttatggcttcttgttggaaaaaaaataaaaaatnnnnnnnnnnnnntggggggggccgttttaaagaatccttgggggggccaaattttacgggggtttggaaggttttatttttttccttataggggggcgtattaaaaccaaccttgggaattttggaaaagaaccttaatttttgggg

SEQ ID NO: 132965 - DNA, 272 bp, Homo sapiens
tctttggcattcaggggcccccattgctgggccccacacgggagaccacatctggaagcactattcctacagctccctctgctggagacggaaagtgacagtttgttgcaaagacctgtagaaacattacttacacgttcatttctgtacacatttagttaatttagaacctgggacttttacaatcgattccccaaacccctttatggcagcaacactgagaatcttagaaagatgtcgcgttttcttttaatgaatgagagaagcccatt

SEQ ID NO: 132966 - DNA, 443 bp, Homo sapiens
tttttttttttccaggggttagccactttaatagaaaatatgatcaaaactcgattacaagagttcaaaaagacatagaaaaccagtgagtttcaattttattacaagttttcaaatctgggactagtttctttttttcttttaactgaaatgccaacttcagcccagggttttttcacaaccaaactaaaaatgacttacacgttcatttctgtacacatttagttaatttagaacctgggacttttacaatcgattccccaaacccctttatggcagcaacactgaaggagcacagtttctctctctaggaagaagaggattagcagacataattgtgtgcgtcaagagaaatttgtaatcaaaaaatgaaagtaagacgaatggcccagaaacccgcattttattgacagtcattttccccacagagaatcttagaaaga

SEQ ID NO: 132967 - DNA, 2361 bp, Homo sapiens
acctttcctccctgaggcccacctggggaaccagaaatgccagaactgtaactccacctctgggatctgcagggtgagtgtgaaggtctgcccaggcccctgggtgcatgccaagctgtgtgctcccaccttgatgtccagagatgtaaccctcccagacgctcctgtgaaaaagccttgtggtgaagggggggcaaaaaaaaagaagcaagttctgaagttcactctatgattgcacccacccttgtagaagatgggaatcatggatgctgcccaattttgagccagtttttgcaaagaaaggatcaaagtgtaacggaaaagctgggaaccttgagtggaggggtggtagacccatcgaaaggagcaagaggcaagatcaccgtgacathccgaggtgcctttctccaaaagggtattttgaaaatatctcaaccaaaaaaatatttgaagaagaataatctacggtgacctggtttgccgcgtagtttgcctaaccagccaaaggagaagttaccgaatttccgttacttccagattaaccagggacgaaggaaggagggaggaagacgagggtttaaatttcctttatctgggaaaattttgttatgagttctttggaattaaaactttggggaaccaaaaagggtggtttatcccttgtatctctgccagtgtggattgaacagaaaaattggaaatccatagtccaaaggggcttcccttggtttcgccactccatttatttgtaacttgacttcttttttttttctgcttaaaaatttcaattctcgtgggtaaaacccagagtagaaggagagggtgacctttacccgaactgacagcccattggggaggcagatgcgggtgtggaggtgtgggctgaacggtaagtgactgtttgattttaaaaagtgtgactgtcagttgtatctgttgcttttctcaatgattcagggatacaaatgggcttctctcattcattaaaagaaaacgcgacatcttttctaagattctctgtgggaaaatgactgtcaataaaatgccgggtttctgggccattccgtcttactttcattttttgattacaaatttctcttgaccgcacacaattatgtctgctaatcctcttcttcctagagagagaaactcgtgctccttcagtgttgctgcccattaaagggggtttggggaaatcgattgtaaaagtccccgggttctaaatttaacctaaaatgtggtacaggaaatggaacgtgtaagtaatgttttctacaggtcttttgcaacaaactgtgcacttttcgtctccagcaggagggagctgtagggaatagtgcttccaggatgtgggtctcccgtgttggggcccagcaatggggggcccctgaatgccaagaagctctggaggttcttgaaagaaggggacacgaaggaggagtgactgggaagccctcccaatgccaaggaggtgggaggtgccctggaaataagctggcctcatgccacttaggccatgacttggatttaatgtcagtggtgtgccacagtgcaagaaggctaagacaactgaaaggggctaccaaggctgggaaaaaaatgcaattgttgctgtgagtgactttgaaagactctggtgccttgtggtgcccttctgaaattcaaacagtaatgcaaaagtgtcttgcattagaatttacggtgtctaaaattcatgtttttaaaagagcttgcctacagatgggtttccacaccttgaaaattgtgcccctgcggagttgccatagccgggaagttccaatgctccagcccctaccttgggctccccattaaaacatttgggtgcccctgtggattgcagttgaaccgtgttgaaggctttggcaatttccacttgtgttaaaaggctctggccatttttcccatttcctatgcaaatttcctttgaaagccagaattgccttgccaaaattccttcctcctgcccgtcacagaaaggcaggagtttcttttcaaactttcactggagggcatcagtttgctctttggcaatgtccccttaacccatgattattaacgtaagtttgtggcttgagtttacaaattcctacttgttgcattgatgttcccatgtagtaagtcatttttagtttggttgtgaaaaaaaccctggggcttgaagttggcgatttcagttaaaaggaaaaavggaaactagtcccaagatttggaaaacttggtaataaaattgaaaactaactggttttctatgtctttttgaactcttgtaaatcgagtttttgatccatattttctattaaagtgggctaacacctggctactcttactgtaaaaaaaaaa

SEQ ID NO: 132968 - DNA, 762 bp, Homo sapiens
atttcggaacaggcccgggtcctctgtgcaggttggaggatggttggttgtggcgagcgaggctgaaggagccgggacgcggcggctctgggcctcgggaacttgagccggtactcaccttccgccctttctccccgtcgctgtccgccagcccatggccctacgcttacccttattgccgtgggcctcaaacaagggcccacaaaagtgacccaagaaccgtgagcaagcccaaggcaccatgtccgccgcgggcgtcttgaccaaacacaccaagttcgtgcgggacatgattcgggaggtgtgtggcttttcccccgtacgaagcggcgcgccatggagttactgaaggtctccaaggacaaaccgggccctcaaatttatcaagaaaaagggtggggacgcacatccgcgccaagaggaagcgggaggagcttgagcaacagtactggcccgccattgaggaaaagcttgcttgccaagaaagacttgagcccctccccttgccctctcccttgaaataaagaacagcttgacagaagccctggctctcctgctgtccgtgggtgggtgtgggtgtgtcgggggcccgcagtcccctgtctggtgcccgctttgagccacaccctctccgggtgctgcctggtcgtgaatcaaaagccgtggcccgcccacccttcccggggcagcaggtgaggaagccgccgtactgcaaatgactttaatcattaaatagcttctatgccacacaaaaaaaaaaaa

SEQ ID NO: 132969 - DNA, 465 bp, Homo sapiens
  misc_feature (1)...(465): n = a,t,c or g
ccgccccccatcgattcagatccctaggccangnggnggaattcggcccgggcggcctcacatcggcggcgcctgccggcggggacaagaaggtcatcgcaacgaaggttttgggaacagtaaaatggttcaatgtaaggaacggatatggtttcatcaacaggaatgacaccaaggaagatgtatttgtacaccagggtgcggaggcagcaaatgttacaggtcctggtggtgttccagttcaaggcagtaaatatgcagcagaccgtaaccattatagacgctatccacgtcgtaggggtcctccacgcaattaccagcaaaattaccagaatagtgagagtggggaaaagaacgagggatcggagagtgctcccgaaggccaggcccaacaacgccggccctaccgcaggcgaaggttcccaccttactacatgcggagaccctatgggcgtcgaccacagt

SEQ ID NO: 132970 - DNA, 2102 bp, Homo sapiens
  misc_feature (1)...(2102): n = a,t,c or g
agtagaaaaagatgtgaatacttggaaaggaagacacatttttttaaatatatgcctggtaaaacggatcagaaggcaggtccccatggagcacaccctcgccctaaacatgctgaacccgggctgccatagcctgcgtggtccctccaaggtgactgctccgacaaaagggtacgctcttcaaacgcactacgtttaaggcaattccagaaaccctcgtctgtgccgcgactacacggccattaaagaaaagccgactctacgcccgccgtaatgttctcagatcacagggaccgtatttggagctgggagggagggaagccttttcttcacggggggttaaggcgtcttcgagcccccttccaatcccgggtccggccgggtaatccctgcccagcgttcgggcgtgcctttttctcagccgagactcaaccctgaacgtggggcccgccagcccgacggctgcctagtggaagtcacgttccttctgcccgtcctctcggttaccatcacacccccgggaggagccgcagctgccgcagccggccccagtcaccatcaccgcaaccatgagcagcgaggccgagacccagcagccgcccgccgcccccccccggcgcccccgccctcagcgccgccgacaccaagcccggcactacgggcagcggcgcagggagcggtggcccgggcggcctcacatcggcggcgcctgccggcgggcgacaagaaggtcatcgcaacgaaggttttgggaacacgtaaaatggttcaatgtaaggaacggatatggtttcatcaacaggaatgacacccaaggaagatgtatttgtacaccagactgccataaagaagaataacccccagaagtaccttcgcagtgtaggagatggagagactgtggaattttgatgttgttgaaggagaaaagggtgcggagggcagcaaatgttacagggtcctggtggtgttccagttcaaggcaagtaaatatgcagcagaccgtaaccattatagacgctatccacgtcgtaggggtcctccacgccattacccgcaaaaattaccagaatagttgagagtggggaaaagaaccgagggatcgggagagtgctccccgaaggccaggcccaacaacgccggccctacccgcaggcgaaggttcccaccttactacatgcggagaccctatggggcgtcgaccacagtatttccaaccctcctgtgcagggagaagtgatggagggtgctgacaaccagggtgcaaggagaacaaggtagaccagtgaggcagaatatgtatcggggatatagaccacgattcccgcaggggcccctcctcgccaaaagacagcttaggagagggcggcaatggaagaagataaaagaaaatcaaggggtgtgggacccaaggttcggcagcccacctcaaacgtcgttaccgccgcaactttcaattaccgagcgcagacggccccagaaaacccctaaacccccaagatgggcaaaagagaccaaaagcagccggatcccacccagcttgagaattcgttccgctccccgaggctgagccagggcggggctgagtaaatgccggcttaccattctctaccatcatccgggtttagtcatccaacaagaaggaaatatgaaattccagctaataagaaattgaacaaaagattggagcttggagacctaaagtgccttgctttttgccccgttgcaaccagataaataagaacttatctgcatttatctattgcagcatgggggtttttaattattttttaccctaaaagacgtctctttttttgggtaattaacaaacgtgttttttttaaaaaaagcctggttttttctccaatacgccttttaaaggtttttaaattggttttcatatctgggtcaagttggggggggggcccgggggggaaaaaggggggcaaaaaaaaattttttttttgtttttttngttgaagaaggagagagccttccactttttaatttgtaataaaagtttacaacttgattttttcaaaaaagtcaacaaactgcaagcacctgttaataaaggtcttaaataataaaaaaaaaaaaaaaaa

SEQ ID NO: 132971 - DNA, 654 bp, Homo sapiens; identical to SEQ ID NO: 115110

SEQ ID NO: 132972 - DNA, 5266 bp, Homo sapiens
gaccagatcagcccccagagcagcctcatggctggaggatccaagagaggttagatccgtctgtctgtctgctaccttcttcaccttatctctgcagaagcccaggttgctcttgttctctccttctgtggttcatctgggggtccccctatcggtgggggtgcagctccaggatgtgccccgaggacaggtagtgaaaggatcagtgttcctgagaaacccatctcgtaataatgtcccctgctccccaaaggtggacttcacccttagctcagaaagagacttcgcactcctcagtctccaggtgcccttgaaagatgcgaagagctgtggcctccatcaactcctcagaggccctgaggtccagctggtggcccattcgccatggctaaaggactctctgtccagaacgacaaacatccagggtatcaacctgctcttctcctctcgccgggggcacctctttttgcagacggaccagcccatttacaaccctggccagcgggttcggtaccgggtctttgctctggatcagaagatgcgcccgagcactgacaccatcacagtcatggtggagaactctcacggcctccgcgtgcggaagaaggaggtgtacatgccctcgtccatcttccaggatgactttgtgatcccagacatctcagagccagggacctggaagatctcagcccgattctcagatggcctggaatccaacagcagcacccagtttgaggtgaagaaatatgtccttcccaactttgaggtgaagatcacccctggaaagccctacatcctgacggtgccaggccatcttgatgaaatgcagttagacatccaggccaggtacatctatgggaagccagtgcagggggtggcatatgtgcgctttgggctcctagatgaggatggtaagaagactttctttcgggggctggagagtcagaccaagctggtgaatggacagagccacatttccctctcaaaggcagagttccaggacgccctggagaagctgaatatgggcattactgacctccaggggctgcgcctctacgttgctgcagccatcattgagtctccaggtggggagatggaggaggcagagctcacatcctggtattttgtgtcatctcccttctccttggatcttagcaagaccaagcgacaccttgtgcctggggcccccttcctgctgcaggccttggtccgtgagatgtcaggctccccagcttctggcattcctgtcaaagtttctgccacggtgtcttctcctgggtctgttcctgaagcccaggacattcagcaaaacacagacgggagcggccaagtcagcattccaataattatccctcagaccatctcagagctgcagctctcagtatctgcaggctccccacatccagcgatagccaggctcactgtggcagccccaccttcaggaggccccgggtttctgtctattgagcggccggattctcgacctcctcgtgttggggacactctgaacctgaacttgcgagccgtgggcagtggggccaccttttctcattactactacatgatcctatcccgagggcagatcgtgttcatgaatcgagagcccaagaggaccctgacctcggtctcggtgtttgtggaccatcacctggcaccctccttctactttgtggccttctactaccatggagaccacccagtggccaactccctgcgagtggatgtccaggctggggcctgcgagggcaagctggagctcagcgtggacggtgccaagcagtaccggaacggggagtccgtgaagctccacttagaaaccgactccctagccctggtggcgctgggagccttggacacagctctgtatgctgcaggcagcaagtcccacaagcccctcaacatgggcaaggtctttgaagctatgaacagctatgacctcggctgtggtcctgggggtggggacagtgcccttcaggtgttccaggcagcgggcctggccttttctgatggagaccagtggaccttatccagaaagagactaagctgtcccaaggagaagacaacccggaaaaagagaaacgtgaacttccaaaaggcgattaatgagaaattgggtcagtatgcttccccgacagccaagcgctgctgccaggatggggtgacacgtctgcccatgatgcgttcctgcgagcagcgggcagcccgcgtgcagcagccggactgccgggagcccttcctgtcctgctgccaatttgctgagagtctgcgcaagaagagcagggacaagggccaggcgggcctccaacgagccctggagatcctgcaggaggaggacctgattgatgaggatgacattcccgtgcgcagcttcttcccagagaactggctctggagagtggaaacagtggaccgctttcaaatattgacactgtggctccccgactctctgaccacgtgggagatccatggcctgagcctgtccaaaaccaaaggcctatgtgtggccaccccagtccagctccgggtgttccgcgagttccacctgcacctccgcctgcccatgtctgtccgccgctttgagcagctggagctgcggcctgtcctctataactacctggataaaaacctgactgtgagcgtccacgtgtccccagtggaggggctgtgcctggctgggggcggagggctggcccagcaggtgctggtgcctgcgggctctgcccggcctgttgccttctctgtggtgcccacggcagccgccgctgtgtctctgaaggtggtggctcgagggtccttcgaattccctgtgggagatgcggtgtccaaggttctgcagattgagaaggaaggggccatccatagagaggagctggtctatgaactcaaccccttggaccaccgaggccggaccttggaaatacctggcaactctgatcccaatatgatccctgatggggactttaacagctacgtcagggttacagcctcagatccattggacactttaggctctgagggggccttgtcaccaggaggcgtggcctccctcttgaggcttcctcgaggctgtggggagcaaaccatgatctacttggctccgacactggctgcttcccgctacctggacaagacagagcagtggagcacactgcctcccgagaccaaggaccacgccgtggatctgatccagaaaggctacatgcggatccagcagtttcggaaggcggatggttcctatgcggcttggttgtcacgggacagcagcacctggctcacagcctttgtgttgaaggtcctgagtttggcccaggagcaggtaggaggctcgcctgagaaactgcaggagacatctaactggcttctgtcccagcagcaggctgacggctcgttccaggacccctgtccagtgttagacaggagcatgcaggggggtttggtgggcaatgatgagactgtggcactcacagcctttgtgaccatcgcccttcatcatgggctggccgtcttccaggatgagggtgcagagccattgaagcagagagtggaagcctccatctcaaaggcaaactcatttttgggggagaaagcaagtgctgggctcctgggtgcccacgcagctgccatcacggcctatgccctgtcactgaccaaggcgcctgtggacctgctcggtgttgcccacaacaacctcatggcaatggcccaggagactggagataacctgtactggggctcagtcactggttctcagagcaatgccgtgtcgcccaccccggctcctcgcaacccatccgaccccatgccccaggccccagccctgtggattgaaaccacagcctacgccctgctgcacctcctgcttcacgagggcaaagcagagatggcagaccaggcttcggcctggctcacccgtcagggcagcttccaagggggattccgcagtacccaagacacggtgattgccctggatgccctgtctgcctactggattgcctcccacaccactgaggagaggggtctcaatgtgactctcagctccacaggccggaatgggttcaagtcccacgcgctgcagctgaacaaccgccagattcgcggcctggaggaggagctgcagttttccttgggcagcaagatcaatgtgaaggtgggaggaaacagcaaaggaaccctgaaggtccttcgtacctacaatgtcctggacatgaagaacacgacctgccaggacctacagatagaagtgacagtcaaaggccacgtcgagtacacgatggaagcaaacgaggactatgagtacgatgagcttccagccaaggatgacccagatgcccctctgcagcccgtgacacccctgcagctgtttgagggtcggaggaaccgccgcaggagggaggcgcccaaggtggtggaggagcaggagtccagggtgcactacaccgtgtgcatctggcggaacggcaaggtggggctgtctggcatggccatcgcggacgtcaccctcctgagtggattccacgccctgcgtgctgacctggagaagctgacctccctctctgaccgttacgtgagtcactttgagaccgaggggccccacgtcctgctgtattttgactcggtccccacctcccgggagtgcgtgggctttgaggctgtgcaggaagtgccggtggggctggtgcagccggccagcgcaaccctgtacgactactacaaccccgagcgcagatgttctgtgttttacggggcaccaagtaagagcagactcttggccaccttgtgttctgctgaagtctgccagtgtgctgaggggaagtgccctcgccagcgtcgcgccctggagcggggtctgcaggacgaggatggctacaggatgaagtttgcctgctactacccccgtgtggagtacggcttccaggttaaggttctccgagaagacagcagagctgctttccgcctctttgagaccaagatcacccaagtcctgcacttcaccaaggatgtcaaggccgctgctaatcagatgcgcaacttcctggttcgagcctcctgccgccttcgcttggaacctgggaaagaatatttgatcatgggtctggatggggccacctatgacctcgagggacacccccagtacctgctggactcgaatagctggatcgaggagatgccctctgaacgcctgtgccggagcacccgccagcgggcagcctgtgcccagctcaacgacttcctccaggagtatggcactcaggggtgccaggtgtga

SEQ ID NO: 132973 - DNA, 1466 bp, Homo sapiens
tgcccagatcagcccccagagcagcctcatggctggaggatccaagagaggttagatccgtctgtctgtctgctcctcctgttcgacagtcagccgcaatcttcttttgcgtcgccagccgagccacatcgctcagaacacctatggggaaggtgaaggtcggagtcaacggatttggtcgtattgggcacctggtcaccagggctgcttttaactctggtaaagtggatattgttgccatcaatgaccccttcattgacctcaactacatggtttacatgttccaatatgattccacccatggcaaattccatggcacccgtcaaggctgagaacgggaagcttgtcatcaatggaaatcccatcaccatcttccaggaagcgagatccctccaaaatcaagtggggcgaatgctggcgctgagtaccgtcgtggaagtccactggcgtcttcaaccaaccatggagaaaggctggggctcatttgcaaggggggagccaaaagggtcatcaatctctgccccctctggctgaatgccccccatgttcgtcatggggtgtgaaccatgaagaagtatgacaaacagccttcaagatcatcagcaatggcctcctgcaccaaccaactggcttagcaacccctggccaaaggttaattccatgacaactttgggtaatcgtgggaaggactcatgaccacagttccatggccatcactgggcaacccaagaaagactgtggattggcccctcccggggaaaactgtgggccgtggatgggccgcgggggcttttccagaaacatattcctttgcctctactgggcgctgccaagggctgtgggcaagggtcatccctgagcttgaacgggaaagctcactggcaatggcctttccggtgtccccaactgccaacgttgtcagtgggtggaccctgacctgccgttttagaaaaaacctgcccaaatatcgatgacatcaaggaagggtggtgaaagcaggcgttcggaggggccccctcaaagggcatccctgggttacaactgagccaccaggtggtcctcctctgacttcaacagcgacaccccactccttccacccttttgacgctggggcttggcattgcccctcaacgaccactttgtcaagcttcatttcctggtatgacaacgaatttggctacagcaacagggtggtggacctcattggcccacatggcctccaaggaagtaagaccccttggaccaccgagccccaagcaagaagcaaaaaaggaaaagagagaccctcactgctggggagtccctgccacactcagacccccaccacactgaatctcccctcctcacagttgccatgtagaccccttgaagaggggaggggcctatgggagccgcaccttgtcatgtatccatctaataaagtatccctgtgctcaaccaaaaaaaaaaaaaaaaaaaaaaaaccc

SEQ ID NO: 132974 - DNA, 364 bp, Homo sapiens
ggtccaccgtgatcaacatccacagcgagacctccgtgcccgaccatgtcgtctggtccctgttcaacaccctcttcttgaactggtgctgtctgggcttcatagcattcgcctactccgtgaagtctagggacaggaagatggttggcgacgtgaccggggcccaggcctatgcctccaccgccaagtgcctgaacatctgggccctgattctgggcatcctcatgaccattggattcatcctgttactggtattcggctctgtgacagtctaccatattatgttacagataatacaggaaaaacggggttactagtagccgcccatagcctgcaacctttgcactccactgtgcaatgctgg

SEQ ID NO: 132975 - DNA, 696 bp, Homo sapiens
gggggggaaagggagggctcactgagaaccatcccagtaacccgaccgccgctggtcttcgctcggacaccatgaatcacactgtccaaaccattcttctctcctgtcaacagtggccagcccccccaactatgaggatgctcaaggtaggtagtcacgtaggtggctgtgctgggggcgccccacaaccctggctcccccgacgtccaccgtgaatccacatccgtcagtcgagacctccgtggcccgaccatgtcgtctggtcccgtgttcaacaccctcttcaatgaacccctgcatgccgtgggcttcatagcattcgcctactccgtgaagtctaggggacagggaagatggttgggcgacgttgaccggggcccaaggcctaatgcctccacccgccaaagtgcctgaaacaatctggggccctgatttctggggcatcctcaatgaccatttttgttcatcgtcatccccagtggctgatctttccaggcctatggaatagatcaaggaaggcatcactggaggccaggagctctgcccattgaacctgtatcccacggttacttccaactttccattcctcggcctgccccccggagcccgaagtcctgtatcagcccttatatcctcacacgcttttctacaatggcattcaataaaagtgcacgtgtttctggtaaaaaaaaaaaa

SEQ ID NO: 132976 - DNA, 1016 bp, Homo sapiens
gagactcccaacacaggggaagtctccaggacctccacaccattaacaagatgagccttgtgctcccttgggctctagagaggaagcccctctgagccctcagcccctctttcctccctctcctaaagtaatttgatcctcaggaatttgttctgccctcatctggccctggccagctctgcatttgacaaatgccaggaagaggaaactgttgagaaaacggaactactggcggaaaggcgagggctcactgagaaccatcccggtaacccgatcaccgctggtcaccatgaaccacattgtgcaaaccttctctcctgtcaacagcggcccaggcttcccaactacgagatgctcaaggaggagcaggaagtggctatgctgggggcgccccaaaaaccgtgcttacccgaatgtccacctgtgatccactatccgcaggcgagacctccgtggcctgaccatgttcgtctgggtccctgtttcaacaaccctcttcaatgaacaacctgctgccctgggctttcattaggcatttcggcttacttccgtggaagttttagggggacagggaagatggtttggcgacgttgaaccggggccccaaggcctaatgcctcccaccgcccaagtggccccctgaacatctggggcccctgattttttgggcagtcttcatgaaccaattcttgctcatcaatcatccccccccaagtgttgggtcgtcccaggcccagcgatagatcaggaaggcatcattgaggcccaggagcttctgcccgtgacctgtaatcccacgtactctaatcttccattccttcgcccttgcccccagaggccagggagctcttgccctttgacctgtattccacttactccaccttccattcctcgccctgtccccacagccgagtcctgcatcagccctttatcctcacacgcttttctacaatggcattcaataaagtgtatatgtttctggtaaaaaaaaaaaaaaaaaaaaaaaaaaaagtttt

SEQ ID NO: 132977 - DNA, 1462 bp, Homo sapiens
  misc_feature (1)...(1462): n = a,t,c or g
cccatcgaccgcctgcaggaattcggcacgaggcctgttcgacagtcagccgcatgcttcgttttgcgtcgccagccgagcgcacatcgctcagacattcatggggaaggttaagtgtcggagtcaacggatttggtcagtattgggcgcctggtcaccagggcatgcttttaactctggtaaagtggatattgttgccatcaatgaccccttcattgacctcaactacatggtttacatgtttccaatatgattccacccatggcaaattccatggcaccgtcaaggctgagaacgggaagcttgtcatcaatggaaatcccatcaccatcttccaggagccgagatccctccaaaatcaagtggggcgatgctgggcgctgaagtacgtcgtggagtcccactgggcgtcttcaccaccatggagaaaggctgggggctcattttgcagggggggagccaaaagggtcattcatctcttgccccctcttgcttgatgccccccatgtttcgtcatgggtgtgaacccatgaaaaagatgacaacagccctcaagatcatcagcaatggcctcctgcaccaccaacttgcttagcacccctggcttctactggcgctgccaagggctgtgggcaaggtcatcctgaagcttgaaccgggaaagcttcactgggcatggcccttccggtgtcccccactgnccaacgtggtcagtgggtggaccctggccctgcccgtcttagaaaaaccctgccaaaatatgatgaccatcaagaaaggtggtgaagccaggcgttcggagggcccccttcaagggcattcctggggctaccacttgagccaccagggtggtcttccttcttgactttcaaccagcggacaccccaactccttccaccttttgacggcttgggggcatggcaatttgcccttcaaacgacccacttttttcaagcttcattttccttggtatgaccaacggaatttgggctacagcaaacaagggtggtggaccttcatgggcccacattgggctttccaagggagttaaggacccttgggaccaccaggccccagcaagaagcacaagagggaaggagagagaccctcacttgctgggggagttcctgccacactcagtcccccaccacactgaaatctcccctcctcacagtttgccatgtagacccctgaaagaggggaaggggctagggaaacagcaccttgtcaatgtaccaatcaataaatgtaccctgtgctcacccaccaagagaaaaaacctagacaaaaatgaaagccaaaaggggggggcccttttaaaagaacccttggggggcccaaacttaacccggccttccaacggaaaagttttttccttatagggggccgaataaaaacctacctgggaatttttggaaaggacccttactttgggggggggacaaaatgggccaaccaacct

SEQ ID NO: 132978 - DNA, 399 bp, Homo sapiens; identical to SEQ ID NO: 114110

SEQ ID NO: 132979 - DNA, 304 bp, Homo sapiens
atgaagccgcggaccctcgcggtgagtgttacagctcttaaggtggcgcgtctggagttgtttgttccatcccggtgggctcgtggtcttgctgggctcaggagtgaagctgcagatcttcgcgcccttgggtggtcgatgggactgggcgccgtggagcagggggtggtgctcgtcggggaggctcgggccgcacaggagcccatggagtgggtgggaggctcaggcatggcgggctgcaggtccccagccctgccccgcgggaaggcagctaaggcccggcgagaaatcgagctcagcgccg

SEQ ID NO: 132980 - DNA, 369 bp, Homo sapiens
ctcctggtgagaggtgacagcgtgctggcagtcctcacagcccccgctccctctcggagcctcttctgcctgggctcccactttggcggcacttgaggagcccttcagtccaccactgcactgtgggagcccctttctgggctggccaaggccggagcccactccctcagcggcgctgcgctctatttctcgccgggccttagctgccttcccgcggggcagggcttgggatctgcaggccgccatgcctgagcctcccaccccctccgtgggctcctttgctgcccgagcctcctcgacgagcgccaccccctgctccacggcgcccagtcccatcgaccacccaagggctgaggagtgcaggcgcat

SEQ ID NO: 132981 - DNA, 375 bp, Homo sapiens
tgcaagctccgcctcctggtgaggggtgacagcgtgctggcagtcctcacagccctggctcgctctcggcgcctcctctgcctgggctcccactttggcggcacttgaggagcccttcagcccaccgctgcactgtgggagcccctttctgggctggccaaggccggagcccactccctcagccgctccatgggctcctgtgcggcctgagcctccccgacgagtgccaccccctgctccagggcacccagtcccatctaccacccaagggctgaggagtgcgagcacacggcgggggactgggggactagcaggcagctccacctgcagccccggtgcgggatccactgggtgaagccagctgggctcctgagt

SEQ ID NO: 132982 - DNA, 373 bp, Homo sapiens
cggctgctccgagtgcggggcccgccaagcccacgcccacccggaactccagctggccggcaagcgcggcacacagccccggttcccgctcgcgcctctccctccacacctccccgcaagctgaaggagagggctccggccttggccagcccagaaaggggctcccacagtgcagcggagggctgaagggctcctcaagtgccgccaaagtaggagcccaggcagaggaggcggggagagcaagcgagggctgtgaggactgccagcacgctgtcacctctcggttttactttattttaggataaaatatctattgtgaattttaaaaacatgtaaaataaaattttaattaaaaagcctaaaaaaaaaaaaa

SEQ ID NO: 132983 - DNA, 1387 bp, Homo sapiens
gatcacaactccctcaccagcaacagaacaaaactggatggagaatgagtttgacgagctgacagaagtaggcttcagaagatgggtaataaactctgagctacaggaggacattcaaaccaaaggcaaagaagttgaaaactttgaaaaaaatttagaagaatgtataactagaataaccaatacagagaagtgcttaaaggagctgatggagctgaaaaccaaggctcgagaactacgtgaagaatgcagaagcctcaggagccgatgcgatcaactggaagaaagggtatcagtgatggaagatgaaatgaatgaaatgaagcatgaagagaagtttagagaaaaaagaataaaaagaaatgaacaaagcctccaagaaatatgggactatgtgaaaagacaaaatctacgtctaattggtgtacctgaaagtgacggggagaatggaaccaagttggaaaacactctgcaggatattatccaggagaacttccccaatctagcaaggcaggccaacattcaaattcaggaaatacagagaacaccacaaagataccccttgagaagagcaactccaagacacataattgtcagattcaccaaaattgaaatgaagaaaaaaatgttaagggcagccagagagaaagcctccccgacgagcgccaccccctgctccacggcgcccagtcccatcgaccgggaaggaacaaacaacccaagggctgaggagtgcgggcgcacggcaccgggactggcaggcagctccatctatctgcagccccggtgcgggacccactaggtgaagccagctgggctcctgagtctggtggggacgtggagagtctttatatctaagctcagggattgtaaatataccaatcagcaccctgtgtttagctcaaggtttctcaaggtttgtgagtgcaccagtcaacactctgtatctagctgctctggtgagggcgtggagagtctttatgtctagctcaaggattgtaaatacaccaatcagcactctgtgtctagctcaaggattgtaaatacaccaatcggcactctgtatctagctcaaggtttgtaaacacaccaatcagcaccctgtgtttagctcaaggtttgtgagtgcaccagtcgacactctgtatctagctgccctgatggggacgtggagaacctttgtatctagctcagggattgtaaacgcaccaatcagcgccctgacgaaacaggccactcggctctaccaatcagcaggatgtaggtggggccagataagagaataaaagcgggctgcccgagccagcattggcaacccgctcgggtccccttccacactgtggaagctttgttctttcgctctttgcaataaatcttgctactgctc

SEQ ID NO: 132984 - DNA, 2439 bp, Homo sapiens
gcagagtcggccgtgtggaagaccggagttttattattattcaaatcagtctctctgaaaactcagggattgaggtttttaaggataacttggtgagtagagggccagtaagtcgggagtgctgattgttcgggtccaagataaaatcttagggagctgaagctgtcctcttgagctgagtccattcctgggtgggggccacaagaccagatgggccaatttatctatttgggtggtgccagctgatccactgaatacagggtctgtaaaagatgttaagcactcatcttaggttatcacaggagcaatttaaggaggttcagaatcccgccacctccagctgcattactcctacaccataatttctaatctcatggcaaatttgttagtcctacaaaggcagtctgatcctcaggcaggcagggactttgttttggaaaagagttgttattgtctttgtttcaaagttaaaccattgtgaaccccaaatatctgagacaggtctcagtcgatttaggaagtttattttgccaaagttaaggatgtgtgcccgtgacacagcctcaggaagtcctgacgacatgtgcccaaggtggtcgggcacagcttggttttatacattttagggagacatgggacatcaatcagtatatgtaaggtatacattggttccatccagaaaggtgggacaactcgaagcagggaggggacttctgggtcataggtagataagaggcaaacggttgcattcttttgagtttctgattggcctttccaaaggaggcaggcagagacgcatctatctcagtgagcagaggtggctttgagttctgtcatttgtccacaaggaatttccttgtgagggaggtatgtagctttttaatcgtagtagctatcttttttaggaatagaatgggaggcaggtttgccctaagcagttcccagcttgactttctgctttggcttagtgattttggggccccaagatttattttcctttcacactgtaaactaagttcctcccaaagtaggttgagcctacgcccggggatgaacaaggacagcttggagattagaagcaagatggagtcggttaggttagttgtcctttcacggtcataattttctgttataatttttgcagaggcggtttcagcaccacggcggtcatggccagagcaaaaagtatgtttttgatgttgaaaggaaaggctggacctgactttggtatcagatttactgccagttccgggtggtttacatgatttgaggatcgttatgcattacataatgttaacatgaatgctgagtctgtgggtgctgatgtgaaggcagctgaagagttttggaagcttgattatggaggagatttacttgcccacgcaattcttcaatatggaggaaccctcgctattctggaaacagatgcctgaaagaacttttgtaatctgccccaaggggtttttccctgaccactgcaacaaagaaagaccatggcatttttgtaagagaaagagtttaacagacacaagggtggccacgccatgtgggagactgagttgagaggtgacagcgtgcttgctggcagtcctcacagccctcgctcgctctcagtgcctcctctgcctgggctcccactttggtggcatttgaggagcccttcagcctcccccctgcactgtgggagcccctttctgggctggccaaggctggagcccactcccttagcttgcagggaggtgtggagggagagacgcgagcgggaaccggggctgtgtgccgtgcttgtgagccagctggagttccgggtgggcgtgggcttggtgggccccacactcggagcacgccagccagccctgctggccccaggcaatgggggacttagcacccgggccagtggctgcggagggtgtactgagtcccccagcagtgctggcccaccggcgctgcgctcgatttcttgccagggccttagctgccttcccacggggcagggctcgggacctgcagcccgccatgcctgagcctcccacccactccaagggctcctgtgcggcccgagcctcctcgacgagcaccaccccctgctccacggcgcccagtcccattcgaccacccaagggctgaggaatgcaagcgcatggcacaagactggcaggcagctccacctgcagccccagtgcaggatccactaggtgaagccagctgggctcctgagttctttgggtccacgctgcttttatgagctgtaatactcactgcgaagatctgcagcttcactcctgagcccagcaagaccacgagcccaccgggaggaacaaacaactccagacgtgctaccttaagagctgtaacactcaccgtgaaggtctgcagcttcactccgtgagggtctgcggcttcattcttgaagtcagtgagaccaagaacccaccaatt

SEQ ID NO: 132985 - DNA, 425 bp, Homo sapiens
gagaacgcagcaagcccaggcggcggtggtaaggctggaggacacacctaaacatgtggaatcccaatgccgtgatagtagacaagaagatgcagaagaaaatgaagaaagctcataaaaagatgcacaagcaccaaaagcaccacaagtaccacaagcatggcaagcattcctcctcttcctcctcctcttccagcagtgattctgactgaatacaggccctggacccttccctcaagtctcaccagttctgctctcccatcaagcttcagatgccatgttgtactgggggaatgtagcccttgtgctccccaccccctacctccacctgagcctcaccctgctgttgagccctgagtggctaggggaaatgggaagaggattgccatggcctggccatcttgttgctgcttggttagatcatt

SEQ ID NO: 132986 - DNA, 627 bp, Homo sapiens
atggatattaatatcattgagacagatgcagaaaaatcatttgataaagttaaacatctatttatgattaaacaattaaaagtagaaggaaacttctttaatacaataatgtatactttcaaaaatgctacggtccccacaggagttagcaagacttcctggaggacagaggcaactgaccaggtggtaacaaaggtggccactctggaccattgctttggtgttggtgctttggagagtcaagtctggaccctagtcctgaagagttccatcaccatcaccactgtggagccttgggtcaccctcaatatggcaggagctccccatggcaatccagctttccccccaggtgggccccctcatcctgtgccacagccagggtatccaggatgccaaccgttgggtccctaccctcctccatacccaccgcctgcccctggaatccctcctgtgaatcccttggctcctggcatggttggaccagcagtgatagtggacaagaagatgcagaagaaaatgaagaaagctcataaaaagatgcacaagcaccaaaagcaccacaagtaccacaagcatgacaagcattcctcctcttcctcctcctcttccagcagtgattctgactga

SEQ ID NO: 132987 - DNA, 966 bp, Homo sapiens
ctgcgaaccgctccgaatttcgggtcgacccacgcgtccgggagaacgcagcaagcccaggcggcggctggaaaggtgatggggctggaggacacacctaaacatgtggaatcccaatgccgggcagccagggccaaatccatatccccccaatattgggtgccctggaggttccaatcctgcccacccaccacctattaatccaccctttcccccaggcccctgtcctcctcccccaggagcatccgcatggcaatccagctttccccaccaggagggccccctcatcctgtgccacagccaagggtatccagggatgccaaccgttgggtccctaccctcctccatacccaccgcctgcccctgggaatccctcctgtgaatcccttggctcctggcaatggttgggaccaagcagttgataagtagacaagaagattgcagaagaaaattgaagaaagcttcataaaaaagatgccacaaagcacccaaaagcaccacaagttaccacaagcatggcaagcatttcctcctctttcctcctccttctttccaggcagtgatttctggactggaatacagggccctggacccttccctcaagtctcaccagttctgctctcccatcaagcttcagatgccatgttgtactgggggaatgtagcccttgtgctccccaccccctacctccacctgagcctcaccctgctgttgagccctgaagtggctaaggggaaatggggaagaggattgccatggcctgggcatcttgtttgctgcttggttagatcatatagcttaatgaatttagggcaggggagctattttttgaagatgatgaactaaatgtttgaaggacaagttttgagatctggtaaaatgtgattttttacttccacttataatacttggtgattggggaggtttgtggaaattccattatgatggaaaacctatcctttttgt

SEQ ID NO: 132988 - DNA, 409 bp, Homo sapiens
aacagactcaggttgtgattgatgcaggacactcgccgtctttcccagcctgctcaccaaccccaaaactaacattcagaaggaagctacgtggacaatgtcaaacatcacagccagccgccagaccagatacagcaagttgtgaatcatggattagtcccattccttgtcagcgatctctctaagattttgagacacaaaaggaagctgtatgggccgtggaacagttgaacagattgtgtaccttgttcactgtggcataatagaaccgttgatgaacctcttacctgcaaaagataccaagattattctggttatcctggatgccatttcaaatatctttcaggctgctgagaaactaggtgaaactgagaaacttagtataatgattgaagaatgtggaggcgta

SEQ ID NO: 132989 - DNA, 640 bp, Homo sapiens
  misc_feature (1)...(640): n = a,t,c or g
gaatgtggagccgtagccaaaattgagcctctccaaacccatgaaaatgagtctgtatataagcctccataagcttanctgagaagtatttctctgtagagagatgaagtgtgncagctgcttcaggtatgagtccttggaccacatggcttgggtgaccatctgggccaattccatagctgccagagcagagctgagccacccattgctggagaggacatccacgcaggcctggacgagccggactgccttactaaggatttcctccgtatctgactgcaactcagcactcagctgcatgcgggacaggaagaggaagatcaaaacgttgtgccagaaactacctctgaaggctacactttccaagttcaggatggggctcctgggacctttaacttttagatcatgtagctgaggcataaatttgttgtgtactatgtttggtattttgtcttattgtttctctactaagaactctttcttaaatgtggtttgttattgtagcactttttacactgaaactatacttgaacagttccaactgtacatactgtatgaagcttgtcctctgactaggtttctaatttctatgtggaatttcctatcttgcagcatcctgtaaataaacattcaagtccaa

SEQ ID NO: 132990 - DNA, 865 bp, Homo sapiens
aaagttcttaccatatctactctgagactgactatcacccaattagaaaacaacatcccttcatcctttcttcatcccaaccgggcatcacatagggcaaactggatcaaggcagttcagatgtgtagcaaactcagagaatttgcattggctttagccattttggagtgtgcagttaaaccagttgtgatgctaccaatatggcgagaatctttaggacataccagctttctccctttgtctcataaccatgtccaccaatgagaatgctaatacacaagctgcccatcttcacagatctaagaacaagggaaaggacagtacagaaacgaggcgtcacagaatagaggtcaatgtggagctgaggaaagctaagaaggatgaccagatgctgaagaggagaaatgtaagctcatttcctgatgatgctacttctccgctgcaggaaaactgcaacaaccagacttctgccctaagagccatagggaatatcgtcactggtacagatgaacagactcaggttgtgattgatgcaggagcactcgccgtctttcccagcctgctcaccaaccccaaaactaacattcagaaggaagctacgtggacaatgtcaaacatcacagccagccgccaggaccagatacagcaagttgtgaatcatggattagtcccattccttgtcagcgatctctctaaggctgctgagaaactaggtgaaactgagaaacttagtataatgattgaagaatgtggaggcgtagacaaaattgaagctctacaaaaccatgaaaatgagtctgtatataaggcttcattaagcttaactgagaagtatttctctgtagaggtgagtaatggatggtaa

SEQ ID NO: 132991 - DNA, 2161 bp, Homo sapiens
gggtacggctgcgagaagacgacagaagggggggaaatttaaatcgcgccggccggctgcacgagccacacggtctttgagctgagtcgaggtggacccgtttgaacgcagtcggccctacagccgctgattccccccgcatcgccctccccgtggaaggcccaggcccgctttggagctttctccctttgtctcataaccatgtccaccaacgagaatgctaatacaccagcatgcccagtcgttcacagattcaagaacaagggaaaagacagtacagaaatgaggccgtcgcagaatagaggtcaatgtggagcttgaggaaagctaagaaggatgaccagatgctgaagagggagagattgtaagctcatttcctsgatgatgctacttctccgctgcaggaaaacccgcaacaaccaagggcactgttaaattggtctgttgatgacattgtcaaaaggcataaatagcagcaaatgtggaaaatcagctccaagctactcaagctgccagggaaactactttccagagaaaaacagccccccatagacaacataatccgggctggtttgattccgaaatttgtgtccttcttgggcagaactcgattgtagtccccattcagtttgaatctgcttgggcactcactaacattgcttctggggacatcaggacaaaccaaggctgtggtagatggaggtgccatcccagcattcattttctctggttgggcatcttcccatgctcacatcagtgaacaagctgtctgggctctaggaaacattgcaggtgatggctcagtgttccgagacttggttattaagtacggtgcagttgacccacatgttggctctccttgcaagttcctgataatgtcaatctttagcatgtggctacttacggtaatcttaccctggacactttctaatctttgcccgcaacaagaatcctgcaccccccgatagatgctgttgagcagattcttcctacctttagttcggctcctgcatcatgatgatccaggaagtgttaggcaggataccctgctggggctattttcctaccttacttgatgggtccaaatggaacggaattgggcatgggtgggttgaaaacagggagttgtgccccaacttgtgaagcttctaggagcttctgaaattgccaattgtgactcctgcccctaaagagcccataggggaataattggcacctgggtacagatgaacagactcaggttgtggatttgatgcaggagcactcgccgttctttcccagcctgctcaccaaccccaaaactaacattcagaaaggaagctacgtggacaatgtcaaacatcacagccggccgccagggaccagatacagcaagtttgtgaaatcatggattagtcccctttcctttgtcagtgtttctctctaaggcagattttaagacacaaaaggaagcctgtgtgggccgtgaccaactataccagtggtggaaccagttgaacagaattggtgtaccttgttccactgtggccataatagaaccgttgatgaacctcttttactgcaaaaggttacccaggattatcctgctaatcctggatgccaatttcaaaatatctttccagcctgctgagaacctagttgcaccttgagaaacctagtatcaatcttgaagtaatgtggaggccttaggccaaaattgaaggctctaccaaaacccatgaaaatggagtctgtgtataaggcctccgttaaagcttaattcgagaagtatttcccctgtagagggaaagagggaaggatcaaaacggtggtacccagaaactaccctctgaaggctacactttcccaagttccaggatggggccccctgggaccttttaactttttagatcaagtagcttaagacataaatttgttgtgttactacggtttggtattttgtcttattgtttctctactaagaactcttttcttaaatgtggtttgttactgtagcactttttacactggaactatacttgaacagttccaactggacatacatactgtatgaacgcttgtcctctgactagggtttctaatttctatgtggaatttcctatcttgcagcatcctgtaaataaacatctcaagtccacccttttcttgacttcaaaaaaaa

SEQ ID NO: 132992 - DNA, 427 bp, Homo sapiens
gaaggtgaccaacgtcaaggatggcaccacccaccgagacctccttggagctcttcatgtacctgaacgaagtcgcgggcaagcatggcgtgggccgtattgacatcgtggagaaccgcttcattggaatgaagtcccgagcatgaacgtgcagggtgattatgagccaactgatgccaccgggttcatcaacatcaattccctcaggctgaaggaatatcatcgtttccagagcaaggtcactgtcaaatagacccgtgtacaatgaggagctggagcctcctcaagttgcagatccctcattaactggcgctgatatgagtggatgttaggagtgatcgttgggttattaagggtatacttgcgatttgatataaattttgagtaattgatttattggcgtctgtttactaaaagttgttgaatg

SEQ ID NO: 132993 - DNA, 891 bp, Homo sapiens
atgcccagtgaaaaacgtgttcttgcagcagctcttgtggaagttgtccttgaaaaaactttggcccaagtggttcactgcactgttaagacagattccagatgccgggaactcgtgcctccaattccagatgctatgtccagcaaaggctctgtggttctggcctacagtggcggcctggacacctcctgcatcctcgtgttactgaaggaacaaggctatgacatcattgcctacgtggccaacactggccagaaggaagactttgaggaagccaggaagaaggcactgaagcttgggggcaaaaaggtgttcattgaggaagtcagcaaggagtttgtgaaggagttcatctggctggccatccagtccagcgcactgtatgaggaccactacctcctgggcacctctctcaccaggccctgcatcgcccgaaaacaagtggaaatcgcccagcaggagagggccaagatgcccaagttctacaacaggttcaaggtccgaaatgaccttatggaacacacaaagcaacacgggattcccatcccagtcactcccaagaacctgtggaacatggacgagaacctcatgcagatcagcaatgaggctggaatcttggagaaccctaagaaccaagcatttccaggagtccccatgaaagtgaccaacgtcaaggatggcaccacccaccagacctccttggagctcttcctgtacctgaacgaagacgtgggcaagtacagcttgggccgtattgacatcaaggagaaccacttcactggaatgaagtccccaggtatctatgagaccccagcagacaccatcgtttaccatgctcatttagacatcagggccttcaccatggaccgggaagtatgcaaaatcaaataa

SEQ ID NO: 132994 - DNA, 1158 bp, Homo sapiens
atgtccagcaaaggctccatggttctggcctacagtggtggcctgaacacctcctgcatcctcgtgtggctgaaggaacaaggctatgatgtcactgcctacctggccaatactggccagaaggaagacttcgaggaagccaggaagaaggcactgaagcttggagccaaaaaggtgttcattgaggatgtcagcagggagtttgtggaggagttcatctgggcggccatccagtccagcgcactgtatgaggaccactacctcctgggtacttctctcaccaggccctgcatcgcccacaaaaaagtggaaaccgtccagcgggtgggggccaagtatgaaggtccctggagggctccctggaggatgcccgagttctacaactggttcaagggccgcagtgacctgatggaatatgcaaagcaacacgggattcccatcctggtcactcccaagaacctgtggagcatcgacaagaacctcatgcacatcagctacaaggctggaatcctggagaaccccaagaaccaagtgcctccaggtctctacacaaagatccaggacccagccaaagcccccaacacccctgacattctcaagatccaattcaaaaaaggggtccccgtgagggtgaccagcgtcaaggatggcaccacccaccagacctccttggagctcttcatgtacctgaacgaagttgcaggcaagcacggtgtgggcttattgccatcgtggagaacatcttcaccagacaaaggcccaagccctgagtgtgaatttgtccgcccctgcatcgccaagtcccaggagccggcagaagggaaagtgcaggtgccggtcctcaagggccaggtgtacatccttggctgggagtccccactgtctctctacaatgaggagctgatgagcgtgaacgtgcagggtgattatgagccgattgatgacaccgggttcatcaacatcaactccctcagactgaaggaataccattgtctccagagtctgctggagtttgctggatgtcgactccagacactgtttgcctgggtatcaccagcaggggctgcagaacagcaaagattgctgcctgttccttcctctggaaacttcatcccagaggggcacctgccagatgccagctggagctctcctgtatga

SEQ ID NO: 132995 - DNA, 996 bp, Homo sapiens
atgtccagcaaaggctccgtggttctggcctacagtggcggcctggacacctcgtgcatcctcgtgtggctgaaggaacaaggctatgacgtcattgcctatctgggccaggcggtgaagggcaatcagctgttgcccgtctcactggtgaaaagaaaaaccacccctggcgcccaatacgcaaaccgcctctccccgcgcgttggccgattcattaatgcagctggcacgacaggtttcccgactggaaagcgggcagggaacgatcaggtccggtttgagctcagctgctactcactggccccccagataaaggaaatgggctctctgaaggtacgcaatgagcccaagaagttagcactgtgccaatgccagcaagcacccaactcccagcagatacccagtgcaagcttgctgaaccagtgctccggtgaagaaatgaacacttggactttcaaagacatgacagacccaagtcatgagctctcagtcagcggacagtatgccaagagcctggtacaggaattgactgtttaccaaccccacagtcagaaggctcggaaactccccagtgacggggagctcactacctcgcctgcccgggctggtatctacgagaccccagcaggcaccatcctttaccatgctcatttagacatcgaggccttcaccatggaccgggaagtgcgcaaaatcaaacaaggcctgggcttgaaatttgctgagctggtgtataccggtgcggaatgcaagctcctagtggcttcagtgcctgagccctggaggggccgtggaggtgtagaggagggaggaagggacatcaaggaggtacaggagcatgggagtgactctgcagagagttccacgcacccaccggcttcaaggcctggtgaaggttgcctcgcctgcatcttctgtggcaaatggagacacctcaacaccccactgagctgtgaacgttacccccgacatagccgggaccaccgtccacactga

SEQ ID NO: 132996 - DNA, 1087 bp, Homo sapiens
cccagtgtaagttatcaggctaattcttgcatatagcagtaaacacatggagtttacagtgtaatgaaaaaggcaagcattaaacaggtgaattaaacagtgatgagtgctatgaaaaaaaggtgaatgtgttataggaatatggagtggaagatctaggttcatcaggcagaggagaaatcagggaaggcttccttgaggaagtgacaaccaagctgagacctgctctgtcgcctgccaccgctgctcgggcccgagtggttcactgcaccgtgaagacagattcctgacaccgggaactcacgcctccaatcccagacgctatgtccagcaaaggctccttggttctggcctacagtggtggcctgaacacctcctgcatcctcgtgtggctgaaggaacaaggctatgatgtcactgcctacctggccaatactggccagaaggaagacttcgaggaagccaggaagaaggcactgaagcttggagccaaaaaggtgttcattgaggatgtcagcagggagtttgtggaggagttcatctgggcggccatccagtccagcgcactgtatgaggaccactacctcctgggtacttctctcaccaggccctgcatcgcccacaaaaaagtggaaaccgtccagcgggtgggggccaagtatgaaggtccctggagggctccctggaggatgcccgagttctacaactggttcaagggccgcagtgacctgatggaatatgcaaagcaacacgggattcccatcctggtcactcccaagaacctgtggagcatcgacaagaacctcatgcacatcagctacaaggctggaatcctggagaaccccaagaaccaagtgcctccaggtctctacacaaagatccaggacccagccaaagcccccaacacccctgacattctcaagatccaattcaaaaaaggggtccccgtgagggtgaccagcgtcaaggatggcaccacccaccagacctccttggagctcttcatgtacctgaacgaagttgcaggcaagcacggtgtgggcttattgccatcgtggagaacatcttcaccagacaaaggcccaag

SEQ ID NO: 132997 - DNA, 2775 bp, Homo sapiens
  misc_feature (1)...(2775): n = a,t,c or g
cgagcccgagtggttcactgcactgtgaaaacagattccagacgccgggaactcacgcctccaatcccagacgctattgtccagcaaaggctccgtggttctggcctacatgtggcggcctggacacctcgtgcatcctcgtgtggctgaaggaacaaggctatgacgtcattgcctatctggccaacattggccagaaggaagacttcgaggaagccaggaagaaggcactgaagcttggggccaaaaaggtgttcattgaggatgtcagcagggagtttgtggagggagttcatctgggccggccatccaagtccaagcgcacttgtattgaggaccgctacctccctgggcacctctctttgccagggccctgcattcgcccgcaaacaagtgggaaattcgcccagcggaaggggggccaagtatgttgttcccacgggcgccacagggaaaggggaacgaacaagtcctggtttgagctcagcttgctactcacttggccccccagataaaggtcattgctcccttggaggaatgcctgaattctacaaccgggttcaagggccgcaatgacctgattggagtacggcaaagcaacattgggattcccaatcccggtcactcccaagaaccccgtggagcatggatgagaacctcatgcacattcagctacgaggctggaatcctggagaaccccaagaaccaagcgcctccaggtctctacacgaagaacccagggacccagccaaaagcccccaacaccccttgacattctcggagattcgagtttcaaaaaaggggtccctgtggaaggtggaccaacgttcaaggatgggcaccacccaccagacctttcttggagctctttcatgtacctgaacgaagtcgcggggcaagcatgggcgtagggccgtatttgacatcgtgggagaaccgctttcattgggaattgaagtcccagaggtatcttacggaggaccccaggcagggcaccattccttttaccatgctcatttagacatccgaggcctttcaccatgggaccggggaagttgcggcaaaatcaaacaagggcctggggcttggaaatttgctgagctcggtgtataccggttttcctgcacaagcccctgagtggtgaattttgtccgcccactggaatcgccaaagtccccaggaagccgagtggaaagggaaaagtgcaggttgtccgttccttcaaagggccccaggtgtacatccctcgggccgggaaatcccccactgtcttcttcttacaatgagggagctggtgaagcatggaacgtgcaagggtgattattggaggccaattgatggccaccggggttcatccaaacatcaaattcccttcaaggctgaagggaattatcatcgtcttcccagagcaaaggtcacctgccaaatagaccccgtgtacaatgaggagctggggcctcctcaattttcaggatccccccaagtaacaggcgctaattgttgtgataatttgtaattgttgacttgttctccccgggctgggcagcgtagtggcggctgcccaggcccaagcgtttgttccctgggtccccctgaagccttgcaaacgttggtcatcgaagggaaagggttggggggcagctgcaggtggggagctataaaaatgacaattaaaaggagacactagtcttttatttctannnnnnnnnnnnnnnnnnnnnnnnnnnnnnnnnnnnnnttaattatgggtttcttaggccaacctttgtgttttcggacctaagtgctgccgaaggccgccatttgccagacagcctgttaatccggctgtcgacccctctccagcaaaaactaggaatccagatgtgccgcctgggtccgatcctatccagcatcctgggaatctgtcaccaactgtggtcctgtggcaaatgtcaagaaaccaaataaaattcagggaatgccctttgggggcatcaacgcacagccctttctctggacatcacttttactcacagcccacagggagcttctatagagggtggccatgagtgaccctaggacacttaccacagctgcatggcctaaagccagcctaaatcatgaaggaggagggagaggcctgagcagagaggagaaaagagcaagcccggaacttggcagcatttctcattgtccacaaaccaggccctaaagcagccatgtttgtagtgtggccctggcccccccttggtcatatctgattggaccggggatggacacctgactcgagctggccaatcaaaacccgcaggaattgggcctcggcacgtggccgaagtgaggacatgtaacacaggcactcaccgctgggatgctgtggacctggggcacagagcaggtgtagaaggaaaggagagggaagagatgggaagagagggtcatggtattggcgtccatatttctgtactggtgcttcatgaaagctggtggcatctcttggcctggtttccctgacacctgaatatcataacgaattcaggactccagctcagtgagagagtttctgctccttgcaaccaaaagcatcttcactgggaagacttgagtgccgcttgctctgtgctttgccctggttctgaactcagaacctgacctcatgggatccgttcgccactccgctgcatgtgtacatgagggtttctcgcaaaagaagttttacctttaaaacttattttcctatgattattaatgtaagtggtaataataaatgactcaatattaaaaaaaaaaaaa

SEQ ID NO: 132998 - DNA, 1354 bp, Homo sapiens
gggcgggcccgcacccctgcgaacatggcgctgcgagtggtgcggagcgtgcgggccctgctctgcagcctgcgcgcgctctgggcacccgccgtgccctgcctgccaaggccctggcagctgggggcgggcgccatctggacgctgctcacaggacccgttctgctctgggtgtgtaaattcacagagaagcatgaatggataacaacagaaaatggtattggaacagtgggaatcaataattttgcaaacgaagctttgggagatgttgtttactgtagtctgtctgaagttgggaccaaaatttgaaccaaaccaagctggagtttggtgcttttggaaaggtgtgaaagctgctagtgaactccttttctcctttatcgggggaggtacctgattttaatgaagctcttgccgaaaaatccagggccttgtaaccaaatctcgttatgaagatggtttggctgatcaagatggacactgagtaaccccttcagaacctagatgcaccttatgagtgaagaagcatatgagaaatacataaaaatctattgaggagtgaaaatggaactcctaaataaactagtatgaaataacgccagcccagcagagttgtcttaaattagtggtgggataggaagacttaggaataggaaacttttagtattacccgatggggggaaaaaaaaactaactgttaacactggctaatgaaagaaaaatgccctttaactttgctaatgaattatagataaatataaataggcgtctttttcacaaataatcctatgatttttagactaaggctctagtattcatgaaattatccatgaaattatccatgggtaaaaacctaagttataaaaattacataatttcaaaggataatgttggttattccttaagcccttatataaatattggtaacttggcatggtatccatacctgggatttggggatgaaatacttaaggatcttttccattggaaataactgggagtgaagaagtttttgttgcttgagcagtgtcagatgaggaacccactgtcttagttttgcggtacactggcattggctggtgctattgttagtacagggaagcaacagctttgcagcaaaataataaaatacttcttcgttaatcatgtttgttttgatgttaatatttcatttagtaactctgctagtatttgtgaaagtgctaactttaacttacggaaagttactttttaaaaggaaatttaagccagaacaatgcaaagctccaagaaaatgttttctttagtcacaaatctggtttttcttaagccaagatctgtcaccttttaacataataaaaaataaatcaccaac

SEQ ID NO: 132999 - DNA, 352 bp, Homo sapiens
ggcacgagagagataaggcgcttcaggactaccgcaagaagttgcttgaacacaaggagatcgacggccgtcttaaggagtgtgagtgcacctttctttccatttaatcaagtgcctcgactcgcttctgcctctgacaaagcagaagcctttcgccgagcccggcaaccgagccttagagatgaccaggcctagggccagggacaaggcgctttgtcatccggccctgagcttgtggagcaacactccttcgggtgtagaaatggcccagtccagcccgggtgacagaacatcggcggccttgaggtgaaaatgaaaaagaagtagaggaggagtggggaagtgggccgag

SEQ ID NO: 133000 - DNA, 847 bp, Homo sapiens
atggccattcccggcatcccctatgagagacggcttctcatcatggcggaccctagagataaggcgcttcaggactaccgcaagaagttgcttgaacacaaggagatcgacggccgtcttaaggagttaagggaacaattaaaagaacttaccaagcagtatgaaaagtctgaaaatgatctgaaggccctacagagtgttgggcagatcgtgggtgaagtgcttaaacagttaactgaagaaaaattcattgttaaagctaccaatgggaccaagatatgttgtgggttgtcgtcgacaggtgatagaattacctcttacaaacccagagttatttcagcgtgtaggaataatacctccaaaaggctgtttgttatatggaccaccaggtacgggaaaaacactcttggcacgagccgttgctagccagctggactgcaatttcttaaaggttgtatctagttctattgtagacaagtacattggtgaaagtgctcgtttgatcagagaaatgtttaattatgctagagatcatcaaccatgcatcatttttatggatgaaatagatgctattgatattgatttgccaaatgaacaagcaagattagacatactgaaaatccatgcaggtcccattacaaagcatggtgaaatagattatgaagcaattgtgaagctttcggatggctttaatggagcagatctgagaaatgtttgtactgaagcaggtatgttcgcaattcgtgctgatcatgattttgtagtacaggaagacttcatgaaagcagtcagaaaagtggctgattctaagaagctggagtctaaattggactacaaacctgtgtaa

SEQ ID NO: 133001 - DNA, 1723 bp, Homo sapiens
ggcttctcatcatggcggaccctagagataaggcgcttcaggactaccgcaagaagttgctagaacacaaggagatcgacggccgtattaaggagttaagggaacaattaaaagaacttaccaagcagtatgaaaagtctgaaaatgatctgaaggccctacagagtgttcgggcagatcagtgggtgaagtgcttaaacagttaacctgaagaaaaattcattgttaaagctaccaatggaccaagatatgttgtgggttgtccgtcgacagctttgacaaaaagtaagcctgaagccagggaacaagagttgctttgggatatgactacactaactattcatggaggatattttgccgaggagaggtggatccactggtttataacatgtcttcatgaggaccctggggaatgtttcttattctgagattggagggctatccagaacagatccggggaatttaaggagaggtgataggattacctctttacaaaccccagagttattttcagcgtgtaggaataatacctcccaaaaggctgtttgttatatgggaccaccaggtaccgggaaaaacactccttggcacgagccgttgctagccagctggactgcaatttcttaaaggttgtatctagttctattgtagacaagtacattggtgaaagtgctcgtttgatcagagaaatgtttaattatgctagagatcatcaaccatgcatcatttttatgggatgaaatagatgctattggtggttcgtcggttttctgagggtacttcagctgacagagagattcagagaacgttaatggagttactgaatcaaatggatggatttgatactctgcatagagttaaaatgatcatggctacaaacagaccagatacactgggtccctgctttgctgcgtccaggaagattagatagaaaaatacatattgatttgccaaatgaacaagcaagattagacatactcgaaaatccatgcaggtcccattacaaaggcatggtgaaatagattttgaaagcaattgttgaagctttcggatgggctttaatggagcagatctgaagaaatgtttgtacttgaagccaggcatgctcgccaattcgtgctgatccatgattttgttagtacagggaagacttcattgaaagccagtcagaaaagtggcctgattcctaagaaagcctggagtcctaaaattgggactaccaaaccctgtgtgaatttacctgttaagatttttgaatggcctgccatgaccagatgttggccttattggtaaaaataaagtttaaagaaaataatggtatgtaattggtaatgatggtcattaaaaagtatatgaataaaaaatatgagtaacatccataaaaattagtaattccaacttttaaggataccagaagaaatttgtatgtttgttaaagttgccatttattgccagccaagttacaaaggggaaagtggttggagccttttccataattgcctgccgtgaccattttttggtaaaaataattggaaagtggtttgagatagtggtataagaaagcatttcttatgacttattttgtatccatttgttttcctccatctaaaaagttgaataaaatctgtttgattcagttctcctacatatatattcttgtcttttctgagtatatttactgtggtcctttaggttctttagcaagtaaactatttgataaccc

SEQ ID NO: 133002 - DNA, 425 bp, Homo sapiens
gtgaacatgcgtgatcggtttgggcagatcatgattgaaaacctgcggagacgccagtgtgaactggcgggagtggagacctgcaagtcattagagtcacaggatagaatcacttgaattcctggatgaaatgtgactctggagcagctcatgcgcattactgcctttgctgggcaaccaaaggaggaaatgagcttgggctgaaggagataacttattaatctgtcgaatgcttatgccgagccagaagccgaagccacttgccctcctggaggagacctgcaagctccctgagcggtgggcgggcctcgtccgcaggtctcatcccacactcttgagaagccttggtcactacagtggtcgcacatgttcctcttcctgttcctgttgacatgtcgttgtttaaataaatctcacttgccacc

SEQ ID NO: 133003 - DNA, 648 bp, Homo sapiens; identical to SEQ ID NO: 128409

SEQ ID NO: 133004 - DNA, 1456 bp, Homo sapiens
  misc_feature (1)...(1456): n = a,t,c or g
cgtcactgagccgcgccagctgagccaggtagggccctaccctcttctgttgctttctccctgtggctcgcgccgtcccccgccgcccgtcgaccccgcttccatgtccctggcggagcacagctcccaggaaccgtccacgcccggtggccagctaggcagaggggaatcctctattatcctcctgctgttccacctcgagctgcgacgcagacgacgagggcgtgcgcggcacctgcgaagatgcttccctgtgcaagaggtttgcagtaagcattggctaactgggcatgacccttacatacaggaccttggtgagactgtctaaacagagagaaagcccctgaaatcaacagaggatattttgctcgagtccatgggtgttcagttcagcttattaaaggcatttttacgggaagacagaatgtcattgttcaaattgttccaaccttggggggcagggcatgggatnaccacctttctgggagattaaaggatgaagatctttcttcccaagtaaatatttttgaggttgactttccaatgattgtcacggagaaagctgcacagtatcaaatggctagccttccccttatccagccccattctagaactgcattcagaggacacacttcagatggcctctgattgcatttgcagatggacacatactggattcaaagagatatgccgttattggagcagatctccgagacctgtctgaactggaagagaagctaaagaaatgtaacatgaatacacaattggccaacaccttgaatagctgaatgtgtgctggtttacatgactccagaggcagtccgcaaacctcctgaagtgggcagcccaacagttttgagagagccatgttcatattactaccaacaggtgaacatgggtgatctgtttgggcagatcatgattgaaaacctgcgtggacgcccagttttgacctggcgggagtggagaccctgcaagtcattagagtcacagaaagaacggctcctgtcggaatgggtgggaaaacaagcatcggcccgtccgaacatgattggagtttgtaccaccagggttaccctcgaagctgaagtgaagcaggatagaatcacttgaaatccctggatgaaaattgggagctgctggagcagctcattcctgcattactgccttttgctgggcaacccaaaggaggaaatgaagccttgggctgaaggagataacttattaatctgtcggaaggcttatgccgagccagaagccgaagccacttgaccctcctggaggagacctgcaagctccctgagcggtgggcgggccctcgtccgcaggtctcatcccacactcttgaagaagccttggtcactacagtggtccgcacatgttcctcttcctgttcctgttgacatgtcgttgtttaaataaatctcacttgccaccagtcaaaaaaaaaaaaaaa

SEQ ID NO: 133005 - DNA, 502 bp, Homo sapiens
  misc_feature (1)...(502): n = a,t,c or g
aaaccgaggcaaataccctcaactgaagagggttacagaatatggaggcaggttggcagagagaaattcatgaacccttcaacatgcntaatctgtatcagaagttggagagtgatccaggacaaggacactactcagtgatcctacctaccgggagctgatagagcagctacgaaacaagccttctgacctgggcacgaaactacaagatccccggatcatgaccactctcagcgtcctccttggggtcgatctgggcagtatggatgaggaggaagagattgcaacacctccaccaccgctgccctcgagttccatgtctctttcccctgcccctagttgctgtctcggctgctctcccatagttggttttttttttatttggggcagtgggcatgttatggggaggggagggggttcttccagcctcaggtcccagctgtctcacgttgtttattctgcgtccccttctccaataaaacaagccagttgggcgtggtta

SEQ ID NO: 133006 - DNA, 1071 bp, Homo sapiens
atggggtttcgctatgttggccaggctgctctcgaactcctgacctcaggagagggtgcaggccttgctggtggtcctggaatgctgggggccgtgggctcttccttcctggcctctggctcccctttgccctcactcccagtactgatgactgcctaccctgctgctggcaagtctatgctgatcctctcttgggcagatttaatgtctggagtccaagggactgtgaggaatgtatccagctggagccgaccttcagtgaagaggtgcaaggagcagccttgggcgctgcggttggataacgcgccacctttcctgtttgtagtcaagggttatacacggaaagccgctgcactggaagcgatgaaggactacaccaaagccatggatgtgtaccagaaggcgctagacctggactccagctgtaaggaggcggcagacggctaccagcgctgtatgatggcgcagtacaaccggcacgacagccccgaagatgtgaagcgacgagccatggccgaccctgaggtgcagcagatcatgagtgacccagccatgcgccttatcctggaacagatgcagaaggacccccaggcactcagcgagactctgccgcccccaggcttgcccaccctgcatgctccaaccccagtgtgttcactggaaaggccgctgtcctgcgcagagctggtggcggacgtgccttgctctactgaagtccacatcctagggcagggcatcacagagctcttctgcccaaacccggaggcctaccagggcctgcccaccttgcctccttccacactctctgtagcagcagccgcagccatggcggggatgaagacagcctccggggactacatcgactcgtcatgggagctgcgggtgtttgtgggagaggaggacccagaggccgagtcggtcaccctgcgggtcactggggagtcgcacatcggcggggtgctcctgaagattgtggagcagatcagcagcgggacagctgtcctcctccaggagctgcaggaccaagtggacctggcacctgtccccaacatcccccccggcagcggctga

SEQ ID NO: 133007 - DNA, 1026 bp, Homo sapiens
gtcaatgagctgaaggagaaaggcaacaaggccctgagcgtgggtaacatcgatgatgccttacagtgctactccgaagctattaagctggatccccacaaccacgtgctgtacagcaaccgttctgctgcctatgccaagaaaggagactaccagaaggcttatgaggatggctgcaagactgtcgacctaaagcctgactggggcaagggctattcacgaaaagcagcagctctagagttcttaaaccgctttgaagaagccaagcgaacctatgaggagggcttaaaacacgaggcaaataaccctcaactgaaagaggagagaaaattcatgaaccctttcaacatgcctaatctgtatcagaagttggagagtgatcccaggacaaggacactactcagtgatcctacctaccgggagctgatagagcagctacgaaacaagccttctgacctgggcacgaaactacaagatccccggatcatgaccactctcagcgtcctccttggggtcgatctgggcagtatggatgaggaggaagagattgcaacacctccaccaccaccccctcccaaaaaggagaccaagccagagccaatggaagaagatcttccagagaataagaagcaggcactgaaagaaaaagagctggggaacgatgcctacaagaagaaagactttgacacagccttgaagcattacgacaaagccaaggagctggaccccactaacatgacttacattaccaatcaagcagcggtatactttgaaaagggcgactacaataagtgccgggagctttgtgagaaggccattgaagtggggagagaaaaccgagaagactatcgacagattgccaaagcatatgctcgaattggcaactcctacttcaaagaagaaaagtacaaggatgccatccatttctataacaagtctctggcagagcaccgaaccccagatgtgctcaagaaatgccagcaggatctaaaagtgacggcagaaagcaccgactttagcccgtga

SEQ ID NO: 133008 - DNA, 2237 bp, Homo sapiens
  misc_feature (1)...(2237): n = a,t,c or g
cccggtagcttctagtatgttccagaaggcggcgcgtgcggttgggaacgcggagcggacggattcgattcaacggtgttccggaccgcgctgcgctatggagcaggtcaatgagctgaaggagaaaggcatcaaggccctgagcgtgggtaacatcgatgatgccttacagttgctactccgaagctatttaagcttggatccccacaaccacgtgctgtacagcaaccgcttctgctgcctatgccaagaaaggagactaccagaaggcttatgaggatggctgcaagactgtcgaccttaaagccttgactggggcaagggctattcacgaaaagcagcagctctagagttcttataccgctttgaagaagccaagcgaacctatgaggagggcttaaaacacgaggcaaataaccctccaactgaaagagggtttacagaatattggaggccaggttggccaaaaagaaaattcatgaaccctttcaacatgcctaatctgtatcagaagttggagagtgatcccaggacaaggacactactcagtgatcctacctaccgggagctgatagagcagctacgaaacaagccttctgacctgggcacgaaactacaagatccccggatcatgaccactctcagcgatctccttggggtcgatctgggcagtatggatgaggaggaagagattgctacacctgcaccaccaccccctgccaaaaaggagaccaagccagagccaatggaagaagatcttccagagaataagaagcaggcactgaaagaaaaagagctggggaacgatgcctacaagaagaaagactttgacacagccttgaagcattacgacaaagccaaggagctggaccccactaacatgacttacattaccaatcaagcagcggtatagntttgaaaagggcgactacaataagtgccgggagctttgtgagaaggccattgaagtggggagagaaagcgcgagaagactatcgacagattgccaaagcatattgctcgaattggcaactcctacttcaaagaagaaaagtacaaggattcccatccatttcttataacaagtctctggcagagcaccgaaccccagatgtgctcaagaaatgccagcaggcagagaaaatcctgaaggagcaagagcggctggcctacataaaccccgacctggctttggaggagaagaacaaaggcaacgagtgtttttcagaaaggggactatccccagggccatgaagcattatacagaagccattcaaaaggaacccgaaagatgccaaattattacagcattcgagctgcctgctacaccaaactcctggagttccagctggcactcaaggactgggaggaatggtatcagctggagccgaccttcatcaagggttatacacggaaagcccgctgcgctggaagcgattgaaggactacaccaaagccatggatgtgtaccaaaaggcgctagacctggacttcagctgtaaggaggcggcagacggctaccagcgctgtattatggcgcagtacaaccggcacgacagccccgaagatgtgaagcgacggggccatggccgaccctgaggtgcagcagttcatgagctgacccagcccatgcgctttatcctgaaacagatgcagaaggaccccccaggcactcagcgaaccctttaaagaaacccgttactgccacgagagatccagaagctgatggatgtggggtctgattgcaaattcggtgatgacttgttcatccccgctttcctttgcccctcatgtggaaagaggagctgggaccgcggcgagcaagcagcacggagcggaagggagagcagcacggagcggaagggagagcagggggagagaaggccttcatccccttatatttatacataacccccgggaagacacagagactcgtacctgcgctgtttgtgccgccgctgcctctgggccctcccagcacacgcatggtctcttcccccctggccctcgaagttccatgtctctttccccttgcccctagttgctgtctcggctgctctcccatagttggttttttttttttatttgggggcagtggggcatgttatgggggagggggagggggttctttccagccttcaggtcccagcttgttttcacgttgtttatttctggcgtcccctttttccaattaaaacaagccagttgggggtggttatatgttaaaaaaaaaaaaa

SEQ ID NO: 133009 - DNA, 328 bp, Homo sapiens; identical to SEQ ID NO: 126749

SEQ ID NO: 133010 - DNA, 247 bp, Homo sapiens; identical to SEQ ID NO: 131245
  misc_feature (1)...(247): n = a,t,c or g

SEQ ID NO: 133011 - DNA, 456 bp, Homo sapiens
gccggaggtgggggagctcattgagaaggtgcgcaaagcgcaccaggaaaccttccctgccctatgccagctgggcaaatacactacgaacaacagctcagaacaacgtgtctctctggacattgacctctgggacaagttcagtgaactctccaccaagtgcatcattaagactgtggagttcgccaagcagctgcccggcttcaccaccctcaccatcgccaacctgtcccacccccgtgccccctccttaccccgcaggacgggcctacaggggggtctcccctcacccctgcacccccagctgggggagctggctctgccccgacctccttcaccaggggttggggccccttcccctggagcccgtgggtgcacctgttactgttgggctttccactgagatctactggataaagaataaagttctatttattctaaaaaaaaaaaaaaaaa

SEQ ID NO: 133012 - DNA, 1944 bp, Homo sapiens
ccgtcctgcgcggttgttctctggagcagcgttcttttatctccgtccgccttctctcctacctaagtgcgtgccgccacccgatggaagattcgatggacatggacatgagccccctgaggccccagaactatcttttcggttgtgaactaaaggccgacaaagattatcactttaaggtggataatgatgaaaatgagcaccagttatctttaagaacggtcagtttaggggctggtgcaaaggatgagttgcacattgttgaagcagaggcaatgaattacgaaggcagtccaattaaagtaacactggcaactttgaaaatgtctgtacagccaacggtttcccttgggggctttgaaataacaccaccagtggtcttaaggttgaagtgtggttcagggccagtgcatattagtggacagcacttagtagccattgagacccagagcagcagttctgaagagatagtgcccagccctccctcgccaccccctctaccccgcatctacaagccttgctttgtctgtcaggacaagtcctcaggctaccactatggggtcagcgcctgtgagggctgcaagggcttcttccgccgcagcatccagaagaacatggtgtacacgtgtcaccgggacaagaactgcatcatcaacaaggtgacccggaaccgctgccagtactgccgactgcagaagtgctttgaagtgggcatgtccaaggagtctgtgagaaacgaccgaaacaagaagaagaaggaggtgcccaagcccgagtgctctgagagctacacgctgacgccggaggtgggggagctcattgagaaggtgcgtaaagcgcaccaggaaaccttccctgccctctgccagctgggcaaatacactacgaacaacagctcagaacaacgtgtctctctggacattgacctctgggacaagttcagtgaactctccaccaagtgcatcattaagactgtggagttcgccaagcagctgcccggcttcaccaccctcaccatcgccgaccagatcaccctcctcaaggctgcctgcctggacatcctgatcctgcggatctgcacgcggtacacgcccgagcaggacaccatgaccttctcggacgggctgaccctgaaccggacccagatgcacaacgctggcttcggccccctcaccgacctggtctttgccttcgccaaccagctgctgcccctggagatggatgatgcggagacggggctgctcagcgccatctgcctcatctgcggagaccgccaggacctggagcagccggaccgggtggacatgctgcaggagccgctgctggaggcgctaaaggtctacgtgcggaagcggaggcccagccgcccccacatgttccccaagatgctaatgaagattactgacctgcgaagcatcagcgccaagggggctgagcgggtgatcacgctgaagatggagatcccgggctccatgccgcctctcatccaggaaatgttggagaactcagagggcctggacactctgagcggacagccggggggtggggggcgggacgggggtggcctggcccccccgccaggcagctgtagccccagcctcagccccagctccaacagaagcagcccggccacccactccccgtgaccgcccacgccacatggacacagccctcgccctccgccccggcttttctctgcctttctaccgaccatgtgaccccgcaccagccctgcccccacctgccctgcccgggagtactggggaccttccctgggggacggggagggaggaggcagcgactccttggacagaggcctgggccctcagtggactgcctgctcccacagcctgggctgacgtcagaggccgaggccaggaactgagtgaggcccctggtcctgggtctcaggatgggtcctgggggcctcgtgttcatcaagac

SEQ ID NO: 133013 - DNA, 844 bp, Homo sapiens
tccagaactatcttttcggttgtgaactaaaggccgacaaagattatcactttaaggtggataatgatgaaaatgagcaccagttatctttaagaacggtcagtttaggggctggtgcaaaggatgagttgcacattgttgaagcagaggcaatgaattacgaaggcagtccaattaaagtaacactggcaactttgaaaatgtctgtacagccaacggtttcccttgggggctttgaaataacaccaccagtggtcttaaggttgaagtgtggttcagggccagtgcatattagtggacagcacttagtagctgtggaggaagatgcagagtcagaagatgaagaggaggaggatgtgaaactctttaagtatatctggaaagcggtctgcccctggaggtggtagcaaggttccacagaaaaaaagtaaaacttgctgctgatgaagatgatgacgatgatgatgaagaggatgatgatgaagatgatgatgatgatgattttgatgatgaggaagctgaagaaaaagcgccagtgaagaaatctatacgagatactccagccaaaaatgcacaaaagtcaaatcagaatggaaaagactcaaaaccatcatcaacaccaagatcaaaaggacaagaatccttcaagaaacaggaaaaaactcctaaaacaccaaaaggacctagttctgtagaagacattaaagcaaaaatgcaagcaagtatagaaaaaggtggttctcttcccaaagtggaagccaaattcatcaactatgtgaagaattgcttccggatgactgaccaagaggctattcaagatctctggcagtggaggaagtctctt

SEQ ID NO: 133014 - DNA, 3052 bp, Homo sapiens
ctccccttcagcttctcttcacgcactccaagatctaaaccgagaatcgaaactaagctggggtccatggagcctgcacccgcccgatctccgaggccccagcaggaccccgcccggccccaggagcccaccatgcctccccccgagaccccctctgaaggccgccagcccagccccagccccagccctacagagcgagcccccgcttcggaggaggagttccagtttctgcgctgccagcaatgccaggcggaagccaagtgcccgaagctgctgccttgtctgcacacgctgtgctcaggatgcctggaggcgtcgggcatgcagtgccccatctgccaggcgccctggcccctaggtgcagacacacccgccctggataacgtctttttcgagagtctgcagcggcgcctgtcggtgtaccggcagattgtggatgcgcaggctgtgtgcacccgctgcaaagagtcggccgacttctggtgctttgagtgcgagcagctcctctgcgccaagtgcttcgaggcacaccagtggttcctcaagcacgaggcccggcccctagcagagctgcgcaaccagtcggtgcgtgagttcctggacggcacccgcaagaccaacaacatcttctgctccaaccccaaccaccgcacccctacgctgaccagcatctactgccgaggatgttccaagccgctgtgctgctcgtgcgcgctccttgacagcagccacagtgagctcaagtgcgacatcagcgcagagatccagcagcgacaggaggagctggacgccatgacgcaggcgctgcaggagcaggatagtgcctttggcgcggttcacgcgcagatgcacgcggccgtcggccagctgggccgcgcgcgtgccgagaccgaggagctgatccgcgagcgcgtgcgccaggtggtagctcacgtgcgggctcaggagcgcgagctgctggaggctgtggacgcgcggtaccagcgcgactacgaggagatggccagtcggctgggccgcctggatgctgtgctgcagcgcatccgcacgggcagcgcgctggtgcagaggatgaagtgctacgcctcggaccaggaggtgctggacatgcacggtttcctgcgccaggcgctctgccgcctgcgccaggaggagccccagagcctgcaagctgccgtgcgcaccgatggcttcgacgagttcaaggtgcgcctgcaggacctcagctcttgcatcacccaggggaaagccattgagacccagagcagcagttctgaagagatagtgcccagccctccctcgccaccccctctaccccgcatctacaagccttgctttgtctgtcaggacaagtcctcaggctaccactatggggtcagcgcctgtgagggctgcaagggcttcttccgccgcagcatccagaagaacatggtgtacacgtgtcaccgggacaagaactgcatcatcaacaaggtgacccggaaccgctgccagtactgccgactgcagaagtgctttgaagtgggcatgtccaaggagtctgtgagaaacgaccgaaacaagaagaagaaggaggtgcccaagcccgagtgctctgagagctacacgctgacgccggaggtgggggagctcattgagaaggtgcgcaaagcgcaccaggaaaccttccctgccctctgccagctgggcaaatacactacgaacaacagctcagaacaacgtgtctctctggacattgacctctgggacaagttcagtgaactctccaccaagtgcatcattaagactgtggagttcgccaagcagctgcccggcttcaccaccctcaccatcgccgaccagatcaccctcctcaaggctgcctgcctggacatcctgatcctgcggatctgcacgcggtacacgcccgagcaggacaccatgaccttctcggacgggctgaccctgaaccggacccagatgcacaacgctggcttcggccccctcaccgacctggtctttgccttcgccaaccagctgctgcccctggagatggatgatgcggagacggggctgctcagcgccatctgcctcatctgcggagaccgccaggacctggagcagccggaccgggtggacatgctgcaggagccgctgctggaggcgctaaaggtctacgtgcggaagcggaggcccagccgcccccacatgttccccaagatgctaatgaagattactgacctgcgaagcatcagcgccaagggggctgagcgggtgatcacgctgaagatggagatcccgggctccatgccgcctctcatccaggaaatgttggagaactcagagggcctggacactctgagcggacagccggggggtggggggcgggacgggggtggcctggcccccccgccaggcagctgtagccccagcctcagccccagctccaacagaagcagcccggccacccactccccgtgaccgcccacgccacatggacacagccctcgccctccgccccggctttttctctgcctttctaccgaccatgtgaccccggccacagccctgcccccaacttggccctccggggcagtactggggaccttccctgggggacggggagggaggaggcagcgactccttggacagaggcctgggccctcagtggactgcctgctcccacagcctgggctgacgtcagaggccgaggcccaggaactgagtgaggcccctggtccctgggtctcaggatgggtccctgggggcctcgtgttcatcaagacacccctctgcccagctcaccacatcttcatcaccagcaaacgccaggacttggctcccccatcctcagaactcacaagccattggctccccagctggggaacctcaacctcccccctgcctcggttggtgacagagggggtgggacaggggcggggggttccccctgtacataccctgccataccaaccccaggtattaattctcgctggttttgtttttattttaatttttttgttttgatttttttaataagaattttcattttaagcacaaaaaaaaaaaaaaa

SEQ ID NO: 133015 - DNA, 2930 bp, Homo sapiens
gccatctgggcccaggccccatgccccgaggaggggtggtctgaagcccaccagagccccctgccagactgtctgcctcccttctgactgtggccgcttggcatggccagcaacagcagctcctgcccgacacctgggggcgggcacctcaatgggtacccggtgcctccctacgccttcttcttcccccctatgctgggtggactctccccgccaggcgctctgaccactctccagcaccagcttccagttagtggatatagcacaccatccccagccaccattgagacccagagcagcagttctgaagagatagtgcccagccctccctcgccaccccctctaccccgcatctacaagccttgctttgtctgtcaggacaagtcctcaggctaccactatggggtcagcgcctgtgagggctgcaagggcttcttccgccgcagcatccagaagaacatggtgtacacgtgtcaccgggacaagaactgcatcatcaacaaggtgacccggaaccgctgccagtactgccgactgcagaagtgctttgaagtgggcatgtccaaggagtctgtgagaaacgaccgaaacaagaagaagaaggaggtgcccaagcccgagtgctctgagagctacacgctgacgccggaggtgggggagctcattgagaaggtgcgcaaagcgcaccagggaaaccttccctgccctctgccagctgggcaaatacactacggaacaacagcttcagaacaacgtgttctctctggacattgacctctgggacaagttcagtgaactctccaccaagtgcattattaaaaatggggaaggtcgccaaggcaggctgcccggcttcaccaccctcaccatcggccgaccagatcaccctcctcaagggctgcctgcctgggacatcctgatcctgcggatctgcacgcggtacacgcccgaggcagggacaccatgaccttcttgggacgggctgaccctgaaccgggacccagatgcacaacgctgggcttcggcccccttcaccgacctggtctttgcctttcgccaaccagctgctgcccctgggagatggatgatggcgggagacggggctgctcagcgccatctgcctcatctgcggagaccgccaggacctggagcagccggaccgggtggacatgctgcaggagccgctgctggaggcgctaaaggtctacgtgcggaagcggaggcccagccgcccccacatgttccccaagatgctaatgaagattactgacctgcgaagcatcagcgccaagggggctgagcgggtgatcacgctgaagatggagatcccgggctccatgccgcctctcatccaggaaatgttggagaactcagagggcctggacactctgagcggacagccggggggtggggggcgggacgggggtggcctggcccccccgccagggcagctgtagccccagcctcagccccagctccaacagaagcagcccggccacccactccccgtgaccgcccacgccacatggacacagccctcgccctccgccccggcttttctctgcctttctaccgaccatgtgaccccgcaccagccctgcccccacctgccctgcccgggcagtactggggaccttccctgggggacggggagggaggaggcagcgactccttggacagaggcctgggccctcagtggactgcctgctcccacagcctgggctgacgtcagaggccgaggccaggaactgagtgaggcccctggtcctgggtctcaggatgggtcctgggggcctcgtgttcatcaagacacccctctgcccagctcaccacatcttcatcaccagcaaacgccaggacttggctcccccatcctcaagaactcacaagccattgctccccagctggggaacctcaacctcccccctgcctcggttggtgacagagggggtgggacaggggcggggggttccccctgtacataccctgccataccaaccccaggtattaattctcgctggttttgtttttattttaatttttttgttttgatttttttaataagaattttcattttaagcacatttatactgaaggaatttgtgctgtgtattggggggagctggatccagagctggagggggtgggtccgggggagggagtggctcggaaggggcccccactctcctttcatgtccctgtgccccccagttctcctcctcagccttttcctcctcagttttctctttaaaactgtgaagtactaactttccaaggcctgccttcccctccctcccactggagaagccgccagcccctttctccctctgcctgaccactgggtgtggacggtgtggggcagccctgaaaggacaggctcctggccttggcacttgcctgcacccaccatgaggcatggagcagggcagagcaagggccccgggacagagttttcccagacctggctcctcggcagagctgcctcccgtcagggcccacatcatctaggctccccagcccccactgtgaaggggctggccaggggcccgagctgcccccacccccggcctcagccaccagcacccccatagggcccccagacaccacacacatgcgcgtgcgcacacacacaaacacacacacactggacagtagatgggccgacacacacttggcccgagttcctccatttccctggcctgccccccacccccaacctgtcccacccccgtgccccctccttaccccgcaggacgggcctacaggggggtctcccctcacccctgcacccccagctgggggagctggctctgccccgacctccttcaccaggggttggggccccttcccctggagcccgtgggtgcacctgttactgttgggctttccactgagatctactggataaagaataaagttctatttattct

SEQ ID NO: 133016 - DNA, 2457 bp, Homo sapiens
tctcaatatcactaataactgggaaaatacaaatcaaaatcatagtaaaatattacctgttttcatggtgctaatattacctgttctcccactgctaatgacatacccgagactgagtaatttataaataaaagagatttaattgactcatagttccacatggctggggaggtcttgcaatcatgacagaaggcaaatgggaagcaaagtcatgtcttatgtggtggcaggcagggggacttgtgcacaggaaactcctatttatacaaccatcagatatcttgaggacaaggaacagtatgggggctccctgggtgttgattccgtcctggcgcggctgttctctggagccagcgttctttttatctccggtccgccgttctcttcctacctaagtggcgtgccccccggtcacccgatggaagattcgatgggacatgggacatgagccccctggaggccccagaactatcttttcggttgtgaactaaaggtccgacaaagattatcactttaaggtggataaatgatgaaaatgagtcaccagttatctttaaggaacggtcaatttagggggcctggttgcaaagggatgagttgcacatttgttgaaggcagaggcaattgaatttacggaggccagtcccaatttaaaagtaaccacctgggcaacttttgaaaatggtctgtaccagcccaacgggttttccccttggggggccttttgaaaataacaccaaccaggtgggtccttaaagggttgaaagtgtgggttcaggggccagtgcatattagtgggacagcactttagtagctgtgggagggaagatgccagagtccagaagatgaagaaggaggaggatgtgaacagggttttatttatgaaaccgaaaggcaggggcctcaagcatatgttcggggatttggtgtgcagttggaaattggcagccattgagacccagagcagcagttctgaagagatagtgcccagccctccctcgccaccccctctaccccgcatctacaagccttgctttgtctgtcaggacaagtcctcaggctaccactatggggtcagcgcctgtgagggctgcaagggcttcttccgccgcagcatccagaagaacatggtgtacacgtgtcaccgggacaagaactgcatcatcaacaaggtgacccggaaccgctgccagtactgccgactgcagaagtgctttgaagtgggcatgtccaaggagtctgtgagaaacgaccgaaacaagaagaagaaggaggtgcccaagcccgagtgctctgagagctacacgctgacgccggaggtgggggagctcattgagaaggtgcgtaaagcgcaccaggaaaccttccctgccctctgccagctgggcaaatacactacgaacaacagctcagaacaacgtgtctctctggacattgacctctgggacaagttcagtgaactctccaccaagtgcatcattaagactgtggagttcgccaagcagctgcccggcttcaccaccctcaccatcgccgaccagatcaccctcctcaaggctgcctgcctggacatcctgatcctgcggatctgcacgcggtacacgcccgagcaggacaccatgaccttctcggacgggctgaccctgaaccggacccagatgcacaacgctggcttcggccccctcaccgacctggtctttgccttcgccaaccagctgctgcccctggagatggatgatgcggagacggggctgctcagcgccatctgcctcatctgcggagaccgccaggacctggagcagccggaccgggtggacatgctgcaggagccgctgctggaggcgctaaaggtctacgtgcggaagcggaggcccagccgcccccacatgttccccaagatgctaatgaagattactgacctgcgaagcatcagcgccaagggggctgagcgggtgatcacgctgaagatggagatcccgggctccatgccgcctctcatccaggaaatgttggagaactcagagggcctggacactctgagcggacagccggggggtggggggcgggacgggggtggcctggcccccccgccaggcagctgtagccccagcctcagccccagctccaacagaagcagcccggccacccactccccgtgaccgcccacgccacatggacacagccctcgccctccgccccggcttttctctgcctttctaccgaccatgtgaccccgcaccagccctgcccccacctgccctgcccgggagtactggggaccttccctgggggacggggagggaggaggcagcgactccttggacagaggcctgggccctcagtggactgcctgctcccacagcctgggctgacgtcagaggccgaggccaggaactgagtgaggcccctggtcctgggtctcaggatgggtcctgggggcctcgtgttcatcaagac

SEQ ID NO: 133017 - DNA, 1113 bp, Homo sapiens
ctcatttctgaaaaattctaagtcatgagaagataagccctatcctttcttacaaggattggatttcctggggtgaccactgtggtgtggtggaagccagcggcttctttccaggttcataaaggccatcataacaacttccaggcttcatggtgtggacagggatccaggagagctgagtggatgtgtgaagtttctgatagattctgtcatcattcccaaaggaatgtagtttcctccagctcaatcatttgaagcaatacacattgccaaatctgactgtaacctgacattttagacctattggagaaataggaagaaagcccctccagtggaaggactggacttggaagaagttctgcaggaaggcgcatgcaattggatagctgttcatgagtgaaacgtggggaacattgctatgaaattgtaaggtttgcacttcatttttcgtagcttaaaaattgctctgttctggctgttgaaaacacttggtgtgaggtttgaatgaggattatataatcattctagtattcataggaaaatgattactgctctcctatttgtaaaacaaaagaaataactttcggaaacagtattttagacatgaggaaattgtttgtattaggcattttgatctaacagaatcagctaaggataagtggatcctggctttacacatttctttgaccaaacccagctggcaacttgaagttgttactgtgtggcttccagattgcctagaggtgaatcctaccaacatcactgttttttttgttttgttttgttttttttgtatgtttttgagacagagtcttgctgctatccccagggctggagtgcagtggcacgttcttggctttactgcaacctcagcctccggggtttcaagggattctcctgcctcagcctcctaagtaactgggattataggtgcactccactacgttcagctaattttgtatttttagtagagacagggtttcaccatgttggcccacgtcggtctcaaactcctgacctcaaggtgatccaccctccttggcctcccaaagtgctggggattacaagggtgtgagccaccatgcctgggcccagacctcttgatatatatca

SEQ ID NO: 133018 - DNA, 1257 bp, Homo sapiens
  misc_feature (1)...(1257): n = a,t,c or g
gcggccggcggcgtctcctccgggacgctgaggggcccgaggagaccgtgaggctctggcctgcagctcgcgccgccatggacgctgccgaggtcgaattcctcgccgagaaggagctggttaccattatccccaacttcagtctggacaagatctacctcatcgggggggacctggggccttttaaccctgggtttacccgtggaagtgcccctgtggctgggcgattaaacctgaaacaaagacagaaaatgtcgcctgctccctccagagtggatggatgtagaaaagttggagaagatgagggatcatgaaccgaaaggaagaaactttttaccccaatgcccaagccctttactacatgggaacttacggaagctcctgtttaaatcatgctttcagacaacatcccgaagggcaggacggaattccgggaccctgggtcaagggtattttggggacattcgtattaggccaaattccgagtgtttggttgacagctttggtgagacagcaggaggcacatgccaagctggattaacttggaccttggatgggagatcaacaaccagcggtgactttcctcacacaagcgcctcaacccacatgtaacaaactcccgcacgaaccctcccagccctctggagagtacctcagtcctcaggacttcctagagaaaggcctggtgcaggcggccttgctgggggatgtgagcgcctcaggacgtgatgaggtactcgtggttctggagctctagaaacacttctgatgcatgaaaaatgtgtgatggtgcaaggaatggattcaggatgtttgttggagaagacaagttttgttgattagtccctaaaaactttagctccctggggacattctttcatttcccacatctgttttctaggaaaccagcgcctttttccccccacttttgagaaataaaaaagcctttaggtaaataagtcattctccctagcagagccacttgggttctcctgcatggaacgccatcacacttgggcaggtgttcagtgactggtaggtgtagatacagcagagaangtggccatgtggtccacggcttttttcacccccttcttgatccctgattttcttggggctgattttagactcttctcacagagggtggctcacagaagaaggatggcagatggtgcagccatcaatgctggccggtgcttatcctttaagccctgatccacaataaaaatggacccaactcaaaaaaaaaaaaaaaaa

SEQ ID NO: 133019 - DNA, 1523 bp, Homo sapiens
  misc_feature (1)...(1523): n = a,t,c or g
cgactccgccgactacgcgccttggggtccgggtcgctttccccgggacctggccggaaactgagccgttcacttccgccaccagccggaagttttctgtcactggacgccaaggagttttcggtggctcaagctgggtacacgagggatcaccatggcgacctcaaatggtgaggaagaagatcgtgtttgtaacggggaacgccaagaagctggaggaggtcgttcagattctaggagataagtttacatgcacttaggtggcacagaaaattgacatgccggagtaccaaggggagccggatgagatttccatacagaaatgtcaggaggcagttcgccaggtacagggacccgtgctggttgaggacacttgtctgagcttcaatgcccttggaggcctccccggcccctacataaaagtgggtttctggagaagttaaagcctcgaaggtctacaccagctcctggcccggnttccgaggacaagtcagccctatgcgctctgcacgttttgcactcaagcacccggggacccaagcccagcccgttgcgccttgtttcagggggccgggaccttcggggccggattcggtggcacccagagggctgccagggactttggctgggactccctgcctttcagcctgatgggatatgagcagacgtacgcagagatgccttaaggcgggagaaggaacgctgttctcccatccgcttccgggccccctgctgggagcctgccagggagtacttttggcaagtttggccaagcttgacttctgcaagctggaaggaaggcccctccaggcccggggatctggggaagggcctagccccaaaaccctccccgcatcggggcagggcacccccctgaaagtacttcccttccagggtttccccatttgtgagggtgtcgaagttaccttaaccgggcctgtcttggaaggaacaactgtctcttgctctgagaaactctgggcaagtggaacgccattctcttgccccttaggagttcacttgctctctcctacagccgccaaggcctggggtcctgaaagcttttggggtgggtaaagctgtacttgggtggggagtgaggggcgtngggggagggaaccatgcaaatcgccttccatggttttttaaatgcagtaaataacatttctggatgagacttgtttccaaaattaaaccagctatatctgttttgnnnnnnnnnnnnnnggggggcccgttttaaaggacccttgggggggccaaattttacccgggctggcgaggtaatagctctctccttatagggggccgtttaaaaacctccctggggatttttgaaaaggacccttactttgggggggggacttaatgggccaacctccctccgaaattttagggctctagggaaaatataaatttttaaagggtatagggggtaaaactacctgcatatcctggctgctgaaaagttttgcttcctgggtttgttttataaaaattttttccccgggacctggggttta

SEQ ID NO: 133020 - DNA, 307 bp, Homo sapiens
  misc_feature (1)...(307): n = a,t,c or g
tacggccgaaaagatggcggtcttggcacctctaattgctctcgtgtattcggtgccgcgactttcacgatggctcgcccaaccttactaccttctgtcggccctgctctctgctgccttcctactcgtgaggaaactnccgccgctctgccacggtctgcccacccaacgcgaagacggtaacccgtgtgactttgactggagagaagtggagatcctgatgtttctcagtgccattntgatgatgaagaaccgcagatccagtacaaagtgagcacatcanccctgaccaagcaacttcctaccc

SEQ ID NO: 133021 - DNA, 5800 bp, Homo sapiens
ctgccagatcagtttgtcaccacccaggctcccttgcctttggctgggtgcaacttccattttaggtgttggatctgagggggaaaaaaaagagagagggagagagagagaaagaagagcaggaaagatcccgaaaggaggaagaggtggcgaaaaatcaactgccctgctggatttgtctttctcagcaccttggcgaagccttgggtttctttcttaaaggactgatttttagaactccacatttgaggtgtgtggcttttgaagaaaatgtatgtactgacgggaaaaggaagataagcaagtcgaatttttgtcttacgaacggccggtttgtgggcgatgctgaccttgaaagacagaaattttcagatttgaaactcaacggaccccaggatcacagtcaccttctatatagcaccatccccaggatgcaggagccggggcagattgtggagacctacacggaggaggatcctgagggagccatgtctgtagtctctgtggagacctcagatgatgggaccactcggcgcacagagaccacggtcaagaaagtagtgaagactgtgacaacacggacagtacagccagtcgctatgggaccagacgggttgcctgtggatgcttcatcagtttctaacaactatatccagactttgggtcgtgatttccgcaagaatggcaatgggggacctggtccctatgtggggcaagctggcactgctacccttcctaggaacttccactaccctcctgatggttatagtcgccactatgaagatggttatccaggtggcagtgataactatggcagtctgtcccgggtgacccgcattgaggagcggtataggcccagcatggaaggctaccgggcacctagtagacaggatgtgtatgggccccaaccccaggttcgggtaggtgggagcagcgtggatctgcatcgctttcatccagagccttatgggctagaggatgaccagcgtagtatgggctatgatgacctggattatggtatgatgtctgattatggcactgcccgtcggactgggacaccctctgaccctcgtcggcgcctcaggagctatgaagacatgattggtgaggaggtgccatcggatcaatactactgggctcctttggcccagcatgagcgaggaagtttagcaagcttggatagcctgcgcaaaggagggcctccacctcctaattggagacagccagagctgccagaggtgatcgccatgcttggattccgcttggatgctgtcaagtccaatgcagctgcatacctgcaacacttatgctaccgcaatgacaaggtgaagactgacgtgcggaagctcaagggcatcccagtactggtgggattgttagaccatcccaaaaaggaagtgcaccttggagcctgtggagctctcaagaatatctcttttggacgtgaccaggataacaagattgccataaaaaactgtgatggtgtgcctgcccttgtgcgattgcttcgaaaggctcgtgatatggaccttactgaagttattaccggaaccctgtggaatctttcatcccatgactcaatcaaaatggagattgtggaccatgcactgcatgccttgacagatgaagtgatcattcctcattctggttgggagcgggaacctaatgaagactgtaagccacgccatattgagtgggaatcggtgctcaccaacacagctggctgccttaggaatgtaagctcagagaggagtgaagctcgccggaaacttcgggaatgtgatggtttagttgatgccctcattttcattgttcaggctgagattgggcagaaggattcagacagcaagcttgtagagaactgtgtttgccttcttcggaacttatcatatcaagttcaccgggagatcccacaggcagagcgttaccaagaggcagctcccaatgttgccaacaatactgggccacatgctgccagttgctttggggccaagaagggcaaagggaaaaaacctatagaggatccagcaaacgatacagtggatttccctaaaagaacgagtccagctcgaggctatgagctcttatttcagccagaggtggttcggatatacatctcacttcttaaggagagcaagactcctgccatcctagaagcctcagctggagctatccagaacttgtgtgctgggcgctggacgtatggtcgatacatccgctctgctctgcgtcaagagaaggctctttctgccatagctgacctcctgactaatgaacatgaacgggtggtgaaagctgcatctggagcactgagaaacctggctgtggatgctcgcaacaaagaattaattggtaaacatgctattcctaacttggtaaagaatctgccaggaggacagcagaactcctcttggaatttctctgaggacactgtcatctctattttgaacactatcaacgaggttatcgctgagaacttggaggctgccaaaaagcttcgagagacacagggtattgagaagctggtgttgatcaacaaatcagggaaccgctcagaaaaagaagttcgagcagcagcacttgtattacagacaatctggggatataaggaactgcggaagccactggaaaaagaaggatggaagaaatcagactttcaggtgaatctaaacaatgcttcccgaagccagagcagtcattcatatgatgatagtactctccctctcattgaccggaaccaaaaatcagataagaaacctgatcgggaagaaattcagatgagcaatatgggatcaaacacaaaatcactagataacaactattccacaccaaatgagagaggagaccacaatagaacactggatcgatcgggggatctaggcgacatggagccattgaagggaacaacacccttgatgcagaagatttagcaccactatctccgttccatctgggcttatatgtacttttattttttggtggtgaaattgactgatgattttcctttttcttcgctggactattgtgccaactgccaggctgcctcctgcccttacagccctaagtggctgccttctttccatcaactcccaacttcttcctgtgaagtttaattgtctcaacgcctccccctcccccattccctccatttttctcccaagaaacctgactcaattatttgcatattttgagaaactgctgcagattagttctttttgccagttttccctggaactcctggccttttgtggaggggagggatggagagaataggaatcttcactagaagccgtgggaagaattggaagttacatgctgtatatgcaatgtccagcagtctgataaactgacgattcttaatcaagatttttttcctgatggggaagggacttttattttcttttagagaggggaaagtgtgagctcttcccttattcctaatggctatttttgaagcaaagaaggccagcaacattggcacatgccacctggcaaaggacccttgagtaagtgaaggtctcctaaaactgggattaagaaaccttgctctcctcatctccaaggcagggaccatcaagaacctacagactccatctcttctgcaagcctcatgccaaccctgggctattgctgctgccccttaaacacaggctgtccttaacccacctctcctgccctgtgatatgtctgctgagttggcctggccatttccaagaggctgtagaaaggggagaatgtcaaggaagacttttggtagagaaggagcagaaagatgtgtttttgggaagaagaagacctctaggaggagctagtaggaatgtacatgaagcaattagtctgaaactggcttccccactcccccgtttctccttttcctatccttataggcctgtcccttgcctctgccctggattggttggcaaactataggacttgatgtacataactcctgtcccttttcccttacaaggtggggattgcccctggctttgcctcttctttgtgcctttggcctggggtgcatctcctcccgcccttccatgtgcctttctttgcctctgcagtctcatttctcataattttgcaaattatattttgttgctttcttacctactattggccctaaatagcagaaagaagagaagtgaccgagagaacctcagattcttcattgaggattggtatagccatgatttcagtcatagcaagcttttgctcaacagcatatgggtgggatttggcaaaaatcctattctgatgaatctcaaagtaaggctggtaagagaagtgagtggtgtgactcttactccttaggtgcccagaatttaccatcatctctgaaggagttacagggaagtggtctccccaattctcccctccctccagtattgccccctctcactttagcatatattaattagcaggttgggctagagaaatcagctgctatgcgggttgattattattattatttctaatccttttccttatttgccttctactccccttaatctaatctaaaagctctgttccatgcaactggagttccttatccctctcttccccttcccttatatattgaggctatggggtaggagaaaagtgcacaacccaccaccccctctactcgtgcattaaaatttcttatttacccttttcccccttcccatttcttcccactttcatctaccttttctggcaaaaaggagccttttgctctctgtgaccctaagagcacactgcacagggaaaattgccccatccagacctggctccactcttgatctctcttgtcctcttctgctcttttcctggtgctcttttttctcggtggggtgtgggtaatagaacagccgtgggcttttggggacctttaacttttttttctctcttttgtttataaaaaacactaaacattcaattccagagaacccaaaatcccaccttcccaccgaacactactaaggggcttgtgttctgctccataccttttctcttttctttctgtcttgttaatgcttttaaaaacaaatgagttttttatataaataaagtttttaaagtgtgtatgtggggggtctgtgtcatttcttcacttcaagctgttatttcttccctgctttgcatctttgttacttccttatgtatcagtgtcctttccagagcaaccagaaggaggttataccaggatttattttgagctcagccccaactctttatcaagcaacattcttgttaactatatgtgaaacattttttcttctgaagattcttaaaaattgaatgtggctgaagttgaacatgggagcttattgctaatttagagataggaaactgaagcataaagaattaatgacttactttaattactggaattcttctgcaacatttgacaaaactaaccttgaataaggcccactgtaatacgtagctctcttaaatataacacttaggactagaagattagaaactaccaatcccaactacgtaataggaaaatgtaggatcaaaaggcccatgtatataagtactgaccactgggccataatgttgcttctcaggctatatgcagtcctttagtcagaagtcaataggcctatttattaatattttacagaccatattacctggattaccagggactatctttgctgcagagatcaagggttaagatctatgggaagatacttatttttctgaggtccttatgtcctgtcatataattaaagactcaagagaatttatgtgaaatgctttctgtatgccccaatctttagattaaaattatatacctgctcct

SEQ ID NO: 133022 - DNA, 5655 bp, Homo sapiens
ctgccagatcagtttgtcaccacccaggctcccttgcctttggctgggtgcaacttccattttaggtgttggatctgagggggaaaaaaaagagagagggagagagagagaaagaagagcaggaaagatcccgaaaggaggaagaggtggcgaaaaatcaactgccctgctggatttgtctttctcagcaccttggcgaagccttgggtttctttcttaaaggactgatttttagaactccacatttgaggatcacagtcaccttctatatagcaccatccccaggatgcaggagccggggcagattgtggagacctacacggaggaggatcctgagggagccatgtctgtagtctctgtggagacctcagatgatgggaccactcggcgcacagagaccacggtcaagaaagtagtgaagactgtgacaacacggacagtacagccagtcgctatgggaccagacgggttgcctgtggatgcttcatcagtttctaacaactatatccagactttgggtcgtgatttccgcaagaatggcaatgggggacctggtccctatgtggggcaagctggcactgctacccttcctaggaacttccactaccctcctgatggttatagtcgccactatgaagatggttatccaggtggcagtgataactatggcagtctgtcccgggtgacccgcattgaggagcggtataggcccagcatggaaggctaccgggcacctagtagacaggatgtgtatgggccccaaccccaggttcgggtaggtgggagcagcgtggatctgcatcgctttcatccagagccttatgggctagaggatgaccagcgtagtatgggctatgatgacctggattatggtatgatgtctgattatggcactgcccgtcggactgggacaccctctgaccctcgtcggcgcctcaggagctatgaagacatgattggtgaggaggtgccatcggatcaatactactgggctcctttggcccagcatgagcgaggaagtttagcaagcttggatagcctgcgcaaaggagggcctccacctcctaattggagacagccagagctgccagaggtgatcgccatgcttggattccgcttggatgctgtcaagtccaatgcagctgcatacctgcaacacttatgctaccgcaatgacaaggtgaagactgacgtgcggaagctcaagggcatcccagtactggtgggattgttagaccatcccaaaaaggaagtgcaccttggagcctgtggagctctcaagaatatctcttttggacgtgaccaggataacaagattgccataaaaaactgtgatggtgtgcctgcccttgtgcgattgcttcgaaaggctcgtgatatggaccttactgaagttattaccggaaccctgtggaatctttcatcccatgactcaatcaaaatggagattgtggaccatgcactgcatgccttgacagatgaagtgatcattcctcattctggttgggagcgggaacctaatgaagactgtaagccacgccatattgagtgggaatcggtgctcaccaacacagctggctgccttaggaatgtaagctcagagaggagtgaagctcgccggaaacttcgggaatgtgatggtttagttgatgccctcattttcattgttcaggctgagattgggcagaaggattcagacagcaagcttgtagagaactgtgtttgccttcttcggaacttatcatatcaagttcaccgggagatcccacaggcagagcgttaccaagaggcagctcccaatgttgccaacaatactgggccacatgctgccagttgctttggggccaagaagggcaaagggaaaaaacctatagaggatccagcaaacgatacagtggatttccctaaaagaacgagtccagctcgaggctatgagctcttatttcagccagaggtggttcggatatacatctcacttcttaaggagagcaagactcctgccatcctagaagcctcagctggagctatccagaacttgtgtgctgggcgctggacgtatggtcgatacatccgctctgctctgcgtcaagagaaggctctttctgccatagctgacctcctgactaatgaacatgaacgggtggtgaaagctgcatctggagcactgagaaacctggctgtggatgctcgcaacaaagaattaattggtaaacatgctattcctaacttggtaaagaatctgccaggaggacagcagaactcctcttggaatttctctgaggacactgtcatctctattttgaacactatcaacgaggttatcgctgagaacttggaggctgccaaaaagcttcgagagacacagggtattgagaagctggtgttgatcaacaaatcagggaaccgctcagaaaaagaagttcgagcagcagcacttgtattacagacaatctggggatataaggaactgcggaagccactggaaaaagaaggatggaagaaatcagactttcaggtgaatctaaacaatgcttcccgaagccagagcagtcattcatatgatgatagtactctccctctcattgaccggaaccaaaaatcagataagaaacctgatcgggaagaaattcagatgagcaatatgggatcaaacacaaaatcactagataacaactattccacaccaaatgagagaggagaccacaatagaacactggatcgatcgggggatctaggcgacatggagccattgaagggaacaacacccttgatgcagaagatttagcaccactatctccgttccatctgggcttatatgtacttttattttttggtggtgaaattgactgatgattttcctttttcttcgctggactattgtgccaactgccaggctgcctcctgcccttacagccctaagtggctgccttctttccatcaactcccaacttcttcctgtgaagtttaattgtctcaacgcctccccctcccccattccctccatttttctcccaagaaacctgactcaattatttgcatattttgagaaactgctgcagattagttctttttgccagttttccctggaactcctggccttttgtggaggggagggatggagagaataggaatcttcactagaagccgtgggaagaattggaagttacatgctgtatatgcaatgtccagcagtctgataaactgacgattcttaatcaagatttttttcctgatggggaagggacttttattttcttttagagaggggaaagtgtgagctcttcccttattcctaatggctatttttgaagcaaagaaggccagcaacattggcacatgccacctggcaaaggacccttgagtaagtgaaggtctcctaaaactgggattaagaaaccttgctctcctcatctccaaggcagggaccatcaagaacctacagactccatctcttctgcaagcctcatgccaaccctgggctattgctgctgccccttaaacacaggctgtccttaacccacctctcctgccctgtgatatgtctgctgagttggcctggccatttccaagaggctgtagaaaggggagaatgtcaaggaagacttttggtagagaaggagcagaaagatgtgtttttgggaagaagaagacctctaggaggagctagtaggaatgtacatgaagcaattagtctgaaactggcttccccactcccccgtttctccttttcctatccttataggcctgtcccttgcctctgccctggattggttggcaaactataggacttgatgtacataactcctgtcccttttcccttacaaggtggggattgcccctggctttgcctcttctttgtgcctttggcctggggtgcatctcctcccgcccttccatgtgcctttctttgcctctgcagtctcatttctcataattttgcaaattatattttgttgctttcttacctactattggccctaaatagcagaaagaagagaagtgaccgagagaacctcagattcttcattgaggattggtatagccatgatttcagtcatagcaagcttttgctcaacagcatatgggtgggatttggcaaaaatcctattctgatgaatctcaaagtaaggctggtaagagaagtgagtggtgtgactcttactccttaggtgcccagaatttaccatcatctctgaaggagttacagggaagtggtctccccaattctcccctccctccagtattgccccctctcactttagcatatattaattagcaggttgggctagagaaatcagctgctatgcgggttgattattattattatttctaatccttttccttatttgccttctactccccttaatctaatctaaaagctctgttccatgcaactggagttccttatccctctcttccccttcccttatatattgaggctatggggtaggagaaaagtgcacaacccaccaccccctctactcgtgcattaaaatttcttatttacccttttcccccttcccatttcttcccactttcatctaccttttctggcaaaaaggagccttttgctctctgtgaccctaagagcacactgcacagggaaaattgccccatccagacctggctccactcttgatctctcttgtcctcttctgctcttttcctggtgctcttttttctcggtggggtgtgggtaatagaacagccgtgggcttttggggacctttaacttttttttctctcttttgtttataaaaaacactaaacattcaattccagagaacccaaaatcccaccttcccaccgaacactactaaggggcttgtgttctgctccataccttttctcttttctttctgtcttgttaatgcttttaaaaacaaatgagttttttatataaataaagtttttaaagtgtgtatgtggggggtctgtgtcatttcttcacttcaagctgttatttcttccctgctttgcatctttgttacttccttatgtatcagtgtcctttccagagcaaccagaaggaggttataccaggatttattttgagctcagccccaactctttatcaagcaacattcttgttaactatatgtgaaacattttttcttctgaagattcttaaaaattgaatgtggctgaagttgaacatgggagcttattgctaatttagagataggaaactgaagcataaagaattaatgacttactttaattactggaattcttctgcaacatttgacaaaactaaccttgaataaggcccactgtaatacgtagctctcttaaatataacacttaggactagaagattagaaactaccaatcccaactacgtaataggaaaatgtaggatcaaaaggcccatgtatataagtactgaccactgggccataatgttgcttctcaggctatatgcagtcctttagtcagaagtcaataggcctatttattaatattttacagaccatattacctggattaccagggactatctttgctgcagagatcaagggttaagatctatgggaagatacttatttttctgaggtccttatgtcctgtcatataattaaagactcaagagaatttatgtgaaatgctttctgtatgccccaatctttagattaaaattatatacctgctcct

SEQ ID NO: 133023 - DNA, 5039 bp, Homo sapiens
ctgccagatcagtttgtcaccacccaggctcccttgcctttggctgggtgcaacttccattttaggtgttggatctgagggggaaaaaaaagagagagggagagagagagaaagaagagcaggaaagatcccgaaaggaggaagaggtggcgaaaaatcaactgccctgctggatttgtctttctcagcaccttggcgaagccttgggtttctttcttaaaggactgatttttagaactccacatttgaggtgtgtggcttttgaagaaaatgtatgtactgacgggaaaaggaagataagcaagtcgaatttttgtcttacggagctatgaagacatgattggtgaggaggtgccatcggatcaatactactgggctcctttggcccagcatgagcgaggaagtttagcaagcttggatagcctgcgcaaaggagggcctccacctcctaattggagacagccagagctgccagaggtgatcgccatgcttggattccgcttggatgctgtcaagtccaatgcagctgcatacctgcaacacttatgctaccgcaatgacaaggtgaagactgacgtgcggaagctcaagggcatcccagtactggtgggattgttagaccatcccaaaaaggaagtgcaccttggagcctgtggagctctcaagaatatctcttttggacgtgaccaggataacaagattgccataaaaaactgtgatggtgtgcctgcccttgtgcgattgcttcgaaaggctcgtgatatggaccttactgaagttattaccggaaccctgtggaatctttcatcccatgactcaatcaaaatggagattgtggaccatgcactgcatgccttgacagatgaagtgatcattcctcattctggttgggagcgggaacctaatgaagactgtaagccacgccatattgagtgggaatcggtgctcaccaacacagctggctgccttaggaatgtaagctcagagaggagtgaagctcgccggaaacttcgggaatgtgatggtttagttgatgccctcattttcattgttcaggctgagattgggcagaaggattcagacagcaagcttgtagagaactgtgtttgccttcttcggaacttatcatatcaagttcaccgggagatcccacaggcagagcgttaccaagaggcagctcccaatgttgccaacaatactgggccacatgctgccagttgctttggggccaagaagggcaaagggaaaaaacctatagaggatccagcaaacgatacagtggatttccctaaaagaacgagtccagctcgaggctatgagctcttatttcagccagaggtggttcggatatacatctcacttcttaaggagagcaagactcctgccatcctagaagcctcagctggagctatccagaacttgtgtgctgggcgctggacgtatggtcgatacatccgctctgctctgcgtcaagagaaggctctttctgccatagctgacctcctgactaatgaacatgaacgggtggtgaaagctgcatctggagcactgagaaacctggctgtggatgctcgcaacaaagaattaattggtaaacatgctattcctaacttggtaaagaatctgccaggaggacagcagaactcctcttggaatttctctgaggacactgtcatctctattttgaacactatcaacgaggttatcgctgagaacttggaggctgccaaaaagcttcgagagacacagggtattgagaagctggtgttgatcaacaaatcagggaaccgctcagaaaaagaagttcgagcagcagcacttgtattacagacaatctggggatataaggaactgcggaagccactggaaaaagaaggatggaagaaatcagactttcaggtgaatctaaacaatgcttcccgaagccagagcagtcattcatatgatgatagtactctccctctcattgaccggaaccaaaaatcagataagaaacctgatcgggaagaaattcagatgagcaatatgggatcaaacacaaaatcactagataacaactattccacaccaaatgagagaggagaccacaatagaacactggatcgatcgggggatctaggcgacatggagccattgaagggaacaacacccttgatgcagaagatttagcaccactatctccgttccatctgggcttatatgtacttttattttttggtggtgaaattgactgatgattttcctttttcttcgctggactattgtgccaactgccaggctgcctcctgcccttacagccctaagtggctgccttctttccatcaactcccaacttcttcctgtgaagtttaattgtctcaacgcctccccctcccccattccctccatttttctcccaagaaacctgactcaattatttgcatattttgagaaactgctgcagattagttctttttgccagttttccctggaactcctggccttttgtggaggggagggatggagagaataggaatcttcactagaagccgtgggaagaattggaagttacatgctgtatatgcaatgtccagcagtctgataaactgacgattcttaatcaagatttttttcctgatggggaagggacttttattttcttttagagaggggaaagtgtgagctcttcccttattcctaatggctatttttgaagcaaagaaggccagcaacattggcacatgccacctggcaaaggacccttgagtaagtgaaggtctcctaaaactgggattaagaaaccttgctctcctcatctccaaggcagggaccatcaagaacctacagactccatctcttctgcaagcctcatgccaaccctgggctattgctgctgccccttaaacacaggctgtccttaacccacctctcctgccctgtgatatgtctgctgagttggcctggccatttccaagaggctgtagaaaggggagaatgtcaaggaagacttttggtagagaaggagcagaaagatgtgtttttgggaagaagaagacctctaggaggagctagtaggaatgtacatgaagcaattagtctgaaactggcttccccactcccccgtttctccttttcctatccttataggcctgtcccttgcctctgccctggattggttggcaaactataggacttgatgtacataactcctgtcccttttcccttacaaggtggggattgcccctggctttgcctcttctttgtgcctttggcctggggtgcatctcctcccgcccttccatgtgcctttctttgcctctgcagtctcatttctcataattttgcaaattatattttgttgctttcttacctactattggccctaaatagcagaaagaagagaagtgaccgagagaacctcagattcttcattgaggattggtatagccatgatttcagtcatagcaagcttttgctcaacagcatatgggtgggatttggcaaaaatcctattctgatgaatctcaaagtaaggctggtaagagaagtgagtggtgtgactcttactccttaggtgcccagaatttaccatcatctctgaaggagttacagggaagtggtctccccaattctcccctccctccagtattgccccctctcactttagcatatattaattagcaggttgggctagagaaatcagctgctatgcgggttgattattattattatttctaatccttttccttatttgccttctactccccttaatctaatctaaaagctctgttccatgcaactggagttccttatccctctcttccccttcccttatatattgaggctatggggtaggagaaaagtgcacaacccaccaccccctctactcgtgcattaaaatttcttatttacccttttcccccttcccatttcttcccactttcatctaccttttctggcaaaaaggagccttttgctctctgtgaccctaagagcacactgcacagggaaaattgccccatccagacctggctccactcttgatctctcttgtcctcttctgctcttttcctggtgctcttttttctcggtggggtgtgggtaatagaacagccgtgggcttttggggacctttaacttttttttctctcttttgtttataaaaaacactaaacattcaattccagagaacccaaaatcccaccttcccaccgaacactactaaggggcttgtgttctgctccataccttttctcttttctttctgtcttgttaatgcttttaaaaacaaatgagttttttatataaataaagtttttaaagtgtgtatgtggggggtctgtgtcatttcttcacttcaagctgttatttcttccctgctttgcatctttgttacttccttatgtatcagtgtcctttccagagcaaccagaaggaggttataccaggatttattttgagctcagccccaactctttatcaagcaacattcttgttaactatatgtgaaacattttttcttctgaagattcttaaaaattgaatgtggctgaagttgaacatgggagcttattgctaatttagagataggaaactgaagcataaagaattaatgacttactttaattactggaattcttctgcaacatttgacaaaactaaccttgaataaggcccactgtaatacgtagctctcttaaatataacacttaggactagaagattagaaactaccaatcccaactacgtaataggaaaatgtaggatcaaaaggcccatgtatataagtactgaccactgggccataatgttgcttctcaggctatatgcagtcctttagtcagaagtcaataggcctatttattaatattttacagaccatattacctggattaccagggactatctttgctgcagagatcaagggttaagatctatgggaagatacttatttttctgaggtccttatgtcctgtcatataattaaagactcaagagaatttatgtgaaatgctttctgtatgccccaatctttagattaaaattatatacctgctcct
